United States Patent Application Publication US 2007/0214517 A1 - sequence listing, part 20

SEQ ID NO: 24932 - DNA, 1507 bp, Arabidopsis thaliana
  misc_feature (1)..(1507): Ceres Seq. ID no. 12339912
  misc_feature: MA Experiment ID: 108434 Result: Down-regulated in Transcription
  misc_feature: MA Experiment 108434 PARAMETER Experiment Name: At_Root_Tips_cDNA_P Parameter: Tissue Value: Root Tips
  misc_feature: MA Experiment ID: 108461 Result: Up-regulated in Transcription
  misc_feature: MA Experiment 108461 PARAMETER Experiment Name: At_Germinating_Seeds_cDNA_P Parameter: Age (day) Value: 1 vs. 0
  misc_feature: MA Experiment 108461 PARAMETER Experiment Name: At_Germinating_Seeds_cDNA_P Parameter: Tissue Value: Germinating Seeds
  misc_feature: MA Experiment ID: 108574 Result: Up-regulated in Transcription
  misc_feature: MA Experiment 108574 PARAMETER Experiment Name: At_Wounding__cDNA_P Parameter: Timepoint (hr) Value: 1
  misc_feature: MA Experiment 108574 PARAMETER Experiment Name: At_Wounding__cDNA_P Parameter: Tissue Value: Aerial
  misc_feature: MA Experiment 108574 PARAMETER Experiment Name: At_Wounding__cDNA_P Parameter: Treatment Value: Wounding vs. No Wounding
  misc_feature: MA Experiment ID: 108579 Result: Up-regulated in Transcription
  misc_feature: MA Experiment 108579 PARAMETER Experiment Name: At_4deg_Cold_cDNA_P Parameter: Temperature (deg C) Value: 4 vs. 22
  misc_feature: MA Experiment 108579 PARAMETER Experiment Name: At_4deg_Cold_cDNA_P Parameter: Timepoint (hr) Value: 6
  misc_feature: MA Experiment 108579 PARAMETER Experiment Name: At_4deg_Cold_cDNA_P Parameter: Tissue Value: Aerial
  misc_feature: MA Experiment ID: 108595 Result: Up-regulated in Transcription
  misc_feature: MA Experiment 108595 PARAMETER Experiment Name: At_Ler-pi_Ovule_cDNA_P Parameter: Plant Line Value: null
  misc_feature: MA Experiment ID: 20000112 Result: Up-regulated in Transcription
  misc_feature: MA Experiment 20000112 PARAMETER Experiment Name: At_42deg_Heat_cDNA_P Parameter: Temperature (deg C) Value: 42 vs. 22
  misc_feature: MA Experiment 20000112 PARAMETER Experiment Name: At_42deg_Heat_cDNA_P Parameter: Timepoint (hr) Value: 2
  misc_feature: MA Experiment 20000112 PARAMETER Experiment Name: At_42deg_Heat_cDNA_P Parameter: Tissue Value: Aerial
  misc_feature: MA Experiment ID: 20000113 Result: Up-regulated in Transcription
  misc_feature: MA Experiment 20000113 PARAMETER Experiment Name: At_42deg_Heat_cDNA_P Parameter: Temperature (deg C) Value: 42 vs. 22
  misc_feature: MA Experiment 20000113 PARAMETER Experiment Name: At_42deg_Heat_cDNA_P Parameter: Timepoint (hr) Value: 8
  misc_feature: MA Experiment 20000113 PARAMETER Experiment Name: At_42deg_Heat_cDNA_P Parameter: Tissue Value: Aerial
  misc_feature: MA Experiment ID: 20000224 Result: Down-regulated in Transcription
  misc_feature: MA Experiment ID: 20000327 Result: Up-regulated in Transcription
  misc_feature: MA Experiment 20000327 PARAMETER Experiment Name: At_42deg_Heat_Sub_P Parameter: Age (day) Value: 14
  misc_feature: MA Experiment 20000327 PARAMETER Experiment Name: At_42deg_Heat_Sub_P Parameter: Organism Value: A. thaliana
  misc_feature: MA Experiment 20000327 PARAMETER Experiment Name: At_42deg_Heat_Sub_P Parameter: Plant Line Value: WS
  misc_feature: MA Experiment 20000327 PARAMETER Experiment Name: At_42deg_Heat_Sub_P Parameter: Temperature (deg C) Value: 42 vs. 22
  misc_feature: MA Experiment 20000327 PARAMETER Experiment Name: At_42deg_Heat_Sub_P Parameter: Timepoint (hr) Value: 1
  misc_feature: MA Experiment 20000327 PARAMETER Experiment Name: At_42deg_Heat_Sub_P Parameter: Tissue Value: Aerial
atgtcgaatctgttggctctcgtcgtcggattcgtaatcgtaattggtcatttgggtattttggtaaatgggttgggtgtgaattggggaacaatggctacacataagctacctccaaagacagtggttcagatgcttaaagacaataacatcaacaaagttaagctttttgatgcggacgagacaaccatgggtgcactcgctggatcgggtcttgaagtgatggtcgctattcccaatgatcagcttaaggttatgactagttacgaccgagccaaagattgggttcgtaagaatgtcactcgttataacttcgatggtggtgtcaatatcacgtttgtagctgttgggaatgagccattcctcaaatcatacaatggatcgttcataaacctcacattccctgcacttgcgaacattcaaaacgctttaaatgaagccggactaggaaactctgtcaaagcaacagtccctttaaacgcggatgtatacgattcaccagcaagcaatcccgttccatctgcaggaagattccgtcccgatatcatcggtcaaatgactcagattgttgactttcttggcaagaacaatgctcccatcacaattaacatctaccctttcttaagtctctatgggaatgatgatttcccactcaactacgccttcttcgatggtgctgaaccgataaacgacaacggtattgattatacaaacgttttcgatgccaatttcgatactttggtgtcgtctttgaaagctgttggtcacggagatatgccaataatcgttggagaagttggttggccaacagagggtgacaaacacgctaatgcaggcagtgcttacagattctacaacgggcttttaccgaggcttggaacaaacaaaggaactccattgagaccaacctacattgaggtatacttgttcggattactcgacgaggatgcaaaaagtatagcaccgggaccgttcgaacgccattggggaatatttaaattcgacgggcaaccaaagtttcctatagatctttcaggtcaaggacagagtaagttcttgattggtgcacaaaacgtgccgtatctacccaacaagtggtgtacgtttaatccagaagccaaggacttgacaaaactcgcggctaatatagattacgcctgcactttctctgattgcacggcgcttggatacggatcttcttgcaatactcttgatgcaaatggaaacgcgtcgtatgcgtttaacatgttctttcaagtgaagaatcaagatgagagtgcttgctattttcaaggtttggccaccattacaacgcagaatatatctcaaggacaatgcaatttccctattcagattgtggcttcctcagcctcttctttttcttgttcgtcttattctttggttgtgttgatcgtttggtttctgttatcagggatgatgttttgaggttagattgaacttgttgaacttagtgagattttgtgagcctaattgttttcttacacat

SEQ ID NO: 24933 - protein, 481 aa, Arabidopsis thaliana
  peptide (1)..(481): Ceres Seq. ID no. 12339913
  misc_feature (32)..(344): Pfam Name: Glycosyl hydrolases family 17 Pfam Description: Glycosyl hydrolases family 17
  misc_feature (6)..(471): Homolog of NCBI NO: 18483232 NR Description: 3-glucanase [Sorghum bicolor]
  misc_feature (19)..(476): Homolog of NCBI NO: 28269434 NR Description: putative beta-1,3 glucanase
  misc_feature (12)..(474): Homolog of NCBI NO: 15238768 NR Description: glycosyl hydrolase family 17; protein id:
  misc_feature (32)..(481): Homolog of NCBI NO: 22330833 NR Description: glycosyl hydrolase family 17; protein id:
  misc_feature (9)..(481): Homolog of NCBI NO: 6223646 NR Description: putative beta-1,3-glucanase [Arabidopsis thaliana]
  misc_feature (3)..(115): Homolog of NCBI NO: 7486246 NR Description: hypothetical protein F27F23.24 - Arabidopsis
  misc_feature (111)..(481): Homolog of NCBI NO: 7486246 NR Description: hypothetical protein F27F23.24 - Arabidopsis
  misc_feature (3)..(481): Homolog of NCBI NO: 15224778 NR Description: glycosyl hydrolase family 17; protein id:
  misc_feature (32)..(481): Homolog of NCBI NO: 25404490 NR Description: hypothetical protein F13O11.7 [imported] -
  misc_feature (1)..(481): Homolog of NCBI NO: 15217739 NR Description: glycosyl hydrolase family 17; protein id:
MSNLLALVVGFVIVIGHLGILVNGLGVNWGTMATHKLPPKTVVQMLKDNNINKVKLFDADETTMGALAGSGLEVMVAIPNDQLKVMTSYDRAKDWVRKNVTRYNFDGGVNITFVAVGNEPFLKSYNGSFINLTFPALANIQNALNEAGLGNSVKATVPLNADVYDSPASNPVPSAGRFRPDIIGQMTQIVDFLGKNNAPITINIYPFLSLYGNDDFPLNYAFFDGAEPINDNGIDYTNVFDANFDTLVSSLKAVGHGDMPIIVGEVGWPTEGDKHANAGSAYRFYNGLLPRLGTNKGTPLRPTYIEVYLFGLLDEDAKSIAPGPFERHWGIFKFDGQPKFPIDLSGQGQSKFLIGAQNVPYLPNKWCTFNPEAKDLTKLAANIDYACTFSDCTALGYGSSCNTLDANGNASYAFNMFFQVKNQDESACYFQGLATITTQNISQGQCNFPIQIVASSASSFSCSSYSLVVLIVWFLLSGMMF

SEQ ID NO: 24934 - protein, 450 aa, Arabidopsis thaliana
  peptide (1)..(450): Ceres Seq. ID no. 12339914
  misc_feature (1)..(313): Pfam Name: Glycosyl hydrolases family 17 Pfam Description: Glycosyl hydrolases family 17
  misc_feature (1)..(440): Homolog of NCBI NO: 18483232 NR Description: 3-glucanase [Sorghum bicolor]
  misc_feature (1)..(445): Homolog of NCBI NO: 28269434 NR Description: putative beta-1,3 glucanase
  misc_feature (1)..(443): Homolog of NCBI NO: 15238768 NR Description: glycosyl hydrolase family 17; protein id:
  misc_feature (1)..(450): Homolog of NCBI NO: 22330833 NR Description: glycosyl hydrolase family 17; protein id:
  misc_feature (1)..(450): Homolog of NCBI NO: 6223646 NR Description: putative beta-1,3-glucanase [Arabidopsis thaliana]
  misc_feature (1)..(84): Homolog of NCBI NO: 7486246 NR Description: hypothetical protein F27F23.24 - Arabidopsis
  misc_feature (80)..(450): Homolog of NCBI NO: 7486246 NR Description: hypothetical protein F27F23.24 - Arabidopsis
  misc_feature (1)..(450): Homolog of NCBI NO: 15224778 NR Description: glycosyl hydrolase family 17; protein id:
  misc_feature (1)..(450): Homolog of NCBI NO: 25404490 NR Description: hypothetical protein F13O11.7 [imported] -
  misc_feature (1)..(450): Homolog of NCBI NO: 15217739 NR Description: glycosyl hydrolase family 17; protein id:
MATHKLPPKTVVQMLKDNNINKVKLFDADETTMGALAGSGLEVMVAIPNDQLKVMTSYDRAKDWVRKNVTRYNFDGGVNITFVAVGNEPFLKSYNGSFINLTFPALANIQNALNEAGLGNSVKATVPLNADVYDSPASNPVPSAGRFRPDIIGQMTQIVDFLGKNNAPITINIYPFLSLYGNDDFPLNYAFFDGAEPINDNGIDYTNVFDANFDTLVSSLKAVGHGDMPIIVGEVGWPTEGDKHANAGSAYRFYNGLLPRLGTNKGTPLRPTYIEVYLFGLLDEDAKSIAPGPFERHWGIFKFDGQPKFPIDLSGQGQSKFLIGAQNVPYLPNKWCTFNPEAKDLTKLAANIDYACTFSDCTALGYGSSCNTLDANGNASYAFNMFFQVKNQDESACYFQGLATITTQNISQGQCNFPIQIVASSASSFSCSSYSLVVLIVWFLLSGMMF

SEQ ID NO: 24935 - protein, 437 aa, Arabidopsis thaliana
  peptide (1)..(437): Ceres Seq. ID no. 12339915
  misc_feature (1)..(300): Pfam Name: Glycosyl hydrolases family 17 Pfam Description: Glycosyl hydrolases family 17
  misc_feature (1)..(427): Homolog of NCBI NO: 18483232 NR Description: 3-glucanase [Sorghum bicolor]
  misc_feature (1)..(432): Homolog of NCBI NO: 28269434 NR Description: putative beta-1,3 glucanase
  misc_feature (1)..(430): Homolog of NCBI NO: 15238768 NR Description: glycosyl hydrolase family 17; protein id:
  misc_feature (1)..(437): Homolog of NCBI NO: 22330833 NR Description: glycosyl hydrolase family 17; protein id:
  misc_feature (1)..(437): Homolog of NCBI NO: 6223646 NR Description: putative beta-1,3-glucanase [Arabidopsis thaliana]
  misc_feature (1)..(71): Homolog of NCBI NO: 7486246 NR Description: hypothetical protein F27F23.24 - Arabidopsis
  misc_feature (67)..(437): Homolog of NCBI NO: 7486246 NR Description: hypothetical protein F27F23.24 - Arabidopsis
  misc_feature (1)..(437): Homolog of NCBI NO: 15224778 NR Description: glycosyl hydrolase family 17; protein id:
  misc_feature (1)..(437): Homolog of NCBI NO: 25404490 NR Description: hypothetical protein F13O11.7 [imported] -
  misc_feature (1)..(437): Homolog of NCBI NO: 15217739 NR Description: glycosyl hydrolase family 17; protein id:
MLKDNNINKVKLFDADETTMGALAGSGLEVMVAIPNDQLKVMTSYDRAKDWVRKNVTRYNFDGGVNITFVAVGNEPFLKSYNGSFINLTFPALANIQNALNEAGLGNSVKATVPLNADVYDSPASNPVPSAGRFRPDIIGQMTQIVDFLGKNNAPITINIYPFLSLYGNDDFPLNYAFFDGAEPINDNGIDYTNVFDANFDTLVSSLKAVGHGDMPIIVGEVGWPTEGDKHANAGSAYRFYNGLLPRLGTNKGTPLRPTYIEVYLFGLLDEDAKSIAPGPFERHWGIFKFDGQPKFPIDLSGQGQSKFLIGAQNVPYLPNKWCTFNPEAKDLTKLAANIDYACTFSDCTALGYGSSCNTLDANGNASYAFNMFFQVKNQDESACYFQGLATITTQNISQGQCNFPIQIVASSASSFSCSSYSLVVLIVWFLLSGMMF

SEQ ID NO: 24936 - DNA, 1401 bp, Arabidopsis thaliana
  misc_feature (1)..(1401): Ceres Seq. ID no. 12577138
  misc_feature: MA Experiment ID: 108435 Result: Down-regulated in Transcription
  misc_feature: MA Experiment 108435 PARAMETER Experiment Name: At_stm_Mutants_cDNA_P Parameter: Plant Line Value: wt Landsburg vs stm
  misc_feature: MA Experiment 108435 PARAMETER Experiment Name: At_stm_Mutants_cDNA_P Parameter: Tissue Value: Shoot Apical Meristem Region
  misc_feature: MA Experiment ID: 108462 Result: Up-regulated in Transcription
  misc_feature: MA Experiment 108462 PARAMETER Experiment Name: At_Germinating_Seeds_cDNA_P Parameter: Age (day) Value: 2 vs. 0
  misc_feature: MA Experiment 108462 PARAMETER Experiment Name: At_Germinating_Seeds_cDNA_P Parameter: Tissue Value: Germinating Seeds
  misc_feature: MA Experiment ID: 108464 Result: Up-regulated in Transcription
  misc_feature: MA Experiment 108464 PARAMETER Experiment Name: At_Germinating_Seeds_cDNA_P Parameter: Age (day) Value: 4 vs. 0
  misc_feature: MA Experiment 108464 PARAMETER Experiment Name: At_Germinating_Seeds_cDNA_P Parameter: Tissue Value: Germinating Seeds
  misc_feature: MA Experiment ID: 108585 Result: Down-regulated in Transcription
  misc_feature: MA Experiment 108585 PARAMETER Experiment Name: At_5mM_NaNP_cDNA_P Parameter: Timepoint (hr) Value: 6
  misc_feature: MA Experiment 108585 PARAMETER Experiment Name: At_5mM_NaNP_cDNA_P Parameter: Tissue Value: Aerial
  misc_feature: MA Experiment 108585 PARAMETER Experiment Name: At_5mM_NaNP_cDNA_P Parameter: Treatment Value: null
  misc_feature: MA Experiment ID: 108595 Result: Down-regulated in Transcription
  misc_feature: MA Experiment 108595 PARAMETER Experiment Name: At_Ler-pi_Ovule_cDNA_P Parameter: Plant Line Value: null
  misc_feature: MA Experiment ID: 20000111 Result: Down-regulated in Transcription
  misc_feature: MA Experiment 20000111 PARAMETER Experiment Name: At_42deg_Heat_cDNA_P Parameter: Temperature (deg C) Value: 42 vs. 22
  misc_feature: MA Experiment 20000111 PARAMETER Experiment Name: At_42deg_Heat_cDNA_P Parameter: Timepoint (hr) Value: 6
  misc_feature: MA Experiment 20000111 PARAMETER Experiment Name: At_42deg_Heat_cDNA_P Parameter: Tissue Value: Aerial
  misc_feature: MA Experiment ID: 20000113 Result: Down-regulated in Transcription
  misc_feature: MA Experiment 20000113 PARAMETER Experiment Name: At_42deg_Heat_cDNA_P Parameter: Temperature (deg C) Value: 42 vs. 22
  misc_feature: MA Experiment 20000113 PARAMETER Experiment Name: At_42deg_Heat_cDNA_P Parameter: Timepoint (hr) Value: 8
  misc_feature: MA Experiment 20000113 PARAMETER Experiment Name: At_42deg_Heat_cDNA_P Parameter: Tissue Value: Aerial
  misc_feature: MA Experiment ID: 20000173 Result: Down-regulated in Transcription
  misc_feature: MA Experiment 20000173 PARAMETER Experiment Name: At_42deg_Heat_P Parameter: Age (day) Value: 14
  misc_feature: MA Experiment 20000173 PARAMETER Experiment Name: At_42deg_Heat_P Parameter: Organism Value: A. thaliana
  misc_feature: MA Experiment 20000173 PARAMETER Experiment Name: At_42deg_Heat_P Parameter: Plant Line Value: WS
  misc_feature: MA Experiment 20000173 PARAMETER Experiment Name: At_42deg_Heat_P Parameter: Temperature (deg C) Value: 42 vs. 22
  misc_feature: MA Experiment 20000173 PARAMETER Experiment Name: At_42deg_Heat_P Parameter: Timepoint (hr) Value: 6
  misc_feature: MA Experiment 20000173 PARAMETER Experiment Name: At_42deg_Heat_P Parameter: Tissue Value: Aerial
  misc_feature: MA Experiment ID: 20000185 Result: Down-regulated in Transcription
  misc_feature: MA Experiment 20000185 PARAMETER Experiment Name: At_Roots__P Parameter: Age (day) Value: 7 vs. 21
  misc_feature: MA Experiment 20000185 PARAMETER Experiment Name: At_Roots__P Parameter: Organism Value: A. thaliana
  misc_feature: MA Experiment 20000185 PARAMETER Experiment Name: At_Roots__P Parameter: Tissue Value: Roots vs. Whole Plant
  misc_feature: MA Experiment ID: 20000227 Result: Down-regulated in Transcription
  misc_feature: MA Experiment 20000227 PARAMETER Experiment Name: At_Root-Tips-vs-Tops_P Parameter: Tissue Value: Root Tips vs. Root Tops
  misc_feature: MA Experiment ID: 20000439 Result: Down-regulated in Transcription
  misc_feature: MA Experiment 20000439 PARAMETER Experiment Name: At_Roots__P Parameter: Age (day) Value: 14 vs. 21
  misc_feature: MA Experiment 20000439 PARAMETER Experiment Name: At_Roots__P Parameter: Organism Value: A. thaliana
  misc_feature: MA Experiment 20000439 PARAMETER Experiment Name: At_Roots__P Parameter: Tissue Value: Roots vs. Whole Plant
  misc_feature: MA Experiment ID: 20001248 Result: Down-regulated in Transcription
  misc_feature: MA Experiment 20001248 PARAMETER Experiment Name: At_Far-red-induction_P Parameter: Age (day) Value: 7
  misc_feature: MA Experiment 20001248 PARAMETER Experiment Name: At_Far-red-induction_P Parameter: Light Value: Far-red vs. White
  misc_feature: MA Experiment 20001248 PARAMETER Experiment Name: At_Far-red-induction_P Parameter: Organism Value: A. thaliana
  misc_feature: MA Experiment 20001248 PARAMETER Experiment Name: At_Far-red-induction_P Parameter: Plant Line Value: Columbia
  misc_feature: MA Experiment 20001248 PARAMETER Experiment Name: At_Far-red-induction_P Parameter: Timepoint (hr) Value: 4
  misc_feature: MA Experiment 20001248 PARAMETER Experiment Name: At_Far-red-induction_P Parameter: Tissue Value: Whole Plant
  misc_feature: MA Experiment ID: 20001557 Result: Down-regulated in Transcription
  misc_feature: MA Experiment 20001557 PARAMETER Experiment Name: At_Drought_Soil_Dry_P Parameter: Age (day) Value: 27
  misc_feature: MA Experiment 20001557 PARAMETER Experiment Name: At_Drought_Soil_Dry_P Parameter: Organism Value: A. thaliana
  misc_feature: MA Experiment 20001557 PARAMETER Experiment Name: At_Drought_Soil_Dry_P Parameter: Plant Line Value: WS
  misc_feature: MA Experiment 20001557 PARAMETER Experiment Name: At_Drought_Soil_Dry_P Parameter: Post Timepoint (hr) Value: 3
  misc_feature: MA Experiment 20001557 PARAMETER Experiment Name: At_Drought_Soil_Dry_P Parameter: Post-Treatment Value: Re-Water vs. No Drought
  misc_feature: MA Experiment 20001557 PARAMETER Experiment Name: At_Drought_Soil_Dry_P Parameter: Timepoint (day) Value: 13
  misc_feature: MA Experiment 20001557 PARAMETER Experiment Name: At_Drought_Soil_Dry_P Parameter: Treatment Value: Drought vs. No Drought
  misc_feature: MA Experiment ID: 20001560 Result: Down-regulated in Transcription
  misc_feature: MA Experiment 20001560 PARAMETER Experiment Name: At_Drought_Soil_Dry_P Parameter: Age (day) Value: 28
  misc_feature: MA Experiment 20001560 PARAMETER Experiment Name: At_Drought_Soil_Dry_P Parameter: Organism Value: A. thaliana
  misc_feature: MA Experiment 20001560 PARAMETER Experiment Name: At_Drought_Soil_Dry_P Parameter: Plant Line Value: WS
  misc_feature: MA Experiment 20001560 PARAMETER Experiment Name: At_Drought_Soil_Dry_P Parameter: Post Timepoint (hr) Value: None
  misc_feature: MA Experiment 20001560 PARAMETER Experiment Name: At_Drought_Soil_Dry_P Parameter: Post-Treatment Value: None
  misc_feature: MA Experiment 20001560 PARAMETER Experiment Name: At_Drought_Soil_Dry_P Parameter: Timepoint (day) Value: 14
  misc_feature: MA Experiment 20001560 PARAMETER Experiment Name: At_Drought_Soil_Dry_P Parameter: Treatment Value: Drought vs. No Drought
atactttttcgaaatatcaaaagaaggaacaaaaatgcaagccatcggtagcagccatggcaggaggctctgcttcaaccactatctctccgattccttctccaaattcctctctccttcttcttctccttcccttctccctcagagatgccattcgttctgtatccccaagcttggaagtagtagtaccaatgagaatggcagaggaagaagtgtaacagtgagagcttcaggagatgaagattctaatgagaactttgctcctcttgctcctgttgagcttgaatctcctgtaggacagcttttggagcagattcttagaactcatcctcatcttttacccgttactgtcgatgagcagctcgagaaattcgccgcggaaagcgagtctcgtaaagctgattcgtcttccacacaagacattctccaaaagaggatatctgaagttagagataaggaaagacgtaaaactttagcagagatcatttactgtttagtggtacacagatttgtggaaaaaggaatctctatgattcctcggattaaaccaacttcagacccagcaggacggatagacttatggccgaatcaagaagagaagctcgaagtcattcactctgcggatgcgttcgagatgatacagagtcacttgtcttcagttcttggagacggaccagcagttggtccgttaagctctatagttcagataggcaaaatcaagctaggaaaactctatgctgcttctgctatgtatggatattttctcagaagagtagaccaaagataccaacttgagagaaccatgaacacacttccgaaacgccctgagaaaaccagagaacggttcgaagaaccttcgcctccttacccgttatgggacccggattccttgatcaggattcaaccagaggaatatgatcccgatgaatacgcgatacaaagaaatgaagatgagtcatcgtcttatggattgagatcatatgttacgtatttggactcggatacgcttcagagatatgccacgatacgttctaaagaagccatgactctgattgagaagcagactcaggcgctctttggacgaccggatataaggatactcgaggatggaaagctcgatacttctaacgacgaggttctgtctctgagtgtctctggacttgcgatgttggttttggaagctgtggcttttgggtctttcttatgggattcagagagttacgttgaatccaaataccatttcctcaaggcttgagtttagtcctccttgacatttgtacctttttgagagtagtgaatgtaaatgttaaatctctcatgtgaaattggtagcaactcctattcgtaaaatgtaataaacttcacttcaaaactttagacttaaatcaagcatattagccc

SEQ ID NO: 24937 - protein, 417 aa, Arabidopsis thaliana
  peptide (1)..(417): Ceres Seq. ID no. 12577139
  misc_feature (12)..(417): Pfam Name: Protein of unknown function (DUF760) Pfam Description: Protein of unknown function (DUF760)
  misc_feature (319)..(412): Homolog of NCBI NO: 18397912 NR Description: expressed protein
  misc_feature (72)..(271): Homolog of NCBI NO: 18397912 NR Description: expressed protein
  misc_feature (293)..(409): Homolog of NCBI NO: 32470642 NR Description: hypothetical protein [Solanum bulbocastanum]
  misc_feature (157)..(415): Homolog of NCBI NO: 13561930 NR Description: unknown [Brassica napus]
  misc_feature (68)..(415): Homolog of NCBI NO: 28301943 NR Description: unknown protein [Oryza sativa (japonica
  misc_feature (36)..(415): Homolog of NCBI NO: 15221185 NR Description: unknown protein
  misc_feature (58)..(415): Homolog of NCBI NO: 18401645 NR Description: expressed protein
  misc_feature (38)..(415): Homolog of NCBI NO: 17064820 NR Description: Unknown protein [Arabidopsis thaliana]
  misc_feature (68)..(417): Homolog of NCBI NO: 32489097 NR Description: OSJNBa0093F12.3 [Oryza sativa (japonica
  misc_feature (12)..(417): Homolog of NCBI NO: 18398302 NR Description: expressed protein
YFFEISKEGTKMQAIGSSHGRRLCFNHYLSDSFSKFLSPSSSPSLLPQRCHSFCIPKLGSSSTNENGRGRSVTVRASGDEDSNENFAPLAPVELESPVGQLLEQILRTHPHLLPVTVDEQLEKFAAESESRKADSSSTQDILQKRISEVRDKERRKTLAEIIYCLVVHRFVEKGISMIPRIKPTSDPAGRIDLWPNQEEKLEVIHSADAFEMIQSHLSSVLGDGPAVGPLSSIVQIGKIKLGKLYAASAMYGYFLRRVDQRYQLERTMNTLPKRPEKTRERFEEPSPPYPLWDPDSLIRIQPEEYDPDEYAIQRNEDESSSYGLRSYVTYLDSDTLQRYATIRSKEAMTLIEKQTQALFGRPDIRILEDGKLDTSNDEVLSLSVSGLAMLVLEAVAFGSFLWDSESYVESKYHFLKA

SEQ ID NO: 24938 - protein, 406 aa, Arabidopsis thaliana
  peptide (1)..(406): Ceres Seq. ID no. 12577140
  misc_feature (1)..(406): Pfam Name: Protein of unknown function (DUF760) Pfam Description: Protein of unknown function (DUF760)
  misc_feature (308)..(401): Homolog of NCBI NO: 18397912 NR Description: expressed protein
  misc_feature (61)..(260): Homolog of NCBI NO: 18397912 NR Description: expressed protein
  misc_feature (282)..(398): Homolog of NCBI NO: 32470642 NR Description: hypothetical protein [Solanum bulbocastanum]
  misc_feature (146)..(404): Homolog of NCBI NO: 13561930 NR Description: unknown [Brassica napus]
  misc_feature (57)..(404): Homolog of NCBI NO: 28301943 NR Description: unknown protein [Oryza sativa (japonica
  misc_feature (25)..(404): Homolog of NCBI NO: 15221185 NR Description: unknown protein
  misc_feature (47)..(404): Homolog of NCBI NO: 18401645 NR Description: expressed protein
  misc_feature (27)..(404): Homolog of NCBI NO: 17064820 NR Description: Unknown protein [Arabidopsis thaliana]
  misc_feature (57)..(406): Homolog of NCBI NO: 32489097 NR Description: OSJNBa0093F12.3 [Oryza sativa (japonica
  misc_feature (1)..(406): Homolog of NCBI NO: 18398302 NR Description: expressed protein
MQAIGSSHGRRLCFNHYLSDSFSKFLSPSSSPSLLPQRCHSFCIPKLGSSSTNENGRGRSVTVRASGDEDSNENFAPLAPVELESPVGQLLEQILRTHPHLLPVTVDEQLEKFAAESESRKADSSSTQDILQKRISEVRDKERRKTLAEIIYCLVVHRFVEKGISMIPRIKPTSDPAGRIDLWPNQEEKLEVIHSADAFEMIQSHLSSVLGDGPAVGPLSSIVQIGKIKLGKLYAASAMYGYFLRRVDQRYQLERTMNTLPKRPEKTRERFEEPSPPYPLWDPDSLIRIQPEEYDPDEYAIQRNEDESSSYGLRSYVTYLDSDTLQRYATIRSKEAMTLIEKQTQALFGRPDIRILEDGKLDTSNDEVLSLSVSGLAMLVLEAVAFGSFLWDSESYVESKYHFLKA

SEQ ID NO: 24939 - protein, 241 aa, Arabidopsis thaliana
  peptide (1)..(241): Ceres Seq. ID no. 12577141
  misc_feature (1)..(241): Pfam Name: Protein of unknown function (DUF760) Pfam Description: Protein of unknown function (DUF760)
  misc_feature (143)..(236): Homolog of NCBI NO: 18397912 NR Description: expressed protein
  misc_feature (1)..(95): Homolog of NCBI NO: 18397912 NR Description: expressed protein
  misc_feature (117)..(233): Homolog of NCBI NO: 32470642 NR Description: hypothetical protein [Solanum bulbocastanum]
  misc_feature (1)..(239): Homolog of NCBI NO: 13561930 NR Description: unknown [Brassica napus]
  misc_feature (1)..(239): Homolog of NCBI NO: 28301943 NR Description: unknown protein [Oryza sativa (japonica
  misc_feature (1)..(239): Homolog of NCBI NO: 15221185 NR Description: unknown protein
  misc_feature (1)..(239): Homolog of NCBI NO: 18401645 NR Description: expressed protein
  misc_feature (1)..(239): Homolog of NCBI NO: 17064820 NR Description: Unknown protein [Arabidopsis thaliana]
  misc_feature (1)..(241): Homolog of NCBI NO: 32489097 NR Description: OSJNBa0093F12.3 [Oryza sativa (japonica
  misc_feature (1)..(241): Homolog of NCBI NO: 18398302 NR Description: expressed protein
MIPRIKPTSDPAGRIDLWPNQEEKLEVIHSADAFEMIQSHLSSVLGDGPAVGPLSSIVQIGKIKLGKLYAASAMYGYFLRRVDQRYQLERTMNTLPKRPEKTRERFEEPSPPYPLWDPDSLIRIQPEEYDPDEYAIQRNEDESSSYGLRSYVTYLDSDTLQRYATIRSKEAMTLIEKQTQALFGRPDIRILEDGKLDTSNDEVLSLSVSGLAMLVLEAVAFGSFLWDSESYVESKYHFLKA

SEQ ID NO: 24940 - DNA, 857 bp, Arabidopsis thaliana
  misc_feature (1)..(857): Ceres Seq. ID no. 12322461
  misc_feature: MA Experiment ID: 108462 Result: Down-regulated in Transcription
  misc_feature: MA Experiment 108462 PARAMETER Experiment Name: At_Germinating_Seeds_cDNA_P Parameter: Age (day) Value: 2 vs. 0
  misc_feature: MA Experiment 108462 PARAMETER Experiment Name: At_Germinating_Seeds_cDNA_P Parameter: Tissue Value: Germinating Seeds
  misc_feature: MA Experiment ID: 108463 Result: Down-regulated in Transcription
  misc_feature: MA Experiment 108463 PARAMETER Experiment Name: At_Germinating_Seeds_cDNA_P Parameter: Age (day) Value: 3 vs. 0
  misc_feature: MA Experiment 108463 PARAMETER Experiment Name: At_Germinating_Seeds_cDNA_P Parameter: Tissue Value: Germinating Seeds
  misc_feature: MA Experiment ID: 108573 Result: Up-regulated in Transcription
  misc_feature: MA Experiment 108573 PARAMETER Experiment Name: At_Drought_cDNA_P Parameter: Timepoint (hr) Value: 6
  misc_feature: MA Experiment 108573 PARAMETER Experiment Name: At_Drought_cDNA_P Parameter: Tissue Value: Aerial
  misc_feature: MA Experiment 108573 PARAMETER Experiment Name: At_Drought_cDNA_P Parameter: Treatment Value: Drought vs. No Drought
  misc_feature: MA Experiment ID: 20000180 Result: Down-regulated in Transcription
  misc_feature: MA Experiment 20000180 PARAMETER Experiment Name: At_Germinating_Seeds_P Parameter: Age (hr) Value: 24 vs. 0
  misc_feature: MA Experiment 20000180 PARAMETER Experiment Name: At_Germinating_Seeds_P Parameter: Tissue Value: Germinating Seeds
  misc_feature: MA Experiment ID: 20000224 Result: Down-regulated in Transcription
  misc_feature: MA Experiment ID: 20001911 Result: Up-regulated in Transcription
  misc_feature: MA Experiment 20001911 PARAMETER Experiment Name: At_Drought_Reproduction_P Parameter: Age (day) Value: 40
  misc_feature: MA Experiment 20001911 PARAMETER Experiment Name: At_Drought_Reproduction_P Parameter: Organism Value: A. thaliana
  misc_feature: MA Experiment 20001911 PARAMETER Experiment Name: At_Drought_Reproduction_P Parameter: Plant Line Value: WS
  misc_feature: MA Experiment 20001911 PARAMETER Experiment Name: At_Drought_Reproduction_P Parameter: Timepoint (day) Value: 10
  misc_feature: MA Experiment 20001911 PARAMETER Experiment Name: At_Drought_Reproduction_P Parameter: Tissue Value: Flowers
  misc_feature: MA Experiment 20001911 PARAMETER Experiment Name: At_Drought_Reproduction_P Parameter: Treatment Value: Drought vs. No Drought
ctctttcttgactctctctcctaaaaatgtctcgattgctctcaaaaaccctaattcccaacggaagattcctcctccgtcgtttcaacgagccggcgattacgacaccaccaaacgtcgtctgtttcagccgccgcttttcatccatcccacaagtcatcgagcttgaaatcgattctaaaaacgaagcggaagcagcaattctcaaaaagctaaacgaattcgtacgaaggatcatcgttcataattcgactccagattggcttccttttgcacctggctcttccttttgggtacctcctcatcagattacggctacaaagatcgccaatttggtcgataaggtgactaatccgttgacggaggaagagtctctttcgctttcgtctccttatggttggccttgttcctctttcttcattcctcctccagatggttcctcatctacacaagaggaagaagctagcgtggagttgaaaatcccggggaatgagatgttggaagtgaagctagcacattatccagatcctatttactcttttaaacctgaagatggtgaagagtgattcgataccttttccagcacgagagagcaggacaggattggaaaaaacagatgacgatcgaaactcaagcagtttgtacatacagttgaaaaccatgggagttatatgatctttgggtgactttatacaccttgtttactatgttttataattgacttaatataattagcttgggggcttcttccacttgccagagtttatggtgatgctcgggtaacttgacaatttcatttataatgacaattcttccctttgacacttgacctaagtgcatataaataatgtcttggc

SEQ ID NO: 24941 - protein, 179 aa, Arabidopsis thaliana
  peptide (1)..(179): Ceres Seq. ID no. 12322462
  misc_feature (106)..(132): Homolog of NCBI NO: 38175698 NR Description: unknown protein [Oryza sativa (japonica
  misc_feature (51)..(107): Homolog of NCBI NO: 38175698 NR Description: unknown protein [Oryza sativa (japonica
  misc_feature (1)..(132): Homolog of NCBI NO: 30685027 NR Description: expressed protein [Arabidopsis thaliana]
  misc_feature (1)..(132): Homolog of NCBI NO: 18394407 NR Description: expressed protein
  misc_feature (5)..(132): Homolog of NCBI NO: 21592720 NR Description: unknown [Arabidopsis thaliana]
  misc_feature (5)..(132): Homolog of NCBI NO: 18412160 NR Description: expressed protein
  misc_feature (5)..(147): Homolog of NCBI NO: 25364101 NR Description: hypothetical protein F9K20.6 [imported] -
  misc_feature (25)..(179): Homolog of NCBI NO: 14423398 NR Description: Unknown protein [Arabidopsis thaliana]
  misc_feature (1)..(179): Homolog of NCBI NO: 18398961 NR Description: expressed protein
MSRLLSKTLIPNGRFLLRRFNEPAITTPPNVVCFSRRFSSIPQVIELEIDSKNEAEAAILKKLNEFVRRIIVHNSTPDWLPFAPGSSFWVPPHQITATKIANLVDKVTNPLTEEESLSLSSPYGWPCSSFFIPPPDGSSSTQEEEASVELKIPGNEMLEVKLAHYPDPIYSFKPEDGEE

SEQ ID NO: 24942 - DNA, 767 bp, Arabidopsis thaliana
  misc_feature (1)..(767): Ceres Seq. ID no. 12322512
  misc_feature: MA Experiment ID: 108434 Result: Down-regulated in Transcription
  misc_feature: MA Experiment 108434 PARAMETER Experiment Name: At_Root_Tips_cDNA_P Parameter: Tissue Value: Root Tips
  misc_feature: MA Experiment ID: 108561 Result: Up-regulated in Transcription
  misc_feature: MA Experiment 108561 PARAMETER Experiment Name: At_100uM_ABA_cDNA_P Parameter: Timepoint (hr) Value: 6
  misc_feature: MA Experiment 108561 PARAMETER Experiment Name: At_100uM_ABA_cDNA_P Parameter: Tissue Value: Aerial
  misc_feature: MA Experiment 108561 PARAMETER Experiment Name: At_100uM_ABA_cDNA_P Parameter: Treatment Value: 100uM ABA vs. No Treatment
  misc_feature: MA Experiment ID: 108576 Result: Up-regulated in Transcription
  misc_feature: MA Experiment 108576 PARAMETER Experiment Name: At_42deg_Heat_cDNA_P Parameter: Temperature (deg C) Value: 42 vs. 22
  misc_feature: MA Experiment 108576 PARAMETER Experiment Name: At_42deg_Heat_cDNA_P Parameter: Timepoint (hr) Value: 1
  misc_feature: MA Experiment 108576 PARAMETER Experiment Name: At_42deg_Heat_cDNA_P Parameter: Tissue Value: Aerial
  misc_feature: MA Experiment ID: 108577 Result: Up-regulated in Transcription
  misc_feature: MA Experiment 108577 PARAMETER Experiment Name: At_42deg_Heat_cDNA_P Parameter: Temperature (deg C) Value: 42 vs. 22
  misc_feature: MA Experiment 108577 PARAMETER Experiment Name: At_42deg_Heat_cDNA_P Parameter: Timepoint (hr) Value: 6
  misc_feature: MA Experiment 108577 PARAMETER Experiment Name: At_42deg_Heat_cDNA_P Parameter: Tissue Value: Aerial
  misc_feature: MA Experiment ID: 108585 Result: Up-regulated in Transcription
  misc_feature: MA Experiment 108585 PARAMETER Experiment Name: At_5mM_NaNP_cDNA_P Parameter: Timepoint (hr) Value: 6
  misc_feature: MA Experiment 108585 PARAMETER Experiment Name: At_5mM_NaNP_cDNA_P Parameter: Tissue Value: Aerial
  misc_feature: MA Experiment 108585 PARAMETER Experiment Name: At_5mM_NaNP_cDNA_P Parameter: Treatment Value: null
  misc_feature: MA Experiment ID: 108595 Result: Up-regulated in Transcription
  misc_feature: MA Experiment 108595 PARAMETER Experiment Name: At_Ler-pi_Ovule_cDNA_P Parameter: Plant Line Value: null
  misc_feature: MA Experiment ID: 108609 Result: Up-regulated in Transcription
  misc_feature: MA Experiment 108609 PARAMETER Experiment Name: At_100uM_ABA_cDNA_P Parameter: Timepoint (hr) Value: 24
  misc_feature: MA Experiment 108609 PARAMETER Experiment Name: At_100uM_ABA_cDNA_P Parameter: Tissue Value: Aerial
  misc_feature: MA Experiment 108609 PARAMETER Experiment Name: At_100uM_ABA_cDNA_P Parameter: Treatment Value: 100uM ABA vs. No Treatment
  misc_feature: MA Experiment ID: 20000069 Result: Up-regulated in Transcription
  misc_feature: MA Experiment 20000069 PARAMETER Experiment Name: At_100uM_ABA_Mutants_cDNA_P Parameter: Plant Line Value: CS23
  misc_feature: MA Experiment 20000069 PARAMETER Experiment Name: At_100uM_ABA_Mutants_cDNA_P Parameter: Timepoint (hr) Value: 6
  misc_feature: MA Experiment 20000069 PARAMETER Experiment Name: At_100uM_ABA_Mutants_cDNA_P Parameter: Tissue Value: Aerial
  misc_feature: MA Experiment 20000069 PARAMETER Experiment Name: At_100uM_ABA_Mutants_cDNA_P Parameter: Treatment Value: 100uM ABA vs. No Treatment
  misc_feature: MA Experiment ID: 20000070 Result: Up-regulated in Transcription
  misc_feature: MA Experiment 20000070 PARAMETER Experiment Name: At_100uM_ABA_Mutants_cDNA_P Parameter: Plant Line Value: CS24
  misc_feature: MA Experiment 20000070 PARAMETER Experiment Name: At_100uM_ABA_Mutants_cDNA_P Parameter: Timepoint (hr) Value: 6
  misc_feature: MA Experiment 20000070 PARAMETER Experiment Name: At_100uM_ABA_Mutants_cDNA_P Parameter: Tissue Value: Aerial
  misc_feature: MA Experiment 20000070 PARAMETER Experiment Name: At_100uM_ABA_Mutants_cDNA_P Parameter: Treatment Value: 100uM ABA vs. No Treatment
  misc_feature: MA Experiment ID: 20000071 Result: Up-regulated in Transcription
  misc_feature: MA Experiment 20000071 PARAMETER Experiment Name: At_100uM_ABA_Mutants_cDNA_P Parameter: Plant Line Value: CS8104
  misc_feature: MA Experiment 20000071 PARAMETER Experiment Name: At_100uM_ABA_Mutants_cDNA_P Parameter: Timepoint (hr) Value: 6
  misc_feature: MA Experiment 20000071 PARAMETER Experiment Name: At_100uM_ABA_Mutants_cDNA_P Parameter: Tissue Value: Aerial
  misc_feature: MA Experiment 20000071 PARAMETER Experiment Name: At_100uM_ABA_Mutants_cDNA_P Parameter: Treatment Value: 100uM ABA vs. No Treatment
  misc_feature: MA Experiment ID: 20000072 Result: Up-regulated in Transcription
  misc_feature: MA Experiment 20000072 PARAMETER Experiment Name: At_100uM_ABA_Mutants_cDNA_P Parameter: Plant Line Value: CS8105
  misc_feature: MA Experiment 20000072 PARAMETER Experiment Name: At_100uM_ABA_Mutants_cDNA_P Parameter: Timepoint (hr) Value: 6
  misc_feature: MA Experiment 20000072 PARAMETER Experiment Name: At_100uM_ABA_Mutants_cDNA_P Parameter: Tissue Value: Aerial
  misc_feature: MA Experiment 20000072 PARAMETER Experiment Name: At_100uM_ABA_Mutants_cDNA_P Parameter: Treatment Value: 100uM ABA vs. No Treatment
  misc_feature: MA Experiment ID: 20000086 Result: Up-regulated in Transcription
  misc_feature: MA Experiment 20000086 PARAMETER Experiment Name: At_100uM_ABA_Mutants_cDNA_P Parameter: Plant Line Value: CS22
  misc_feature: MA Experiment 20000086 PARAMETER Experiment Name: At_100uM_ABA_Mutants_cDNA_P Parameter: Timepoint (hr) Value: 6
  misc_feature: MA Experiment 20000086 PARAMETER Experiment Name: At_100uM_ABA_Mutants_cDNA_P Parameter: Tissue Value: Aerial
  misc_feature: MA Experiment 20000086 PARAMETER Experiment Name: At_100uM_ABA_Mutants_cDNA_P Parameter: Treatment Value: 100uM ABA vs. No Treatment
  misc_feature: MA Experiment ID: 20000087 Result: Up-regulated in Transcription
  misc_feature: MA Experiment 20000087 PARAMETER Experiment Name: At_100uM_ABA_Mutants_cDNA_P Parameter: Plant Line Value: WS
  misc_feature: MA Experiment 20000087 PARAMETER Experiment Name: At_100uM_ABA_Mutants_cDNA_P Parameter: Timepoint (hr) Value: 6
  misc_feature: MA Experiment 20000087 PARAMETER Experiment Name: At_100uM_ABA_Mutants_cDNA_P Parameter: Tissue Value: Aerial
  misc_feature: MA Experiment 20000087 PARAMETER Experiment Name: At_100uM_ABA_Mutants_cDNA_P Parameter: Treatment Value: 100uM ABA vs. No Treatment
  misc_feature: MA Experiment ID: 20000088 Result: Up-regulated in Transcription
  misc_feature: MA Experiment 20000088 PARAMETER Experiment Name: At_100uM_ABA_Mutants_cDNA_P Parameter: Plant Line Value: Landsberg
  misc_feature: MA Experiment 20000088 PARAMETER Experiment Name: At_100uM_ABA_Mutants_cDNA_P Parameter: Timepoint (hr) Value: 6
  misc_feature: MA Experiment 20000088 PARAMETER Experiment Name: At_100uM_ABA_Mutants_cDNA_P Parameter: Tissue Value: Aerial
  misc_feature: MA Experiment 20000088 PARAMETER Experiment Name: At_100uM_ABA_Mutants_cDNA_P Parameter: Treatment Value: 100uM ABA vs. No Treatment
  misc_feature: MA Experiment ID: 20000093 Result: Up-regulated in Transcription
  misc_feature: MA Experiment 20000093 PARAMETER Experiment Name: At_42deg_Heat_cDNA_P Parameter: Temperature (deg C) Value: 42 vs. 22
  misc_feature: MA Experiment 20000093 PARAMETER Experiment Name: At_42deg_Heat_cDNA_P Parameter: Timepoint (hr) Value: 0.5
  misc_feature: MA Experiment 20000093 PARAMETER Experiment Name: At_42deg_Heat_cDNA_P Parameter: Tissue Value: Aerial
  misc_feature: MA Experiment ID: 20000111 Result: Up-regulated in Transcription
  misc_feature: MA Experiment 20000111 PARAMETER Experiment Name: At_42deg_Heat_cDNA_P Parameter: Temperature (deg C) Value: 42 vs. 22
  misc_feature: MA Experiment 20000111 PARAMETER Experiment Name: At_42deg_Heat_cDNA_P Parameter: Timepoint (hr) Value: 6
  misc_feature: MA Experiment 20000111 PARAMETER Experiment Name: At_42deg_Heat_cDNA_P Parameter: Tissue Value: Aerial
  misc_feature: MA Experiment ID: 20000112 Result: Up-regulated in Transcription
  misc_feature: MA Experiment 20000112 PARAMETER Experiment Name: At_42deg_Heat_cDNA_P Parameter: Temperature (deg C) Value: 42 vs. 22
  misc_feature: MA Experiment 20000112 PARAMETER Experiment Name: At_42deg_Heat_cDNA_P Parameter: Timepoint (hr) Value: 2
  misc_feature: MA Experiment 20000112 PARAMETER Experiment Name: At_42deg_Heat_cDNA_P Parameter: Tissue Value: Aerial
  misc_feature: MA Experiment ID: 20000113 Result: Up-regulated in Transcription
  misc_feature: MA Experiment 20000113 PARAMETER Experiment Name: At_42deg_Heat_cDNA_P Parameter: Temperature (deg C) Value: 42 vs. 22
  misc_feature: MA Experiment 20000113 PARAMETER Experiment Name: At_42deg_Heat_cDNA_P Parameter: Timepoint (hr) Value: 8
  misc_feature: MA Experiment 20000113 PARAMETER Experiment Name: At_42deg_Heat_cDNA_P Parameter: Tissue Value: Aerial
  misc_feature: MA Experiment ID: 20000117 Result: Up-regulated in Transcription
  misc_feature: MA Experiment 20000117 PARAMETER Experiment Name: At_100uM_ABA_Mutants_cDNA_P Parameter: Plant Line Value: Columbia
  misc_feature: MA Experiment 20000117 PARAMETER Experiment Name: At_100uM_ABA_Mutants_cDNA_P Parameter: Timepoint (hr) Value: 6
  misc_feature: MA Experiment 20000117 PARAMETER Experiment Name: At_100uM_ABA_Mutants_cDNA_P Parameter: Tissue Value: Aerial
  misc_feature: MA Experiment 20000117 PARAMETER Experiment Name: At_100uM_ABA_Mutants_cDNA_P Parameter: Treatment Value: 100uM ABA vs. No Treatment
  misc_feature: MA Experiment ID: 20000144 Result: Up-regulated in Transcription
  misc_feature: MA Experiment 20000144 PARAMETER Experiment Name: At_42deg_Heat_cDNA_P Parameter: Temperature (deg C) Value: 42 vs. 22
  misc_feature: MA Experiment 20000144 PARAMETER Experiment Name: At_42deg_Heat_cDNA_P Parameter: Timepoint (hr) Value: 1
  misc_feature: MA Experiment 20000144 PARAMETER Experiment Name: At_42deg_Heat_cDNA_P Parameter: Tissue Value: Aerial
aagagatcatcgagagggcaagagagaaatgggaaaggcacgtacggtgggagtgggaatggactattctccgacgagcaaattagctctccggtgggcggcggagaatctccttgaagacggcgacaccgtcatcttgattcacgtccaaccacaaaacgcctatcatacccgcaaaatcctcttcgaggaaaccggttcacgtatttaacttactacatctctttaatatatattagtagagttaactccatattatgatcaaaatttgtattttgatcatttaaaagttacaaactaattattgcagcgctaattcctttggaggaatttagagaggttaatttgtctaaacagtatggacttgcttacgatcctgaggttcttgatgttcttgatactctctctagggctaaaaaggtgaaggttgtagcaaaggtgtattggggagatccaagggagaaactttgtgatgctgtcgaaaatctaaaactcgattccattgttcttggcagtcgaggtttgggttctctcaaaaggatcttgctgggtagtgtgagcaatcatgtggtgacaaatgcaacatgtcctgtcacagttgttaaggctaattaaagtgtctcttgttctttaattggacccagttaataacattagtagttacgtgtgtcactcatgcattgttttgacatttatacgtttgttgccttctacaaatttgtgtgaaactgattggtactgtttcattaataaatttcagttaaatg

SEQ ID NO: 24943 - protein, 69 aa, Arabidopsis thaliana
  peptide (1)..(69): Ceres Seq. ID no. 12322513
  misc_feature (12)..(67): Pfam Name: Universal stress protein family Pfam Description: Universal stress protein family
  misc_feature (10)..(67): Homolog of NCBI NO: 21555070 NR Description: unknown [Arabidopsis thaliana]
  misc_feature (10)..(67): Homolog of NCBI NO: 15528707 NR Description: P0583G08.8 [Oryza sativa (japonica
  misc_feature (9)..(67): Homolog of NCBI NO: 18401345 NR Description: expressed protein
  misc_feature (10)..(67): Homolog of NCBI NO: 11602749 NR Description: early nodulin ENOD18 [Vicia faba]
  misc_feature (14)..(67): Homolog of NCBI NO: 11602751 NR Description: ENOD18 protein [Vicia faba]
  misc_feature (10)..(67): Homolog of NCBI NO: 11602747 NR Description: early nodulin ENOD18 [Vicia faba]
  misc_feature (10)..(67): Homolog of NCBI NO: 30693971 NR Description: expressed protein [Arabidopsis thaliana]
  misc_feature (9)..(67): Homolog of NCBI NO: 20160561 NR Description: P0414E03.3 [Oryza sativa (japonica
  misc_feature (10)..(67): Homolog of NCBI NO: 18396497 NR Description: expressed protein
  misc_feature (10)..(67): Homolog of NCBI NO: 30678807 NR Description: expressed protein [Arabidopsis thaliana]
RDHREGKREMGKARTVGVGMDYSPTSKLALRWAAENLLEDGDTVILIHVQPQNAYHTRKILFEETGSRI

SEQ ID NO: 24944 - protein, 60 aa, Arabidopsis thaliana
  peptide (1)..(60): Ceres Seq. ID no. 12322514
  misc_feature (3)..(58): Pfam Name: Universal stress protein family Pfam Description: Universal stress protein family
  misc_feature (1)..(58): Homolog of NCBI NO: 21555070 NR Description: unknown [Arabidopsis thaliana]
  misc_feature (1)..(58): Homolog of NCBI NO: 15528707 NR Description: P0583G08.8 [Oryza sativa (japonica
  misc_feature (1)..(58): Homolog of NCBI NO: 18401345 NR Description: expressed protein
  misc_feature (1)..(58): Homolog of NCBI NO: 11602749 NR Description: early nodulin ENOD18 [Vicia faba]
  misc_feature (5)..(58): Homolog of NCBI NO: 11602751 NR Description: ENOD18 protein [Vicia faba]
  misc_feature (1)..(58): Homolog of NCBI NO: 11602747 NR Description: early nodulin ENOD18 [Vicia faba]
  misc_feature (1)..(58): Homolog of NCBI NO: 30693971 NR Description: expressed protein [Arabidopsis thaliana]
  misc_feature (1)..(58): Homolog of NCBI NO: 20160561 NR Description: P0414E03.3 [Oryza sativa (japonica
  misc_feature (1)..(58): Homolog of NCBI NO: 18396497 NR Description: expressed protein
  misc_feature (1)..(58): Homolog of NCBI NO: 30678807 NR Description: expressed protein [Arabidopsis thaliana]
MGKARTVGVGMDYSPTSKLALRWAAENLLEDGDTVILIHVQPQNAYHTRKILFEETGSRI

SEQ ID NO: 24945 - protein, 50 aa, Arabidopsis thaliana
  peptide (1)..(50): Ceres Seq. ID no. 12322515
  misc_feature (1)..(48): Homolog of NCBI NO: 21555070 NR Description: unknown [Arabidopsis thaliana]
  misc_feature (1)..(48): Homolog of NCBI NO: 15528707 NR Description: P0583G08.8 [Oryza sativa (japonica
  misc_feature (1)..(48): Homolog of NCBI NO: 18401345 NR Description: expressed protein
  misc_feature (1)..(48): Homolog of NCBI NO: 11602749 NR Description: early nodulin ENOD18 [Vicia faba]
  misc_feature (1)..(48): Homolog of NCBI NO: 11602751 NR Description: ENOD18 protein [Vicia faba]
  misc_feature (1)..(48): Homolog of NCBI NO: 11602747 NR Description: early nodulin ENOD18 [Vicia faba]
  misc_feature (1)..(48): Homolog of NCBI NO: 30693971 NR Description: expressed protein [Arabidopsis thaliana]
  misc_feature (1)..(48): Homolog of NCBI NO: 20160561 NR Description: P0414E03.3 [Oryza sativa (japonica
  misc_feature (1)..(48): Homolog of NCBI NO: 18396497 NR Description: expressed protein
  misc_feature (1)..(48): Homolog of NCBI NO: 30678807 NR Description: expressed protein [Arabidopsis thaliana]
MDYSPTSKLALRWAAENLLEDGDTVILIHVQPQNAYHTRKILFEETGSRI

SEQ ID NO: 24946 - DNA, 1433 bp, Arabidopsis thaliana
  misc_feature (1)..(1433): Ceres Seq. ID no. 12337854
  misc_feature: MA Experiment ID: 20000171 Result: Up-regulated in Transcription
  misc_feature: MA Experiment 20000171 PARAMETER Experiment Name: At_42deg_Heat_P Parameter: Age (day) Value: 14
  misc_feature: MA Experiment 20000171 PARAMETER Experiment Name: At_42deg_Heat_P Parameter: Organism Value: A. thaliana
  misc_feature: MA Experiment 20000171 PARAMETER Experiment Name: At_42deg_Heat_P Parameter: Plant Line Value: WS
  misc_feature: MA Experiment 20000171 PARAMETER Experiment Name: At_42deg_Heat_P Parameter: Temperature (deg C) Value: 42 vs. 22
  misc_feature: MA Experiment 20000171 PARAMETER Experiment Name: At_42deg_Heat_P Parameter: Timepoint (hr) Value: 1
  misc_feature: MA Experiment 20000171 PARAMETER Experiment Name: At_42deg_Heat_P Parameter: Tissue Value: Aerial
  misc_feature: MA Experiment ID: 20000173 Result: Up-regulated in Transcription
  misc_feature: MA Experiment 20000173 PARAMETER Experiment Name: At_42deg_Heat_P Parameter: Age (day) Value: 14
  misc_feature: MA Experiment 20000173 PARAMETER Experiment Name: At_42deg_Heat_P Parameter: Organism Value: A. thaliana
  misc_feature: MA Experiment 20000173 PARAMETER Experiment Name: At_42deg_Heat_P Parameter: Plant Line Value: WS
  misc_feature: MA Experiment 20000173 PARAMETER Experiment Name: At_42deg_Heat_P Parameter: Temperature (deg C) Value: 42 vs. 22
  misc_feature: MA Experiment 20000173 PARAMETER Experiment Name: At_42deg_Heat_P Parameter: Timepoint (hr) Value: 6
  misc_feature: MA Experiment 20000173 PARAMETER Experiment Name: At_42deg_Heat_P Parameter: Tissue Value: Aerial
  misc_feature: MA Experiment ID: 20000179 Result: Up-regulated in Transcription
  misc_feature: MA Experiment 20000179 PARAMETER Experiment Name: At_Germinating_Seeds_P Parameter: Age (hr) Value: 6 vs. 0
  misc_feature: MA Experiment 20000179 PARAMETER Experiment Name: At_Germinating_Seeds_P Parameter: Tissue Value: Germinating Seeds
  misc_feature: MA Experiment ID: 20000180 Result: Up-regulated in Transcription
  misc_feature: MA Experiment 20000180 PARAMETER Experiment Name: At_Germinating_Seeds_P Parameter: Age (hr) Value: 24 vs. 0
  misc_feature: MA Experiment 20000180 PARAMETER Experiment Name: At_Germinating_Seeds_P Parameter: Tissue Value: Germinating Seeds
  misc_feature: MA Experiment ID: 20000182 Result: Down-regulated in Transcription
  misc_feature: MA Experiment 20000182 PARAMETER Experiment Name: At_2mM_SA_P Parameter: Age (day) Value: 14
  misc_feature: MA Experiment 20000182 PARAMETER Experiment Name: At_2mM_SA_P Parameter: Organism Value: A. thaliana
  misc_feature: MA Experiment 20000182 PARAMETER Experiment Name: At_2mM_SA_P Parameter: Plant Line Value: WS
  misc_feature: MA Experiment 20000182 PARAMETER Experiment Name: At_2mM_SA_P Parameter: Timepoint (hr) Value: 6
  misc_feature: MA Experiment 20000182 PARAMETER Experiment Name: At_2mM_SA_P Parameter: Tissue Value: Aerial
  misc_feature: MA Experiment 20000182 PARAMETER Experiment Name: At_2mM_SA_P Parameter: Treatment Value: 2mM SA vs. No Treatment
  misc_feature: MA Experiment ID: 20000184 Result: Up-regulated in Transcription
  misc_feature: MA Experiment 20000184 PARAMETER Experiment Name: At_Shoots__P Parameter: Age (day) Value: 7
  misc_feature: MA Experiment 20000184 PARAMETER Experiment Name: At_Shoots__P Parameter: Tissue Value: Shoots vs. Whole Plant
  misc_feature: MA Experiment ID: 20000185 Result: Up-regulated in Transcription
  misc_feature: MA Experiment 20000185 PARAMETER Experiment Name: At_Roots__P Parameter: Age (day) Value: 7 vs. 21
  misc_feature: MA Experiment 20000185 PARAMETER Experiment Name: At_Roots__P Parameter: Organism Value: A. thaliana
  misc_feature: MA Experiment 20000185 PARAMETER Experiment Name: At_Roots__P Parameter: Tissue Value: Roots vs. Whole Plant
  misc_feature: MA Experiment ID: 20000264 Result: Down-regulated in Transcription
  misc_feature: MA Experiment 20000264 PARAMETER Experiment Name: At_Open_Flower_P Parameter: Age (day) Value: 21
  misc_feature: MA Experiment 20000264 PARAMETER Experiment Name: At_Open_Flower_P Parameter: Plant Line Value: WS
  misc_feature: MA Experiment 20000264 PARAMETER Experiment Name: At_Open_Flower_P Parameter: Tissue Value: Open Flower vs. Whole Plant
  misc_feature: MA Experiment ID: 20000439 Result: Up-regulated in Transcription
  misc_feature: MA Experiment 20000439 PARAMETER Experiment Name: At_Roots__P Parameter: Age (day) Value: 14 vs. 21
  misc_feature: MA Experiment 20000439 PARAMETER Experiment Name: At_Roots__P Parameter: Organism Value: A. thaliana
  misc_feature: MA Experiment 20000439 PARAMETER Experiment Name: At_Roots__P Parameter: Tissue Value: Roots vs. Whole Plant
  misc_feature: MA Experiment ID: 20000495 Result: Up-regulated in Transcription
  misc_feature: MA Experiment 20000495 PARAMETER Experiment Name: At_Guard_Cells_P Parameter: Harvest Date Value: 8/2/2002
  misc_feature: MA Experiment 20000495 PARAMETER Experiment Name: At_Guard_Cells_P Parameter: Organism Value: A. thaliana
  misc_feature: MA Experiment 20000495 PARAMETER Experiment Name: At_Guard_Cells_P Parameter: Tissue Value: Guard Cells vs. Leaves
  misc_feature: MA Experiment ID: 20000527 Result: Down-regulated in Transcription
  misc_feature: MA Experiment 20000527 PARAMETER Experiment Name: At_10percent_PEG_P Parameter: Age (day) Value: 20
  misc_feature: MA Experiment 20000527 PARAMETER Experiment Name: At_10percent_PEG_P Parameter: Organism Value: A. thaliana
  misc_feature: MA Experiment 20000527 PARAMETER Experiment Name: At_10percent_PEG_P Parameter: Plant Line Value: WS
  misc_feature: MA Experiment 20000527 PARAMETER Experiment Name: At_10percent_PEG_P Parameter: Timepoint (day) Value: 20
  misc_feature: MA Experiment 20000527 PARAMETER Experiment Name: At_10percent_PEG_P Parameter: Tissue Value: Whole Plant
  misc_feature: MA Experiment 20000527 PARAMETER Experiment Name: At_10percent_PEG_P Parameter: Treatment Value: 10percent PEG vs. No Treatment
  misc_feature: MA Experiment ID: 20001560 Result: Up-regulated in Transcription
  misc_feature: MA Experiment 20001560 PARAMETER Experiment Name: At_Drought_Soil_Dry_P Parameter: Age (day) Value: 28
  misc_feature: MA Experiment 20001560 PARAMETER Experiment Name: At_Drought_Soil_Dry_P Parameter: Organism Value: A. thaliana
  misc_feature: MA Experiment 20001560 PARAMETER Experiment Name: At_Drought_Soil_Dry_P Parameter: Plant Line Value: WS
  misc_feature: MA Experiment 20001560 PARAMETER Experiment Name: At_Drought_Soil_Dry_P Parameter: Post Timepoint (hr) Value: None
  misc_feature: MA Experiment 20001560 PARAMETER Experiment Name: At_Drought_Soil_Dry_P Parameter: Post-Treatment Value: None
  misc_feature: MA Experiment 20001560 PARAMETER Experiment Name: At_Drought_Soil_Dry_P Parameter: Timepoint (day) Value: 14
  misc_feature: MA Experiment 20001560 PARAMETER Experiment Name: At_Drought_Soil_Dry_P Parameter: Treatment Value: Drought vs. No Drought
  misc_feature: MA Experiment ID: 20001911 Result: Down-regulated in Transcription
  misc_feature: MA Experiment 20001911 PARAMETER Experiment Name: At_Drought_Reproduction_P Parameter: Age (day) Value: 40
  misc_feature: MA Experiment 20001911 PARAMETER Experiment Name: At_Drought_Reproduction_P Parameter: Organism Value: A. thaliana
  misc_feature: MA Experiment 20001911 PARAMETER Experiment Name: At_Drought_Reproduction_P Parameter: Plant Line Value: WS
  misc_feature: MA Experiment 20001911 PARAMETER Experiment Name: At_Drought_Reproduction_P Parameter: Timepoint (day) Value: 10
  misc_feature: MA Experiment 20001911 PARAMETER Experiment Name: At_Drought_Reproduction_P Parameter: Tissue Value: Flowers
  misc_feature: MA Experiment 20001911 PARAMETER Experiment Name: At_Drought_Reproduction_P Parameter: Treatment Value: Drought vs. No Drought
gagaatcctacgttatttcttcacttttcatgatcccgaggacatcttagaccccaaatgttcttcgtcgatgttctttggaaactggttcctctatacttgttcggatcagaaacacagtctctttcagcaacagagtccattttgcagatagttcctgaggcaatggctgctacttcatctaacgtcctttgcaatgctagcgagtcagatctttgtcgtgatgattccgctgcatttctacttaaatttgtagccattgcttcgattctcttagctggagctgctggtgtaactataccactcattggcaggaaccgtcgtttccttcaaactgatggtaatctctttgtgactgctaaagcttttgcagctggtgtgattctcgccacgggttttgttcatatgttggcgggtggcacggaagctttgaagaacccgtgcttaccggatttcccttggtctaagtttcctttcccgggattctttgcgatgattgctgctttgatcactctgtttgtggatttcatggggactcagtactatgaacggaagcaagagagggaagctagtgagtctgttgaaccgtttggccgtgaacaatcaccgggtattgttgttcccatgattggagaaggaacgaatgatgggaaagtgtttggtgaagaagacagtggtaggattcacattgttggcattcatgctcatgctgctcatcatagacatagtcatcctcctggtcatgattcatgtgaaggacacagtaaaatcgacattggtcatgctcatgctcatgggcacggacatggacacggacatggacacgtacacgggggtttggatgctgttaatggagctaggcatatcgttgtttctcaggttctggagcttggaattgtgtcacattccataatcatcggtctatcccttggagtatctcagtctccttgcacaatccggcctctaatcgcagcactatccttccatcaattctttgaaggatttgcgctcggtggatgcatctcccaagcgcaattcaggaacaaatcagcgaccataatggcttgttttttcgccctcacaaccccgatagggatcgggattggaaccgcagtggcgtcgtctttcaattctcacagtgtcggagcattggtcactgaaggtatcttggactcgctctcagccggaattcttgtgtacatggctttagtggatctcatagctgctgatttcttgagtacaaaaatgaggtgtaactttaggcttcaaattgtatcttatgtaatgttgttcctaggagctggactcatgtcttctcttgccatttgggcttaattagagtataagattccatagtttcttctatagctacaaataacatgtatagttctttctagagaatttatcaatctaagatttcacaattgctcgcc

SEQ ID NO: 24947 - protein, 425 aa, Arabidopsis thaliana
  peptide (1)..(425): Ceres Seq. ID no. 12337855
  misc_feature (209)..(309): Pfam Name: Cation efflux family Pfam Description: Cation efflux family
  misc_feature (32)..(230): Homolog of NCBI NO: 30526082 NR Description: putative ZIP-like zinc transporter
  misc_feature (37)..(391): Homolog of NCBI NO: 16304806 NR Description: putative Zn and Cd transporter [Thlaspi
  misc_feature (38)..(390): Homolog of NCBI NO: 28070974 NR Description: putative Zn transporter [Thlaspi caerulescens]
  misc_feature (37)..(425): Homolog of NCBI NO: 7381054 NR Description: Zn and Cd transporter ZNT1 [Thlaspi caerulescens]
  misc_feature (1)..(425): Homolog of NCBI NO: 14582255 NR Description: ZIP-like zinc transporter [Thlaspi caerulescens]
  misc_feature (24)..(425): Homolog of NCBI NO: 30682009 NR Description: metal transporter, putative (ZIP4) [Arabidopsis
  misc_feature (37)..(424): Homolog of NCBI NO: 12006859 NR Description: putative Zn transporter ZNT4 [Thlaspi
  misc_feature (1)..(424): Homolog of NCBI NO: 14582257 NR Description: ZIP-like zinc transporter [Thlaspi caerulescens]
  misc_feature (37)..(425): Homolog of NCBI NO: 21553732 NR Description: putative iron-regulated transporter [Arabidopsis
  misc_feature (1)..(425): Homolog of NCBI NO: 18406954 NR Description: putative iron-regulated transporter
MFFVDVLWKLVPLYLFGSETQSLSATESILQIVPEAMAATSSNVLCNASESDLCRDDSAAFLLKFVAIASILLAGAAGVTIPLIGRNRRFLQTDGNLFVTAKAFAAGVILATGFVHMLAGGTEALKNPCLPDFPWSKFPFPGFFAMIAALITLFVDFMGTQYYERKQEREASESVEPFGREQSPGIVVPMIGEGTNDGKVFGEEDSGRIHIVGIHAHAAHHRHSHPPGHDSCEGHSKIDIGHAHAHGHGHGHGHGHVHGGLDAVNGARHIVVSQVLELGIVSHSIIIGLSLGVSQSPCTIRPLIAALSFHQFFEGFALGGCISQAQFRNKSATIMACFFALTTPIGIGIGTAVASSFNSHSVGALVTEGILDSLSAGILVYMALVDLIAADFLSTKMRCNFRLQIVSYVMLFLGAGLMSSLAIWA

SEQ ID NO: 24948 - protein, 389 aa, Arabidopsis thaliana
  peptide (1)..(389): Ceres Seq. ID no. 12337856
  misc_feature (173)..(273): Pfam Name: Cation efflux family Pfam Description: Cation efflux family
  misc_feature (1)..(194): Homolog of NCBI NO: 30526082 NR Description: putative ZIP-like zinc transporter
  misc_feature (1)..(355): Homolog of NCBI NO: 16304806 NR Description: putative Zn and Cd transporter [Thlaspi
  misc_feature (2)..(354): Homolog of NCBI NO: 28070974 NR Description: putative Zn transporter [Thlaspi caerulescens]
  misc_feature (1)..(389): Homolog of NCBI NO: 7381054 NR Description: Zn and Cd transporter ZNT1 [Thlaspi caerulescens]
  misc_feature (1)..(389): Homolog of NCBI NO: 14582255 NR Description: ZIP-like zinc transporter [Thlaspi caerulescens]
  misc_feature (1)..(389): Homolog of NCBI NO: 30682009 NR Description: metal transporter, putative (ZIP4) [Arabidopsis
  misc_feature (1)..(388): Homolog of NCBI NO: 12006859 NR Description: putative Zn transporter ZNT4 [Thlaspi
  misc_feature (1)..(388): Homolog of NCBI NO: 14582257 NR Description: ZIP-like zinc transporter [Thlaspi caerulescens]
  misc_feature (1)..(389): Homolog of NCBI NO: 21553732 NR Description: putative iron-regulated transporter [Arabidopsis
  misc_feature (1)..(389): Homolog of NCBI NO: 18406954 NR Description: putative iron-regulated transporter
MAATSSNVLCNASESDLCRDDSAAFLLKFVAIASILLAGAAGVTIPLIGRNRRFLQTDGNLFVTAKAFAAGVILATGFVHMLAGGTEALKNPCLPDFPWSKFPFPGFFAMIAALITLFVDFMGTQYYERKQEREASESVEPFGREQSPGIVVPMIGEGTNDGKVFGEEDSGRIHIVGIHAHAAHHRHSHPPGHDSCEGHSKIDIGHAHAHGHGHGHGHGHVHGGLDAVNGARHIVVSQVLELGIVSHSIIIGLSLGVSQSPCTIRPLIAALSFHQFFEGFALGGCISQAQFRNKSATIMACFFALTTPIGIGIGTAVASSFNSHSVGALVTEGILDSLSAGILVYMALVDLIAADFLSTKMRCNFRLQIVSYVMLFLGAGLMSSLAIWA

SEQ ID NO: 24949 - protein, 309 aa, Arabidopsis thaliana
  peptide (1)..(309): Ceres Seq. ID no. 12337857
  misc_feature (93)..(193): Pfam Name: Cation efflux family Pfam Description: Cation efflux family
  misc_feature (1)..(114): Homolog of NCBI NO: 30526082 NR Description: putative ZIP-like zinc transporter
  misc_feature (1)..(275): Homolog of NCBI NO: 16304806 NR Description: putative Zn and Cd transporter [Thlaspi
  misc_feature (1)..(274): Homolog of NCBI NO: 28070974 NR Description: putative Zn transporter [Thlaspi caerulescens]
  misc_feature (1)..(309): Homolog of NCBI NO: 7381054 NR Description: Zn and Cd transporter ZNT1 [Thlaspi caerulescens]
  misc_feature (1)..(309): Homolog of NCBI NO: 14582255 NR Description: ZIP-like zinc transporter [Thlaspi caerulescens]
  misc_feature (1)..(309): Homolog of NCBI NO: 30682009 NR Description: metal transporter, putative (ZIP4) [Arabidopsis
  misc_feature (1)..(308): Homolog of NCBI NO: 12006859 NR Description: putative Zn transporter ZNT4 [Thlaspi
  misc_feature (1)..(308): Homolog of NCBI NO: 14582257 NR Description: ZIP-like zinc transporter [Thlaspi caerulescens]
  misc_feature (1)..(309): Homolog of NCBI NO: 21553732 NR Description: putative iron-regulated transporter [Arabidopsis
  misc_feature (1)..(309): Homolog of NCBI NO: 18406954 NR Description: putative iron-regulated transporter
MLAGGTEALKNPCLPDFPWSKFPFPGFFAMIAALITLFVDFMGTQYYERKQEREASESVEPFGREQSPGIVVPMIGEGTNDGKVFGEEDSGRIHIVGIHAHAAHHRHSHPPGHDSCEGHSKIDIGHAHAHGHGHGHGHGHVHGGLDAVNGARHIVVSQVLELGIVSHSIIIGLSLGVSQSPCTIRPLIAALSFHQFFEGFALGGCISQAQFRNKSATIMACFFALTTPIGIGIGTAVASSFNSHSVGALVTEGILDSLSAGILVYMALVDLIAADFLSTKMRCNFRLQIVSYVMLFLGAGLMSSLAIWA

SEQ ID NO: 24950 - DNA, 1451 bp, Arabidopsis thaliana
  misc_feature (1)..(1451): Ceres Seq. ID no. 12396450
  misc_feature: MA Experiment ID: 108434 Result: Up-regulated in Transcription
  misc_feature: MA Experiment 108434 PARAMETER Experiment Name: At_Root_Tips_cDNA_P Parameter: Tissue Value: Root Tips
  misc_feature: MA Experiment ID: 108461 Result: Down-regulated in Transcription
  misc_feature: MA Experiment 108461 PARAMETER Experiment Name: At_Germinating_Seeds_cDNA_P Parameter: Age (day) Value: 1 vs. 0
  misc_feature: MA Experiment 108461 PARAMETER Experiment Name: At_Germinating_Seeds_cDNA_P Parameter: Tissue Value: Germinating Seeds
  misc_feature: MA Experiment ID: 108462 Result: Down-regulated in Transcription
  misc_feature: MA Experiment 108462 PARAMETER Experiment Name: At_Germinating_Seeds_cDNA_P Parameter: Age (day) Value: 2 vs. 0
  misc_feature: MA Experiment 108462 PARAMETER Experiment Name: At_Germinating_Seeds_cDNA_P Parameter: Tissue Value: Germinating Seeds
  misc_feature: MA Experiment ID: 108463 Result: Down-regulated in Transcription
  misc_feature: MA Experiment 108463 PARAMETER Experiment Name: At_Germinating_Seeds_cDNA_P Parameter: Age (day) Value: 3 vs. 0
  misc_feature: MA Experiment 108463 PARAMETER Experiment Name: At_Germinating_Seeds_cDNA_P Parameter: Tissue Value: Germinating Seeds
  misc_feature: MA Experiment ID: 108464 Result: Down-regulated in Transcription
  misc_feature: MA Experiment 108464 PARAMETER Experiment Name: At_Germinating_Seeds_cDNA_P Parameter: Age (day) Value: 4 vs. 0
  misc_feature: MA Experiment 108464 PARAMETER Experiment Name: At_Germinating_Seeds_cDNA_P Parameter: Tissue Value: Germinating Seeds
  misc_feature: MA Experiment ID: 20001557 Result: Up-regulated in Transcription
  misc_feature: MA Experiment 20001557 PARAMETER Experiment Name: At_Drought_Soil_Dry_P Parameter: Age (day) Value: 27
  misc_feature: MA Experiment 20001557 PARAMETER Experiment Name: At_Drought_Soil_Dry_P Parameter: Organism Value: A. thaliana
  misc_feature: MA Experiment 20001557 PARAMETER Experiment Name: At_Drought_Soil_Dry_P Parameter: Plant Line Value: WS
  misc_feature: MA Experiment 20001557 PARAMETER Experiment Name: At_Drought_Soil_Dry_P Parameter: Post Timepoint (hr) Value: 3
  misc_feature: MA Experiment 20001557 PARAMETER Experiment Name: At_Drought_Soil_Dry_P Parameter: Post-Treatment Value: Re-Water vs. No Drought
  misc_feature: MA Experiment 20001557 PARAMETER Experiment Name: At_Drought_Soil_Dry_P Parameter: Timepoint (day) Value: 13
  misc_feature: MA Experiment 20001557 PARAMETER Experiment Name: At_Drought_Soil_Dry_P Parameter: Treatment Value: Drought vs. No Drought
  misc_feature: MA Experiment ID: 20001757 Result: Up-regulated in Transcription
  misc_feature: MA Experiment 20001757 PARAMETER Experiment Name: At_50mM_NH4NO3_L-to-H_P Parameter: Timepoint (hr) Value: 6
  misc_feature: MA Experiment 20001757 PARAMETER Experiment Name: At_50mM_NH4NO3_L-to-H_P Parameter: Tissue Value: Leaf
  misc_feature: MA Experiment 20001757 PARAMETER Experiment Name: At_50mM_NH4NO3_L-to-H_P Parameter: Treatment Value: 50mM NH4NO3 vs 100mM Mannitol
  misc_feature: MA Experiment ID: 20001911 Result: Down-regulated in Transcription
  misc_feature: MA Experiment 20001911 PARAMETER Experiment Name: At_Drought_Reproduction_P Parameter: Age (day) Value: 40
  misc_feature: MA Experiment 20001911 PARAMETER Experiment Name: At_Drought_Reproduction_P Parameter: Organism Value: A. thaliana
  misc_feature: MA Experiment 20001911 PARAMETER Experiment Name: At_Drought_Reproduction_P Parameter: Plant Line Value: WS
  misc_feature: MA Experiment 20001911 PARAMETER Experiment Name: At_Drought_Reproduction_P Parameter: Timepoint (day) Value: 10
  misc_feature: MA Experiment 20001911 PARAMETER Experiment Name: At_Drought_Reproduction_P Parameter: Tissue Value: Flowers
  misc_feature: MA Experiment 20001911 PARAMETER Experiment Name: At_Drought_Reproduction_P Parameter: Treatment Value: Drought vs. No Drought
atttcgctgaatagggttcagtacaaaattcggaatcgtaggtttaagaattttagatcattgaaacagccatgtctaggcaggtcacgagacttctcggatctcttcgccattccggcggcggctgcagcggcagctcaaaggtctgctctctcacttcattggtacagtctcgctccttcgggacaactcctccgcctcctgcggcggtctttgtcgacaaaaatacacgtgtcatctgccaaggtattaccggaaagaacgggaccttccacactgaacaagccattgaatacggcaccaaaatggtagcaggagtgacaccaaagaagggtggaacagaacatttggggctacctgttttcaacactgttgctgaagctaaggctgagactaaagccaatgcctctgtgatctacgtacctgcgcctttcgctgctgctgctatcatggaaggtttagctgctgagttagatcttattgtttgtatcactgaaggaattcctcaacatgacatggttcgtgtaaaggctgctcttaacagtcaatcaaaaactaggctgattggccctaattgtcctggtattatcaaacctggtgaatgcaagattgggatcatgccaggatacatacacaagccggggaagatagggattgtttctcgatctggaacattgacatatgaagctgttttccaaactactgcagtaggtttggggcaatctacttgtgtaggaattggtggggatccgtttaatgggacaaattttgttgactgcttggagaagttctttgttgacccccaaacagaaggtatcgttctcattggagaaatcggtgggactgcagaagaagatgccgctgctttgataaaggaaaatggtacagacaagcctgtagttgctttcatagccggacttactgcaccaccagggcgtcgtatgggtcatgcgggagccattgtttccggtggtaagggcacggctcaagacaagataaagagcctaagagacgcaggagttaaggtggttgagtcaccagctaagattggtgcggcgatgtttgagcttttccaagaaagaggtcttttgaagtgaaactgaagtaatatcataatacaatgagttgtttcaggaatcaacctctctaataacaacagtttgccaaaatagaagagtgaaacggaattcctaaaattccttaccatggagataattgcagagaaaaaaaaatagtcacttttttttttttgtctatgccattctatttttcaatttattgagccgttctatttttttttgtctttgttttggttaaggttacaaaaaatgagaacgaatcaattgcacaaatttcttcttttaagaatcaaaatcaactaatttagctatgttgattccaacttttgtctgctatgctatgagtattgttgtaaaacaaaccttttcttt

SEQ ID NO: 24951 - protein, 341 aa, Arabidopsis thaliana
  peptide (1)..(341): Ceres Seq. ID no. 12396451
  misc_feature (48)..(159): Pfam Name: CoA binding domain Pfam Description: CoA binding domain
  misc_feature (15)..(340): Homolog of NCBI NO: 20141810 NR Description: Succinyl-CoA ligase
  misc_feature (15)..(340): Homolog of NCBI NO: 16758586 NR Description: succinate-CoA ligase, GDP-forming, alpha subunit
  misc_feature (15)..(340): Homolog of NCBI NO: 38181885 NR Description: Suclg1 protein [Rattus norvegicus]
  misc_feature (35)..(327): Homolog of NCBI NO: 1711574 NR Description: SUCCINYL-COA LIGASE
  misc_feature (31)..(341): Homolog of NCBI NO: 34393512 NR Description: putative succinyl-CoA ligase alpha subunit
  misc_feature (1)..(340): Homolog of NCBI NO: 27357175 NR Description: succinyl-CoA ligase alpha subunit [Lycopersicon
  misc_feature (1)..(341): Homolog of NCBI NO: 15241592 NR Description: succinyl-CoA-ligase alpha subunit
  misc_feature (47)..(341): Homolog of NCBI NO: 1076415 NR Description: succinate-CoA ligase (GDP-forming) (EC 6.2.1.4)
  misc_feature (1)..(341): Homolog of NCBI NO: 21593483 NR Description: succinyl-CoA synthetase, alpha subunit
  misc_feature (1)..(341): Homolog of NCBI NO: 15237260 NR Description: succinyl-CoA synthetase, alpha subunit
MSRQVTRLLGSLRHSGGGCSGSSKVCSLTSLVQSRSFGTTPPPPAAVFVDKNTRVICQGITGKNGTFHTEQAIEYGTKMVAGVTPKKGGTEHLGLPVFNTVAEAKAETKANASVIYVPAPFAAAAIMEGLAAELDLIVCITEGIPQHDMVRVKAALNSQSKTRLIGPNCPGIIKPGECKIGIMPGYIHKPGKIGIVSRSGTLTYEAVFQTTAVGLGQSTCVGIGGDPFNGTNFVDCLEKFFVDPQTEGIVLIGEIGGTAEEDAAALIKENGTDKPVVAFIAGLTAPPGRRMGHAGAIVSGGKGTAQDKIKSLRDAGVKVVESPAKIGAAMFELFQERGLLK

SEQ ID NO: 24952 - protein, 263 aa, Arabidopsis thaliana
  peptide (1)..(263): Ceres Seq. ID no. 12396452
  misc_feature (1)..(81): Pfam Name: CoA binding domain Pfam Description: CoA binding domain
  misc_feature (1)..(249): Homolog of NCBI NO: 1711574 NR Description: SUCCINYL-COA LIGASE
  misc_feature (1)..(263): Homolog of NCBI NO: 34393512 NR Description: putative succinyl-CoA ligase alpha subunit
  misc_feature (1)..(262): Homolog of NCBI NO: 27357175 NR Description: succinyl-CoA ligase alpha subunit [Lycopersicon
  misc_feature (1)..(263): Homolog of NCBI NO: 15241592 NR Description: succinyl-CoA-ligase alpha subunit
  misc_feature (1)..(262): Homolog of NCBI NO: 16758586 NR Description: succinate-CoA ligase, GDP-forming, alpha subunit
  misc_feature (1)..(262): Homolog of NCBI NO: 38181885 NR Description: Suclg1 protein [Rattus norvegicus]
  misc_feature (1)..(262): Homolog of NCBI NO: 20141810 NR Description: Succinyl-CoA ligase
  misc_feature (1)..(263): Homolog of NCBI NO: 1076415 NR Description: succinate-CoA ligase (GDP-forming) (EC 6.2.1.4)
  misc_feature (1)..(263): Homolog of NCBI NO: 21593483 NR Description: succinyl-CoA synthetase, alpha subunit
  misc_feature (1)..(263): Homolog of NCBI NO: 15237260 NR Description: succinyl-CoA synthetase, alpha subunit
MVAGVTPKKGGTEHLGLPVFNTVAEAKAETKANASVIYVPAPFAAAAIMEGLAAELDLIVCITEGIPQHDMVRVKAALNSQSKTRLIGPNCPGIIKPGECKIGIMPGYIHKPGKIGIVSRSGTLTYEAVFQTTAVGLGQSTCVGIGGDPFNGTNFVDCLEKFFVDPQTEGIVLIGEIGGTAEEDAAALIKENGTDKPVVAFIAGLTAPPGRRMGHAGAIVSGGKGTAQDKIKSLRDAGVKVVESPAKIGAAMFELFQERGLLK

SEQ ID NO: 24953 - protein, 215 aa, Arabidopsis thaliana
  peptide (1)..(215): Ceres Seq. ID no. 12396453
  misc_feature (1)..(214): Homolog of NCBI NO: 20141810 NR Description: Succinyl-CoA ligase
  misc_feature (1)..(214): Homolog of NCBI NO: 16758586 NR Description: succinate-CoA ligase, GDP-forming, alpha subunit
  misc_feature (1)..(214): Homolog of NCBI NO: 38181885 NR Description: Suclg1 protein [Rattus norvegicus]
  misc_feature (1)..(201): Homolog of NCBI NO: 1711574 NR Description: SUCCINYL-COA LIGASE
  misc_feature (1)..(215): Homolog of NCBI NO: 34393512 NR Description: putative succinyl-CoA ligase alpha subunit
  misc_feature (1)..(214): Homolog of NCBI NO: 27357175 NR Description: succinyl-CoA ligase alpha subunit [Lycopersicon
  misc_feature (1)..(215): Homolog of NCBI NO: 15241592 NR Description: succinyl-CoA-ligase alpha subunit
  misc_feature (1)..(215): Homolog of NCBI NO: 1076415 NR Description: succinate-CoA ligase (GDP-forming) (EC 6.2.1.4)
  misc_feature (1)..(215): Homolog of NCBI NO: 21593483 NR Description: succinyl-CoA synthetase, alpha subunit
  misc_feature (1)..(215): Homolog of NCBI NO: 15237260 NR Description: succinyl-CoA synthetase, alpha subunit
MEGLAAELDLIVCITEGIPQHDMVRVKAALNSQSKTRLIGPNCPGIIKPGECKIGIMPGYIHKPGKIGIVSRSGTLTYEAVFQTTAVGLGQSTCVGIGGDPFNGTNFVDCLEKFFVDPQTEGIVLIGEIGGTAEEDAAALIKENGTDKPVVAFIAGLTAPPGRRMGHAGAIVSGGKGTAQDKIKSLRDAGVKVVESPAKIGAAMFELFQERGLLK

SEQ ID NO: 24954 - DNA, 1594 bp, Arabidopsis thaliana
  misc_feature (1)..(1594): Ceres Seq. ID no. 13500261
  misc_feature: MA Experiment ID: 108434 Result: Down-regulated in Transcription
  misc_feature: MA Experiment 108434 PARAMETER Experiment Name: At_Root_Tips_cDNA_P Parameter: Tissue Value: Root Tips
  misc_feature: MA Experiment ID: 108461 Result: Up-regulated in Transcription
  misc_feature: MA Experiment 108461 PARAMETER Experiment Name: At_Germinating_Seeds_cDNA_P Parameter: Age (day) Value: 1 vs. 0
  misc_feature: MA Experiment 108461 PARAMETER Experiment Name: At_Germinating_Seeds_cDNA_P Parameter: Tissue Value: Germinating Seeds
  misc_feature: MA Experiment ID: 108462 Result: Up-regulated in Transcription
  misc_feature: MA Experiment 108462 PARAMETER Experiment Name: At_Germinating_Seeds_cDNA_P Parameter: Age (day) Value: 2 vs. 0
  misc_feature: MA Experiment 108462 PARAMETER Experiment Name: At_Germinating_Seeds_cDNA_P Parameter: Tissue Value: Germinating Seeds
  misc_feature: MA Experiment ID: 108463 Result: Up-regulated in Transcription
  misc_feature: MA Experiment 108463 PARAMETER Experiment Name: At_Germinating_Seeds_cDNA_P Parameter: Age (day) Value: 3 vs. 0
  misc_feature: MA Experiment 108463 PARAMETER Experiment Name: At_Germinating_Seeds_cDNA_P Parameter: Tissue Value: Germinating Seeds
  misc_feature: MA Experiment ID: 108464 Result: Up-regulated in Transcription
  misc_feature: MA Experiment 108464 PARAMETER Experiment Name: At_Germinating_Seeds_cDNA_P Parameter: Age (day) Value: 4 vs. 0
  misc_feature: MA Experiment 108464 PARAMETER Experiment Name: At_Germinating_Seeds_cDNA_P Parameter: Tissue Value: Germinating Seeds
  misc_feature: MA Experiment ID: 108488 Result: Down-regulated in Transcription
  misc_feature: MA Experiment ID: 108595 Result: Down-regulated in Transcription
  misc_feature: MA Experiment 108595 PARAMETER Experiment Name: At_Ler-pi_Ovule_cDNA_P Parameter: Plant Line Value: null
  misc_feature: MA Experiment ID: 20000495 Result: Down-regulated in Transcription
  misc_feature: MA Experiment 20000495 PARAMETER Experiment Name: At_Guard_Cells_P Parameter: Harvest Date Value: 8/2/2002
  misc_feature: MA Experiment 20000495 PARAMETER Experiment Name: At_Guard_Cells_P Parameter: Organism Value: A. thaliana
  misc_feature: MA Experiment 20000495 PARAMETER Experiment Name: At_Guard_Cells_P Parameter: Tissue Value: Guard Cells vs. Leaves
  misc_feature: MA Experiment ID: 20001558 Result: Down-regulated in Transcription
  misc_feature: MA Experiment 20001558 PARAMETER Experiment Name: At_Drought_Soil_Dry_P Parameter: Age (day) Value: 27
  misc_feature: MA Experiment 20001558 PARAMETER Experiment Name: At_Drought_Soil_Dry_P Parameter: Organism Value: A. thaliana
  misc_feature: MA Experiment 20001558 PARAMETER Experiment Name: At_Drought_Soil_Dry_P Parameter: Plant Line Value: WS
  misc_feature: MA Experiment 20001558 PARAMETER Experiment Name: At_Drought_Soil_Dry_P Parameter: Post Timepoint (hr) Value: 6
  misc_feature: MA Experiment 20001558 PARAMETER Experiment Name: At_Drought_Soil_Dry_P Parameter: Post-Treatment Value: Re-Water vs. No Drought
  misc_feature: MA Experiment 20001558 PARAMETER Experiment Name: At_Drought_Soil_Dry_P Parameter: Timepoint (day) Value: 13
  misc_feature: MA Experiment 20001558 PARAMETER Experiment Name: At_Drought_Soil_Dry_P Parameter: Treatment Value: Drought vs. No Drought
  misc_feature: MA Experiment ID: 20001560 Result: Down-regulated in Transcription
  misc_feature: MA Experiment 20001560 PARAMETER Experiment Name: At_Drought_Soil_Dry_P Parameter: Age (day) Value: 28
  misc_feature: MA Experiment 20001560 PARAMETER Experiment Name: At_Drought_Soil_Dry_P Parameter: Organism Value: A. thaliana
  misc_feature: MA Experiment 20001560 PARAMETER Experiment Name: At_Drought_Soil_Dry_P Parameter: Plant Line Value: WS
  misc_feature: MA Experiment 20001560 PARAMETER Experiment Name: At_Drought_Soil_Dry_P Parameter: Post Timepoint (hr) Value: None
  misc_feature: MA Experiment 20001560 PARAMETER Experiment Name: At_Drought_Soil_Dry_P Parameter: Post-Treatment Value: None
  misc_feature: MA Experiment 20001560 PARAMETER Experiment Name: At_Drought_Soil_Dry_P Parameter: Timepoint (day) Value: 14
  misc_feature: MA Experiment 20001560 PARAMETER Experiment Name: At_Drought_Soil_Dry_P Parameter: Treatment Value: Drought vs. No Drought
gaggagcggttgagttgaaatttgctggcgcgtactcgtcaacgtaacgcgcgtggagtgttttcgtgtccctcctcctcctcctcctcctcactaagacaaatattttgaggttctctttctcgtttgtgtgatctgtctgacaagctagaagaatcgtagatcgtgatcggattgatttgataattatggtgaaggagacggagttttacgatgtcctcggcgttagccccaccgctacggaggctgagattaagaaagcttattacatcaaggcacgccaagtgcatccagataaaaaccctaatgatcctcaggctgctcataatttccaggtattgggagaggcctaccaagtgctaagtgatccagggcaacgtcaggcctatgacacatctgggaagtcagggatttcaactgagatcattgatcctgcggctatatttgctatgctttttgggagtgaactctttgaagaatacatagggcagcttgctatggcatcaatggcttcacttgatatcttcactgaaggggatcagattgatactaaaaagattatagaaaaaatgagggctgttcagaaagaaagagaagacaaacttgctcagattcttaaggaccgcctcaacctatatatgacgaacaaagatgaatttactagcaatgctgaagctgaagtaacaagactctcaaatgcagcatacggggtggaaatgttgaacacaatcggatatatatatgtcagacaagcggcaaaagagcttgggaagaaagctatttatctcggtgtgccattcgtagctgaatggtttaggacgaaaggtcacttcatcaaatcccaagtaacagctgcaacaggtgcatacgctttattccagctgcaagaggaaatgaaaaggcaactaagtgctgaaggcaattataccgagaaggaacttgaagagtacatgaagacccataagaaagtaatgattgattctctgtggaagctcaatgttgctgatatcgaaagcactatctcccgtgtttgtgagcaggtacttcaagatcccactgccaagagagaggagcttcgtgcaagggccaaggggttaaaaactctgggaaagatcttccagaagaacaagatagccagtgagagtgatcctttagtaagagccgaacttcacaaactaaacggaaatggtcaagaacatgatcattcatccacatcaccaaaatctgatgaagcatctcgctctaccgttggacctcaggaaccgcaaagcccttatgtggaagcaccgaaacttggagaagagcaaatcaactattacttcccaaggcctgcgccgcctccaggagcacagagacactcttaaactggcaatggattgattcacagatgaacgaaaaggttattttttcctttttttgctatataatataagtctttatgcatatttgatatatttgcaggcgttggtattaccattatgtaatttttattattgttagaagaagaaattattggatctttgaaaaaagcacatgttatctcatcttagacaatgtataatgtttttattctatttatatatttgatgtttgg

SEQ ID NO: 24955 - protein, 391 aa, Arabidopsis thaliana
  peptide (1)..(391): Ceres Seq. ID no. 13500262
  misc_feature (6)..(71): Pfam Name: DnaJ domain Pfam Description: DnaJ domain
  misc_feature (1)..(344): Homolog of NCBI NO: 15234962 NR Description: DnaJ protein family [Arabidopsis thaliana]
  misc_feature (1)..(314): Homolog of NCBI NO: 15226572 NR Description: DnaJ protein family [Arabidopsis thaliana]
  misc_feature (1)..(355): Homolog of NCBI NO: 30699227 NR Description: DnaJ protein family [Arabidopsis thaliana]
  misc_feature (1)..(130): Homolog of NCBI NO: 27817868 NR Description: OJ1081_B12.17 [Oryza sativa (japonica
  misc_feature (130)..(389): Homolog of NCBI NO: 27817868 NR Description: OJ1081_B12.17 [Oryza sativa (japonica
  misc_feature (88)..(391): Homolog of NCBI NO: 15982848 NR Description: At1g21080/T22I11_9 [Arabidopsis thaliana]
  misc_feature (1)..(386): Homolog of NCBI NO: 2230757 NR Description: dnaJ-like protein [Arabidopsis thaliana]
  misc_feature (1)..(391): Homolog of NCBI NO: 26449747 NR Description: putative DnaJ protein [Arabidopsis thaliana]
  misc_feature (1)..(391): Homolog of NCBI NO: 15223142 NR Description: DnaJ protein family [Arabidopsis thaliana]
  misc_feature (1)..(391): Homolog of NCBI NO: 18394951 NR Description: DnaJ protein family [Arabidopsis thaliana]
MVKETEFYDVLGVSPTATEAEIKKAYYIKARQVHPDKNPNDPQAAHNFQVLGEAYQVLSDPGQRQAYDTSGKSGISTEIIDPAAIFAMLFGSELFEEYIGQLAMASMASLDIFTEGDQIDTKKIIEKMRAVQKEREDKLAQILKDRLNLYMTNKDEFTSNAEAEVTRLSNAAYGVEMLNTIGYIYVRQAAKELGKKAIYLGVPFVAEWFRTKGHFIKSQVTAATGAYALFQLQEEMKRQLSAEGNYTEKELEEYMKTHKKVMIDSLWKLNVADIESTISRVCEQVLQDPTAKREELRARAKGLKTLGKIFQKNKIASESDPLVRAELHKLNGNGQEHDHSSTSPKSDEASRSTVGPQEPQSPYVEAPKLGEEQINYYFPRPAPPPGAQRHS

SEQ ID NO: 24956 - protein, 304 aa, Arabidopsis thaliana
  peptide (1)..(304): Ceres Seq. ID no. 13500263
  misc_feature (1)..(257): Homolog of NCBI NO: 15234962 NR Description: DnaJ protein family [Arabidopsis thaliana]
  misc_feature (1)..(227): Homolog of NCBI NO: 15226572 NR Description: DnaJ protein family [Arabidopsis thaliana]
  misc_feature (1)..(268): Homolog of NCBI NO: 30699227 NR Description: DnaJ protein family [Arabidopsis thaliana]
  misc_feature (1)..(43): Homolog of NCBI NO: 27817868 NR Description: OJ1081_B12.17 [Oryza sativa (japonica
  misc_feature (43)..(302): Homolog of NCBI NO: 27817868 NR Description: OJ1081_B12.17 [Oryza sativa (japonica
  misc_feature (1)..(304): Homolog of NCBI NO: 15982848 NR Description: At1g21080/T22I11_9 [Arabidopsis thaliana]
  misc_feature (1)..(299): Homolog of NCBI NO: 2230757 NR Description: dnaJ-like protein [Arabidopsis thaliana]
  misc_feature (1)..(304): Homolog of NCBI NO: 26449747 NR Description: putative DnaJ protein [Arabidopsis thaliana]
  misc_feature (1)..(304): Homolog of NCBI NO: 15223142 NR Description: DnaJ protein family [Arabidopsis thaliana]
  misc_feature (1)..(304): Homolog of NCBI NO: 18394951 NR Description: DnaJ protein family [Arabidopsis thaliana]
MLFGSELFEEYIGQLAMASMASLDIFTEGDQIDTKKIIEKMRAVQKEREDKLAQILKDRLNLYMTNKDEFTSNAEAEVTRLSNAAYGVEMLNTIGYIYVRQAAKELGKKAIYLGVPFVAEWFRTKGHFIKSQVTAATGAYALFQLQEEMKRQLSAEGNYTEKELEEYMKTHKKVMIDSLWKLNVADIESTISRVCEQVLQDPTAKREELRARAKGLKTLGKIFQKNKIASESDPLVRAELHKLNGNGQEHDHSSTSPKSDEASRSTVGPQEPQSPYVEAPKLGEEQINYYFPRPAPPPGAQRHS

SEQ ID NO: 24957 - protein, 288 aa, Arabidopsis thaliana
  peptide (1)..(288): Ceres Seq. ID no. 13500264
  misc_feature (1)..(241): Homolog of NCBI NO: 15234962 NR Description: DnaJ protein family [Arabidopsis thaliana]
  misc_feature (1)..(211): Homolog of NCBI NO: 15226572 NR Description: DnaJ protein family [Arabidopsis thaliana]
  misc_feature (1)..(252): Homolog of NCBI NO: 30699227 NR Description: DnaJ protein family [Arabidopsis thaliana]
  misc_feature (1)..(27): Homolog of NCBI NO: 27817868 NR Description: OJ1081_B12.17 [Oryza sativa (japonica
  misc_feature (27)..(286): Homolog of NCBI NO: 27817868 NR Description: OJ1081_B12.17 [Oryza sativa (japonica
  misc_feature (1)..(288): Homolog of NCBI NO: 15982848 NR Description: At1g21080/T22I11_9 [Arabidopsis thaliana]
  misc_feature (1)..(283): Homolog of NCBI NO: 2230757 NR Description: dnaJ-like protein [Arabidopsis thaliana]
  misc_feature (1)..(288): Homolog of NCBI NO: 26449747 NR Description: putative DnaJ protein [Arabidopsis thaliana]
  misc_feature (1)..(288): Homolog of NCBI NO: 15223142 NR Description: DnaJ protein family [Arabidopsis thaliana]
  misc_feature (1)..(288): Homolog of NCBI NO: 18394951 NR Description: DnaJ protein family [Arabidopsis thaliana]
MASMASLDIFTEGDQIDTKKIIEKMRAVQKEREDKLAQILKDRLNLYMTNKDEFTSNAEAEVTRLSNAAYGVEMLNTIGYIYVRQAAKELGKKAIYLGVPFVAEWFRTKGHFIKSQVTAATGAYALFQLQEEMKRQLSAEGNYTEKELEEYMKTHKKVMIDSLWKLNVADIESTISRVCEQVLQDPTAKREELRARAKGLKTLGKIFQKNKIASESDPLVRAELHKLNGNGQEHDHSSTSPKSDEASRSTVGPQEPQSPYVEAPKLGEEQINYYFPRPAPPPGAQRHS

SEQ ID NO: 24958 - DNA, 965 bp, Arabidopsis thaliana
  misc_feature (1)..(965): Ceres Seq. ID no. 12321910
  misc_feature: MA Experiment ID: 108435 Result: Down-regulated in Transcription
  misc_feature: MA Experiment 108435 PARAMETER Experiment Name: At_stm_Mutants_cDNA_P Parameter: Plant Line Value: wt Landsburg vs stm
  misc_feature: MA Experiment 108435 PARAMETER Experiment Name: At_stm_Mutants_cDNA_P Parameter: Tissue Value: Shoot Apical Meristem Region
  misc_feature: MA Experiment ID: 108461 Result: Up-regulated in Transcription
  misc_feature: MA Experiment 108461 PARAMETER Experiment Name: At_Germinating_Seeds_cDNA_P Parameter: Age (day) Value: 1 vs. 0
  misc_feature: MA Experiment 108461 PARAMETER Experiment Name: At_Germinating_Seeds_cDNA_P Parameter: Tissue Value: Germinating Seeds
  misc_feature: MA Experiment ID: 108462 Result: Up-regulated in Transcription
  misc_feature: MA Experiment 108462 PARAMETER Experiment Name: At_Germinating_Seeds_cDNA_P Parameter: Age (day) Value: 2 vs. 0
  misc_feature: MA Experiment 108462 PARAMETER Experiment Name: At_Germinating_Seeds_cDNA_P Parameter: Tissue Value: Germinating Seeds
  misc_feature: MA Experiment ID: 108463 Result: Up-regulated in Transcription
  misc_feature: MA Experiment 108463 PARAMETER Experiment Name: At_Germinating_Seeds_cDNA_P Parameter: Age (day) Value: 3 vs. 0
  misc_feature: MA Experiment 108463 PARAMETER Experiment Name: At_Germinating_Seeds_cDNA_P Parameter: Tissue Value: Germinating Seeds
  misc_feature: MA Experiment ID: 108464 Result: Up-regulated in Transcription
  misc_feature: MA Experiment 108464 PARAMETER Experiment Name: At_Germinating_Seeds_cDNA_P Parameter: Age (day) Value: 4 vs. 0
  misc_feature: MA Experiment 108464 PARAMETER Experiment Name: At_Germinating_Seeds_cDNA_P Parameter: Tissue Value: Germinating Seeds
  misc_feature: MA Experiment ID: 108488 Result: Up-regulated in Transcription
  misc_feature: MA Experiment ID: 108573 Result: Down-regulated in Transcription
  misc_feature: MA Experiment 108573 PARAMETER Experiment Name: At_Drought_cDNA_P Parameter: Timepoint (hr) Value: 6
  misc_feature: MA Experiment 108573 PARAMETER Experiment Name: At_Drought_cDNA_P Parameter: Tissue Value: Aerial
  misc_feature: MA Experiment 108573 PARAMETER Experiment Name: At_Drought_cDNA_P Parameter: Treatment Value: Drought vs. No Drought
  misc_feature: MA Experiment ID: 108585 Result: Down-regulated in Transcription
  misc_feature: MA Experiment 108585 PARAMETER Experiment Name: At_5mM_NaNP_cDNA_P Parameter: Timepoint (hr) Value: 6
  misc_feature: MA Experiment 108585 PARAMETER Experiment Name: At_5mM_NaNP_cDNA_P Parameter: Tissue Value: Aerial
  misc_feature: MA Experiment 108585 PARAMETER Experiment Name: At_5mM_NaNP_cDNA_P Parameter: Treatment Value: null
  misc_feature: MA Experiment ID: 108595 Result: Down-regulated in Transcription
  misc_feature: MA Experiment 108595 PARAMETER Experiment Name: At_Ler-pi_Ovule_cDNA_P Parameter: Plant Line Value: null
  misc_feature: MA Experiment ID: 20000111 Result: Down-regulated in Transcription
  misc_feature: MA Experiment 20000111 PARAMETER Experiment Name: At_42deg_Heat_cDNA_P Parameter: Temperature (deg C) Value: 42 vs. 22
  misc_feature: MA Experiment 20000111 PARAMETER Experiment Name: At_42deg_Heat_cDNA_P Parameter: Timepoint (hr) Value: 6
  misc_feature: MA Experiment 20000111 PARAMETER Experiment Name: At_42deg_Heat_cDNA_P Parameter: Tissue Value: Aerial
  misc_feature: MA Experiment ID: 20000173 Result: Down-regulated in Transcription
  misc_feature: MA Experiment 20000173 PARAMETER Experiment Name: At_42deg_Heat_P Parameter: Age (day) Value: 14
  misc_feature: MA Experiment 20000173 PARAMETER Experiment Name: At_42deg_Heat_P Parameter: Organism Value: A. thaliana
  misc_feature: MA Experiment 20000173 PARAMETER Experiment Name: At_42deg_Heat_P Parameter: Plant Line Value: WS
  misc_feature: MA Experiment 20000173 PARAMETER Experiment Name: At_42deg_Heat_P Parameter: Temperature (deg C) Value: 42 vs. 22
  misc_feature: MA Experiment 20000173 PARAMETER Experiment Name: At_42deg_Heat_P Parameter: Timepoint (hr) Value: 6
  misc_feature: MA Experiment 20000173 PARAMETER Experiment Name: At_42deg_Heat_P Parameter: Tissue Value: Aerial
  misc_feature: MA Experiment ID: 20000180 Result: Up-regulated in Transcription
  misc_feature: MA Experiment 20000180 PARAMETER Experiment Name: At_Germinating_Seeds_P Parameter: Age (hr) Value: 24 vs. 0
  misc_feature: MA Experiment 20000180 PARAMETER Experiment Name: At_Germinating_Seeds_P Parameter: Tissue Value: Germinating Seeds
  misc_feature: MA Experiment ID: 20000184 Result: Up-regulated in Transcription
  misc_feature: MA Experiment 20000184 PARAMETER Experiment Name: At_Shoots__P Parameter: Age (day) Value: 7
  misc_feature: MA Experiment 20000184 PARAMETER Experiment Name: At_Shoots__P Parameter: Tissue Value: Shoots vs. Whole Plant
  misc_feature: MA Experiment ID: 20000185 Result: Down-regulated in Transcription
  misc_feature: MA Experiment 20000185 PARAMETER Experiment Name: At_Roots__P Parameter: Age (day) Value: 7 vs. 21
  misc_feature: MA Experiment 20000185 PARAMETER Experiment Name: At_Roots__P Parameter: Organism Value: A. thaliana
  misc_feature: MA Experiment 20000185 PARAMETER Experiment Name: At_Roots__P Parameter: Tissue Value: Roots vs. Whole Plant
  misc_feature: MA Experiment ID: 20000437 Result: Down-regulated in Transcription
  misc_feature: MA Experiment 20000437 PARAMETER Experiment Name: At_Drought_P Parameter: Age (day) Value: 8
  misc_feature: MA Experiment 20000437 PARAMETER Experiment Name: At_Drought_P Parameter: Organism Value: A. thaliana
  misc_feature: MA Experiment 20000437 PARAMETER Experiment Name: At_Drought_P Parameter: Plant Line Value: WS
  misc_feature: MA Experiment 20000437 PARAMETER Experiment Name: At_Drought_P Parameter: Timepoint (hr) Value: 24
  misc_feature: MA Experiment 20000437 PARAMETER Experiment Name: At_Drought_P Parameter: Tissue Value: Whole Plant
  misc_feature: MA Experiment 20000437 PARAMETER Experiment Name: At_Drought_P Parameter: Treatment Value: Drought vs. No Drought
  misc_feature: MA Experiment ID: 20000438 Result: Up-regulated in Transcription
  misc_feature: MA Experiment 20000438 PARAMETER Experiment Name: At_Shoots__P Parameter: Age (day) Value: 14
  misc_feature: MA Experiment 20000438 PARAMETER Experiment Name: At_Shoots__P Parameter: Tissue Value: Shoots vs. Whole Plant
  misc_feature: MA Experiment ID: 20000439 Result: Down-regulated in Transcription
  misc_feature: MA Experiment 20000439 PARAMETER Experiment Name: At_Roots__P Parameter: Age (day) Value: 14 vs. 21
  misc_feature: MA Experiment 20000439 PARAMETER Experiment Name: At_Roots__P Parameter: Organism Value: A. thaliana
  misc_feature: MA Experiment 20000439 PARAMETER Experiment Name: At_Roots__P Parameter: Tissue Value: Roots vs. Whole Plant
  misc_feature: MA Experiment ID: 20000495 Result: Down-regulated in Transcription
  misc_feature: MA Experiment 20000495 PARAMETER Experiment Name: At_Guard_Cells_P Parameter: Harvest Date Value: 8/2/2002
  misc_feature: MA Experiment 20000495 PARAMETER Experiment Name: At_Guard_Cells_P Parameter: Organism Value: A. thaliana
  misc_feature: MA Experiment 20000495 PARAMETER Experiment Name: At_Guard_Cells_P Parameter: Tissue Value: Guard Cells vs. Leaves
  misc_feature: MA Experiment ID: 20000794 Result: Down-regulated in Transcription
  misc_feature: MA Experiment 20000794 PARAMETER Experiment Name: At_Petals_P Parameter: Age (day) Value: 23-25 days
  misc_feature: MA Experiment 20000794 PARAMETER Experiment Name: At_Petals_P Parameter: Plant Line Value: WS
  misc_feature: MA Experiment 20000794 PARAMETER Experiment Name: At_Petals_P Parameter: Tissue Value: Petals vs. Whole plant
  misc_feature: MA Experiment ID: 20001248 Result: Down-regulated in Transcription
  misc_feature: MA Experiment 20001248 PARAMETER Experiment Name: At_Far-red-induction_P Parameter: Age (day) Value: 7
  misc_feature: MA Experiment 20001248 PARAMETER Experiment Name: At_Far-red-induction_P Parameter: Light Value: Far-red vs. White
  misc_feature: MA Experiment 20001248 PARAMETER Experiment Name: At_Far-red-induction_P Parameter: Organism Value: A. thaliana
  misc_feature: MA Experiment 20001248 PARAMETER Experiment Name: At_Far-red-induction_P Parameter: Plant Line Value: Columbia
  misc_feature: MA Experiment 20001248 PARAMETER Experiment Name: At_Far-red-induction_P Parameter: Timepoint (hr) Value: 4
  misc_feature: MA Experiment 20001248 PARAMETER Experiment Name: At_Far-red-induction_P Parameter: Tissue Value: Whole Plant
  misc_feature: MA Experiment ID: 20001450 Result: Down-regulated in Transcription
  misc_feature: MA Experiment 20001450 PARAMETER Experiment Name: At_Far-red-induction_P Parameter: Age (day) Value: 7
  misc_feature: MA Experiment 20001450 PARAMETER Experiment Name: At_Far-red-induction_P Parameter: Light Value: Far-red vs. White
  misc_feature: MA Experiment 20001450 PARAMETER Experiment Name: At_Far-red-induction_P Parameter: Organism Value: A. thaliana
  misc_feature: MA Experiment 20001450 PARAMETER Experiment Name: At_Far-red-induction_P Parameter: Plant Line Value: Columbia
  misc_feature: MA Experiment 20001450 PARAMETER Experiment Name: At_Far-red-induction_P Parameter: Timepoint (hr) Value: 8
  misc_feature: MA Experiment 20001450 PARAMETER Experiment Name: At_Far-red-induction_P Parameter: Tissue Value: Whole Plant
  misc_feature: MA Experiment ID: 20001451 Result: Down-regulated in Transcription
  misc_feature: MA Experiment 20001451 PARAMETER Experiment Name: At_Far-red-induction_P Parameter: Age (day) Value: 7
  misc_feature: MA Experiment 20001451 PARAMETER Experiment Name: At_Far-red-induction_P Parameter: Light Value: Far-red vs. White
  misc_feature: MA Experiment 20001451 PARAMETER Experiment Name: At_Far-red-induction_P Parameter: Organism Value: A. thaliana
  misc_feature: MA Experiment 20001451 PARAMETER Experiment Name: At_Far-red-induction_P Parameter: Plant Line Value: Columbia
  misc_feature: MA Experiment 20001451 PARAMETER Experiment Name: At_Far-red-induction_P Parameter: Timepoint (hr) Value: 24
  misc_feature: MA Experiment 20001451 PARAMETER Experiment Name: At_Far-red-induction_P Parameter: Tissue Value: Whole Plant
  misc_feature: MA Experiment ID: 20001555 Result: Down-regulated in Transcription
  misc_feature: MA Experiment 20001555 PARAMETER Experiment Name: At_Drought_Soil_Dry_P Parameter: Age (day) Value: 24
  misc_feature: MA Experiment 20001555 PARAMETER Experiment Name: At_Drought_Soil_Dry_P Parameter: Organism Value: A. thaliana
  misc_feature: MA Experiment 20001555 PARAMETER Experiment Name: At_Drought_Soil_Dry_P Parameter: Plant Line Value: WS
  misc_feature: MA Experiment 20001555 PARAMETER Experiment Name: At_Drought_Soil_Dry_P Parameter: Post Timepoint (hr) Value: None
  misc_feature: MA Experiment 20001555 PARAMETER Experiment Name: At_Drought_Soil_Dry_P Parameter: Post-Treatment Value: None
  misc_feature: MA Experiment 20001555 PARAMETER Experiment Name: At_Drought_Soil_Dry_P Parameter: Timepoint (day) Value: 10
  misc_feature: MA Experiment 20001555 PARAMETER Experiment Name: At_Drought_Soil_Dry_P Parameter: Treatment Value: Drought vs. No Drought
  misc_feature: MA Experiment ID: 20001557 Result: Down-regulated in Transcription
  misc_feature: MA Experiment 20001557 PARAMETER Experiment Name: At_Drought_Soil_Dry_P Parameter: Age (day) Value: 27
  misc_feature: MA Experiment 20001557 PARAMETER Experiment Name: At_Drought_Soil_Dry_P Parameter: Organism Value: A. thaliana
  misc_feature: MA Experiment 20001557 PARAMETER Experiment Name: At_Drought_Soil_Dry_P Parameter: Plant Line Value: WS
  misc_feature: MA Experiment 20001557 PARAMETER Experiment Name: At_Drought_Soil_Dry_P Parameter: Post Timepoint (hr) Value: 3
  misc_feature: MA Experiment 20001557 PARAMETER Experiment Name: At_Drought_Soil_Dry_P Parameter: Post-Treatment Value: Re-Water vs. No Drought
  misc_feature: MA Experiment 20001557 PARAMETER Experiment Name: At_Drought_Soil_Dry_P Parameter: Timepoint (day) Value: 13
  misc_feature: MA Experiment 20001557 PARAMETER Experiment Name: At_Drought_Soil_Dry_P Parameter: Treatment Value: Drought vs. No Drought
  misc_feature: MA Experiment ID: 20001559 Result: Down-regulated in Transcription
  misc_feature: MA Experiment 20001559 PARAMETER Experiment Name: At_Drought_Soil_Dry_P Parameter: Age (day) Value: 28
  misc_feature: MA Experiment 20001559 PARAMETER Experiment Name: At_Drought_Soil_Dry_P Parameter: Organism Value: A. thaliana
  misc_feature: MA Experiment 20001559 PARAMETER Experiment Name: At_Drought_Soil_Dry_P Parameter: Plant Line Value: WS
  misc_feature: MA Experiment 20001559 PARAMETER Experiment Name: At_Drought_Soil_Dry_P Parameter: Post Timepoint (hr) Value: 29
  misc_feature: MA Experiment 20001559 PARAMETER Experiment Name: At_Drought_Soil_Dry_P Parameter: Post-Treatment Value: Re-Water vs. No Drought
  misc_feature: MA Experiment 20001559 PARAMETER Experiment Name: At_Drought_Soil_Dry_P Parameter: Timepoint (day) Value: 14
  misc_feature: MA Experiment 20001559 PARAMETER Experiment Name: At_Drought_Soil_Dry_P Parameter: Treatment Value: Drought vs. No Drought
  misc_feature: MA Experiment ID: 20001757 Result: Up-regulated in Transcription
  misc_feature: MA Experiment 20001757 PARAMETER Experiment Name: At_50mM_NH4NO3_L-to-H_P Parameter: Timepoint (hr) Value: 6
  misc_feature: MA Experiment 20001757 PARAMETER Experiment Name: At_50mM_NH4NO3_L-to-H_P Parameter: Tissue Value: Leaf
  misc_feature: MA Experiment 20001757 PARAMETER Experiment Name: At_50mM_NH4NO3_L-to-H_P Parameter: Treatment Value: 50mM NH4NO3 vs 100mM Mannitol
  misc_feature: MA Experiment ID: 20001904 Result: Down-regulated in Transcription
  misc_feature: MA Experiment 20001904 PARAMETER Experiment Name: At_Drought_Reproduction_P Parameter: Age (day) Value: 37
  misc_feature: MA Experiment 20001904 PARAMETER Experiment Name: At_Drought_Reproduction_P Parameter: Organism Value: A. thaliana
  misc_feature: MA Experiment 20001904 PARAMETER Experiment Name: At_Drought_Reproduction_P Parameter: Plant Line Value: WS
  misc_feature: MA Experiment 20001904 PARAMETER Experiment Name: At_Drought_Reproduction_P Parameter: Timepoint (day) Value: 7
  misc_feature: MA Experiment 20001904 PARAMETER Experiment Name: At_Drought_Reproduction_P Parameter: Tissue Value: Rosettes
  misc_feature: MA Experiment 20001904 PARAMETER Experiment Name: At_Drought_Reproduction_P Parameter: Treatment Value: Drought vs. No Drought
  misc_feature: MA Experiment ID: 20001905 Result: Down-regulated in Transcription
  misc_feature: MA Experiment 20001905 PARAMETER Experiment Name: At_Drought_Reproduction_P Parameter: Age (day) Value: 40
  misc_feature: MA Experiment 20001905 PARAMETER Experiment Name: At_Drought_Reproduction_P Parameter: Organism Value: A. thaliana
  misc_feature: MA Experiment 20001905 PARAMETER Experiment Name: At_Drought_Reproduction_P Parameter: Plant Line Value: WS
  misc_feature: MA Experiment 20001905 PARAMETER Experiment Name: At_Drought_Reproduction_P Parameter: Timepoint (day) Value: 10
  misc_feature: MA Experiment 20001905 PARAMETER Experiment Name: At_Drought_Reproduction_P Parameter: Tissue Value: Rosettes
  misc_feature: MA Experiment 20001905 PARAMETER Experiment Name: At_Drought_Reproduction_P Parameter: Treatment Value: Drought vs. No Drought
  misc_feature: MA Experiment ID: 20001906 Result: Down-regulated in Transcription
  misc_feature: MA Experiment 20001906 PARAMETER Experiment Name: At_Drought_Reproduction_P Parameter: Age (day) Value: 35
  misc_feature: MA Experiment 20001906 PARAMETER Experiment Name: At_Drought_Reproduction_P Parameter: Organism Value: A. thaliana
  misc_feature: MA Experiment 20001906 PARAMETER Experiment Name: At_Drought_Reproduction_P Parameter: Plant Line Value: WS
  misc_feature: MA Experiment 20001906 PARAMETER Experiment Name: At_Drought_Reproduction_P Parameter: Timepoint (day) Value: 5
  misc_feature: MA Experiment 20001906 PARAMETER Experiment Name: At_Drought_Reproduction_P Parameter: Tissue Value: Siliques
  misc_feature: MA Experiment 20001906 PARAMETER Experiment Name: At_Drought_Reproduction_P Parameter: Treatment Value: Drought vs. No Drought
  misc_feature: MA Experiment ID: 20001908 Result: Down-regulated in Transcription
  misc_feature: MA Experiment 20001908 PARAMETER Experiment Name: At_Drought_Reproduction_P Parameter: Age (day) Value: 40
  misc_feature: MA Experiment 20001908 PARAMETER Experiment Name: At_Drought_Reproduction_P Parameter: Organism Value: A. thaliana
  misc_feature: MA Experiment 20001908 PARAMETER Experiment Name: At_Drought_Reproduction_P Parameter: Plant Line Value: WS
  misc_feature: MA Experiment 20001908 PARAMETER Experiment Name: At_Drought_Reproduction_P Parameter: Timepoint (day) Value: 10
  misc_feature: MA Experiment 20001908 PARAMETER Experiment Name: At_Drought_Reproduction_P Parameter: Tissue Value: Siliques
  misc_feature: MA Experiment 20001908 PARAMETER Experiment Name: At_Drought_Reproduction_P Parameter: Treatment Value: Drought vs. No Drought
  misc_feature: MA Experiment ID: 20001911 Result: Down-regulated in Transcription
  misc_feature: MA Experiment 20001911 PARAMETER Experiment Name: At_Drought_Reproduction_P Parameter: Age (day) Value: 40
  misc_feature: MA Experiment 20001911 PARAMETER Experiment Name: At_Drought_Reproduction_P Parameter: Organism Value: A. thaliana
  misc_feature: MA Experiment 20001911 PARAMETER Experiment Name: At_Drought_Reproduction_P Parameter: Plant Line Value: WS
  misc_feature: MA Experiment 20001911 PARAMETER Experiment Name: At_Drought_Reproduction_P Parameter: Timepoint (day) Value: 10
  misc_feature: MA Experiment 20001911 PARAMETER Experiment Name: At_Drought_Reproduction_P Parameter: Tissue Value: Flowers
  misc_feature: MA Experiment 20001911 PARAMETER Experiment Name: At_Drought_Reproduction_P Parameter: Treatment Value: Drought vs. No Drought
aatcgtcttcgagaaaccacaaatctctctttctctcaaactctctcaacaacaacaatggcgtctcttcaacaaactctattctctcttcaatccaaactcccaccatcctccttccaaatcgccagatctctcccactccgaaaaaccttcccaatccgaatcaacaacggtggaaacgccgccggagcaagaatgtcagccaccgcagcatcaagctacgcgatggcattagcagacgtcgcgaaaagaaacgacacaatggaattaacagtcacagacatcgagaagctcgaacaagtcttctcagatccacaagtactaaacttcttcgcgaatccaacaatcaccgtcgagaagaaacgtcaagtcatcgacgacatagtgaaatcgtcgtctcttcaatctcacacatctaacttcctcaacgtcctcgtcgacgcgaatcggatcaatatcgtgacggagatcgttaaggagtttgagttggtttacaataagctaacggatacacaattggcggaggttaggtcggtggtgaaattggaagcgccgcaattagctcagattgcgaaacaggttcagaagttaaccggagctaagaatgttcgggttaagacggttattgatgcgagtcttgtggctggttttacgattcggtatggtgaatccggttcgaagcttattgatatgagtgtgaagaaacagcttgaagatattgcttctcagcttgaacttggtgagattcaattagctacttgagatttgggaaaaattgtataagagaaaaatttgagaatcttttttttttgtgcaagtttaattttttttctcctcatcttctttctctattaatcaatcatataatatacagtactgatgatataataatgattatgagtttattatctttgtaattgttaaatttagtgaattcgaaaacgaattcgaatagtatgtttgcg

SEQ ID NO: 24959 - protein, 253 aa, Arabidopsis thaliana
  peptide (1)..(253): Ceres Seq. ID no. 12321911
  misc_feature (70)..(244): Pfam Name: ATP synthase delta (OSCP) subunit Pfam Description: ATP synthase delta (OSCP) subunit
  misc_feature (64)..(244): Homolog of NCBI NO: 5902612 NR Description: ATP synthase-delta chain [Volvox carteri f.
  misc_feature (37)..(251): Homolog of NCBI NO: 1168587 NR Description: ATP synthase delta chain, chloroplast precursor
  misc_feature (70)..(251): Homolog of NCBI NO: 1084479 NR Description: H+-transporting two-sector ATPase (EC 3.6.3.14)
  misc_feature (120)..(252): Homolog of NCBI NO: 1480014 NR Description: putative delta subunit of ATP synthase [Brassica
  misc_feature (4)..(252): Homolog of NCBI NO: 170098 NR Description: ATP synthase delta subunit precursor
  misc_feature (4)..(252): Homolog of NCBI NO: 114584 NR Description: ATP synthase delta chain, chloroplast precursor
  misc_feature (3)..(252): Homolog of NCBI NO: 399082 NR Description: ATP synthase delta chain, chloroplast precursor
  misc_feature (20)..(252): Homolog of NCBI NO: 416681 NR Description: ATP synthase delta chain, chloroplast precursor
  misc_feature (20)..(253): Homolog of NCBI NO: 15233985 NR Description: H+-transporting ATP synthase-like protein
  misc_feature (4)..(253): Homolog of NCBI NO: 18491181 NR Description: putative H+-transporting ATP synthase
NRLRETTNLSFSQTLSTTTMASLQQTLFSLQSKLPPSSFQIARSLPLRKTFPIRINNGGNAAGARMSATAASSYAMALADVAKRNDTMELTVTDIEKLEQVFSDPQVLNFFANPTITVEKKRQVIDDIVKSSSLQSHTSNFLNVLVDANRINIVTEIVKEFELVYNKLTDTQLAEVRSVVKLEAPQLAQIAKQVQKLTGAKNVRVKTVIDASLVAGFTIRYGESGSKLIDMSVKKQLEDIASQLELGEIQLAT

SEQ ID NO: 24960 - protein, 234 aa, Arabidopsis thaliana
  peptide (1)..(234): Ceres Seq. ID no. 12321912
  misc_feature (51)..(225): Pfam Name: ATP synthase delta (OSCP) subunit Pfam Description: ATP synthase delta (OSCP) subunit
  misc_feature (45)..(225): Homolog of NCBI NO: 5902612 NR Description: ATP synthase-delta chain [Volvox carteri f.
  misc_feature (18)..(232): Homolog of NCBI NO: 1168587 NR Description: ATP synthase delta chain, chloroplast precursor
  misc_feature (51)..(232): Homolog of NCBI NO: 1084479 NR Description: H+-transporting two-sector ATPase (EC 3.6.3.14)
  misc_feature (101)..(233): Homolog of NCBI NO: 1480014 NR Description: putative delta subunit of ATP synthase [Brassica
  misc_feature (1)..(233): Homolog of NCBI NO: 170098 NR Description: ATP synthase delta subunit precursor
  misc_feature (1)..(233): Homolog of NCBI NO: 114584 NR Description: ATP synthase delta chain, chloroplast precursor
  misc_feature (1)..(233): Homolog of NCBI NO: 399082 NR Description: ATP synthase delta chain, chloroplast precursor
  misc_feature (1)..(233): Homolog of NCBI NO: 416681 NR Description: ATP synthase delta chain, chloroplast precursor
  misc_feature (1)..(234): Homolog of NCBI NO: 15233985 NR Description: H+-transporting ATP synthase-like protein
  misc_feature (1)..(234): Homolog of NCBI NO: 18491181 NR Description: putative H+-transporting ATP synthase
MASLQQTLFSLQSKLPPSSFQIARSLPLRKTFPIRINNGGNAAGARMSATAASSYAMALADVAKRNDTMELTVTDIEKLEQVFSDPQVLNFFANPTITVEKKRQVIDDIVKSSSLQSHTSNFLNVLVDANRINIVTEIVKEFELVYNKLTDTQLAEVRSVVKLEAPQLAQIAKQVQKLTGAKNVRVKTVIDASLVAGFTIRYGESGSKLIDMSVKKQLEDIASQLELGEIQLAT

SEQ ID NO: 24961 - protein, 188 aa, Arabidopsis thaliana
  peptide (1)..(188): Ceres Seq. ID no. 12321913
  misc_feature (5)..(179): Pfam Name: ATP synthase delta (OSCP) subunit Pfam Description: ATP synthase delta (OSCP) subunit
  misc_feature (1)..(179): Homolog of NCBI NO: 5902612 NR Description: ATP synthase-delta chain [Volvox carteri f.
  misc_feature (1)..(186): Homolog of NCBI NO: 1168587 NR Description: ATP synthase delta chain, chloroplast precursor
  misc_feature (5)..(186): Homolog of NCBI NO: 1084479 NR Description: H+-transporting two-sector ATPase (EC 3.6.3.14)
  misc_feature (55)..(187): Homolog of NCBI NO: 1480014 NR Description: putative delta subunit of ATP synthase [Brassica
  misc_feature (1)..(187): Homolog of NCBI NO: 170098 NR Description: ATP synthase delta subunit precursor
  misc_feature (1)..(187): Homolog of NCBI NO: 114584 NR Description: ATP synthase delta chain, chloroplast precursor
  misc_feature (1)..(187): Homolog of NCBI NO: 399082 NR Description: ATP synthase delta chain, chloroplast precursor
  misc_feature (1)..(187): Homolog of NCBI NO: 416681 NR Description: ATP synthase delta chain, chloroplast precursor
  misc_feature (1)..(188): Homolog of NCBI NO: 15233985 NR Description: H+-transporting ATP synthase-like protein
  misc_feature (1)..(188): Homolog of NCBI NO: 18491181 NR Description: putative H+-transporting ATP synthase
MSATAASSYAMALADVAKRNDTMELTVTDIEKLEQVFSDPQVLNFFANPTITVEKKRQVIDDIVKSSSLQSHTSNFLNVLVDANRINIVTEIVKEFELVYNKLTDTQLAEVRSVVKLEAPQLAQIAKQVQKLTGAKNVRVKTVIDASLVAGFTIRYGESGSKLIDMSVKKQLEDIASQLELGEIQLAT

SEQ ID NO: 24962 - DNA, 1483 bp, Arabidopsis thaliana
  misc_feature (1)..(1483): Ceres Seq. ID no. 12395989
  misc_feature: MA Experiment ID: 108573 Result: Up-regulated in Transcription
  misc_feature: MA Experiment 108573 PARAMETER Experiment Name: At_Drought_cDNA_P Parameter: Timepoint (hr) Value: 6
  misc_feature: MA Experiment 108573 PARAMETER Experiment Name: At_Drought_cDNA_P Parameter: Tissue Value: Aerial
  misc_feature: MA Experiment 108573 PARAMETER Experiment Name: At_Drought_cDNA_P Parameter: Treatment Value: Drought vs. No Drought
  misc_feature: MA Experiment ID: 108577 Result: Down-regulated in Transcription
  misc_feature: MA Experiment 108577 PARAMETER Experiment Name: At_42deg_Heat_cDNA_P Parameter: Temperature (deg C) Value: 42 vs. 22
  misc_feature: MA Experiment 108577 PARAMETER Experiment Name: At_42deg_Heat_cDNA_P Parameter: Timepoint (hr) Value: 6
  misc_feature: MA Experiment 108577 PARAMETER Experiment Name: At_42deg_Heat_cDNA_P Parameter: Tissue Value: Aerial
  misc_feature: MA Experiment ID: 108585 Result: Up-regulated in Transcription
  misc_feature: MA Experiment 108585 PARAMETER Experiment Name: At_5mM_NaNP_cDNA_P Parameter: Timepoint (hr) Value: 6
  misc_feature: MA Experiment 108585 PARAMETER Experiment Name: At_5mM_NaNP_cDNA_P Parameter: Tissue Value: Aerial
  misc_feature: MA Experiment 108585 PARAMETER Experiment Name: At_5mM_NaNP_cDNA_P Parameter: Treatment Value: null
  misc_feature: MA Experiment ID: 20000184 Result: Down-regulated in Transcription
  misc_feature: MA Experiment 20000184 PARAMETER Experiment Name: At_Shoots__P Parameter: Age (day) Value: 7
  misc_feature: MA Experiment 20000184 PARAMETER Experiment Name: At_Shoots__P Parameter: Tissue Value: Shoots vs. Whole Plant
aataattgttcctctttcactttctacatcctttcttcctcttcctcttctcttccttctccgttgcaaagctcaagaaaaactaaaggaatccaagtggtaaacctcagcgcaaatttcaagaagaagaaaagcagagaaaagttttcttctttttgacctttcttcccctaaattaaagatcctgttatggaatctccacattctgaggcatcaatcgtgaatggtagtatccatttgaatggcagtggtgaaaccaaaacaaagaatatagtcatgtcgtctgattcagacagtttcatcggtgtgcttgaggtttttgttcaccaagctagggacatccacaacatctgtatctatcataagcaagatgtgtatgctaagctttgtctcacaaatgatcccgaaaactccttgtccacaaagatcatcaatggtggagggcaaaaccctgtcttcgacgatacccttcagttcgacgttaagaacctggattgttcgcttaagtgtgagatatttatgatgagccgcgtgaagaattatcttgaggatcagttacttggattctctcttgtacctttgtctgaagtgattgtgaggaatgggaaattggagaaagagttctccctttcttcaaccgatttgtatcactctcctgcaggttttgtcgagttgtctctctcgtacgcaggagattcgcctgacgtgatgcatattcctgcggttccaactgcggatgagaccgagttggctcctatcgagtttgatgagagtgagtttttggatccaaagattgtctgtgaaaacaatcaaatggtgtctaagtacttctccactacgtgttctgattctgatgattttgcaagctctgaaactggctttgtggaagtaaacagcatcctgtctgcagttgttgaaactgctgttgacgaagcagcaccggccaatactgtctcaacaaatggaatctcatctccatcaactgcagttagctctggctcctcgagaactcatgatgtttcaaagcaatctagtgaaggaaacaactcagattcagaacaagaagcgaagaagccaacagatatcatcaagagtggtgatttagataagactgatgaagaagcagttgtgaaaccggttctgacagtgcacattgaaccagagcaaaaggtagtgcaacaagatattgttgacatgtacacaaaaagcttgcagcaattcactgagtcactggctaagatgaaacttcctttggacatcgatagcccaacccaatcagagaactcaagctcgtcccagcagacgccaaagagtgctagctcccgtgttttctacgggagtagagccttcttctgaagctcagaaatcatctcaagtttggcatcagaagtagcgagcatgtagtgaaagtgtaataagttaaaagtcgacactatctaaaatgtgtaactatcttcctttgaagcctttagcttttcttgtt

SEQ ID NO: 24963 - protein, 388 aa, Arabidopsis thaliana
  peptide (1)..(388): Ceres Seq. ID no. 12395990
  misc_feature (41)..(128): Pfam Name: C2 domain Pfam Description: C2 domain
  misc_feature (1)..(388): Homolog of NCBI NO: 24414275 NR Description: Unknown protein [Oryza sativa (japonica
  misc_feature (2)..(388): Homolog of NCBI NO: 28393796 NR Description: unknown protein [Arabidopsis thaliana]
  misc_feature (2)..(388): Homolog of NCBI NO: 30696612 NR Description: C2 domain-containing protein [Arabidopsis
  misc_feature (2)..(388): Homolog of NCBI NO: 9758185 NR Description: gene_id:MTE17.25~pir||T07080~similar to unknown
  misc_feature (41)..(388): Homolog of NCBI NO: 34906644 NR Description: P0431G06.18 [Oryza sativa (japonica
  misc_feature (37)..(388): Homolog of NCBI NO: 18416832 NR Description: putative protein; protein id: At5g12300.1
  misc_feature (38)..(274): Homolog of NCBI NO: 34901084 NR Description: contains ESTs
  misc_feature (1)..(388): Homolog of NCBI NO: 18403117 NR Description: Expressed protein
  misc_feature (1)..(388): Homolog of NCBI NO: 25405379 NR Description: unknown protein [imported] - Arabidopsis thaliana
  misc_feature (1)..(388): Homolog of NCBI NO: 21593485 NR Description: unknown [Arabidopsis thaliana]
MESPHSEASIVNGSIHLNGSGETKTKNIVMSSDSDSFIGVLEVFVHQARDIHNICIYHKQDVYAKLCLTNDPENSLSTKIINGGGQNPVFDDTLQFDVKNLDCSLKCEIFMMSRVKNYLEDQLLGFSLVPLSEVIVRNGKLEKEFSLSSTDLYHSPAGFVELSLSYAGDSPDVMHIPAVPTADETELAPIEFDESEFLDPKIVCENNQMVSKYFSTTCSDSDDFASSETGFVEVNSILSAVVETAVDEAAPANTVSTNGISSPSTAVSSGSSRTHDVSKQSSEGNNSDSEQEAKKPTDIIKSGDLDKTDEEAVVKPVLTVHIEPEQKVVQQDIVDMYTKSLQQFTESLAKMKLPLDIDSPTQSENSSSSQQTPKSASSRVFYGSRAFF

SEQ ID NO: 24964 - protein, 359 aa, Arabidopsis thaliana
  peptide (1)..(359): Ceres Seq. ID no. 12395991
  misc_feature (12)..(99): Pfam Name: C2 domain Pfam Description: C2 domain
  misc_feature (9)..(245): Homolog of NCBI NO: 34901084 NR Description: contains ESTs
  misc_feature (12)..(359): Homolog of NCBI NO: 34906644 NR Description: P0431G06.18 [Oryza sativa (japonica
  misc_feature (8)..(359): Homolog of NCBI NO: 18416832 NR Description: putative protein; protein id: At5g12300.1
  misc_feature (1)..(359): Homolog of NCBI NO: 24414275 NR Description: Unknown protein [Oryza sativa (japonica
  misc_feature (1)..(359): Homolog of NCBI NO: 28393796 NR Description: unknown protein [Arabidopsis thaliana]
  misc_feature (1)..(359): Homolog of NCBI NO: 30696612 NR Description: C2 domain-containing protein [Arabidopsis
  misc_feature (1)..(359): Homolog of NCBI NO: 9758185 NR Description: gene_id:MTE17.25~pir||T07080~similar to unknown
  misc_feature (1)..(359): Homolog of NCBI NO: 18403117 NR Description: Expressed protein
  misc_feature (1)..(359): Homolog of NCBI NO: 25405379 NR Description: unknown protein [imported] - Arabidopsis thaliana
  misc_feature (1)..(359): Homolog of NCBI NO: 21593485 NR Description: unknown [Arabidopsis thaliana]
MSSDSDSFIGVLEVFVHQARDIHNICIYHKQDVYAKLCLTNDPENSLSTKIINGGGQNPVFDDTLQFDVKNLDCSLKCEIFMMSRVKNYLEDQLLGFSLVPLSEVIVRNGKLEKEFSLSSTDLYHSPAGFVELSLSYAGDSPDVMHIPAVPTADETELAPIEFDESEFLDPKIVCENNQMVSKYFSTTCSDSDDFASSETGFVEVNSILSAVVETAVDEAAPANTVSTNGISSPSTAVSSGSSRTHDVSKQSSEGNNSDSEQEAKKPTDIIKSGDLDKTDEEAVVKPVLTVHIEPEQKVVQQDIVDMYTKSLQQFTESLAKMKLPLDIDSPTQSENSSSSQQTPKSASSRVFYGSRAFF

SEQ ID NO: 24965 - protein, 278 aa, Arabidopsis thaliana
  peptide (1)..(278): Ceres Seq. ID no. 12395992
  misc_feature (1)..(164): Homolog of NCBI NO: 34901084 NR Description: contains ESTs
  misc_feature (1)..(278): Homolog of NCBI NO: 34906644 NR Description: P0431G06.18 [Oryza sativa (japonica
  misc_feature (1)..(278): Homolog of NCBI NO: 18416832 NR Description: putative protein; protein id: At5g12300.1
  misc_feature (1)..(278): Homolog of NCBI NO: 24414275 NR Description: Unknown protein [Oryza sativa (japonica
  misc_feature (1)..(278): Homolog of NCBI NO: 28393796 NR Description: unknown protein [Arabidopsis thaliana]
  misc_feature (1)..(278): Homolog of NCBI NO: 30696612 NR Description: C2 domain-containing protein [Arabidopsis
  misc_feature (1)..(278): Homolog of NCBI NO: 9758185 NR Description: gene_id:MTE17.25~pir||T07080~similar to unknown
  misc_feature (1)..(278): Homolog of NCBI NO: 18403117 NR Description: Expressed protein
  misc_feature (1)..(278): Homolog of NCBI NO: 25405379 NR Description: unknown protein [imported] - Arabidopsis thaliana
  misc_feature (1)..(278): Homolog of NCBI NO: 21593485 NR Description: unknown [Arabidopsis thaliana]
MMSRVKNYLEDQLLGFSLVPLSEVIVRNGKLEKEFSLSSTDLYHSPAGFVELSLSYAGDSPDVMHIPAVPTADETELAPIEFDESEFLDPKIVCENNQMVSKYFSTTCSDSDDFASSETGFVEVNSILSAVVETAVDEAAPANTVSTNGISSPSTAVSSGSSRTHDVSKQSSEGNNSDSEQEAKKPTDIIKSGDLDKTDEEAVVKPVLTVHIEPEQKVVQQDIVDMYTKSLQQFTESLAKMKLPLDIDSPTQSENSSSSQQTPKSASSRVFYGSRAFF

SEQ ID NO: 24966 - DNA, 774 bp, Arabidopsis thaliana
  misc_feature (1)..(774): Ceres Seq. ID no. 12384810
  misc_feature: MA Experiment ID: 108576 Result: Up-regulated in Transcription
  misc_feature: MA Experiment 108576 PARAMETER Experiment Name: At_42deg_Heat_cDNA_P Parameter: Temperature (deg C) Value: 42 vs. 22
  misc_feature: MA Experiment 108576 PARAMETER Experiment Name: At_42deg_Heat_cDNA_P Parameter: Timepoint (hr) Value: 1
  misc_feature: MA Experiment 108576 PARAMETER Experiment Name: At_42deg_Heat_cDNA_P Parameter: Tissue Value: Aerial
  misc_feature: MA Experiment ID: 20000087 Result: Down-regulated in Transcription
  misc_feature: MA Experiment 20000087 PARAMETER Experiment Name: At_100uM_ABA_Mutants_cDNA_P Parameter: Plant Line Value: WS
  misc_feature: MA Experiment 20000087 PARAMETER Experiment Name: At_100uM_ABA_Mutants_cDNA_P Parameter: Timepoint (hr) Value: 6
  misc_feature: MA Experiment 20000087 PARAMETER Experiment Name: At_100uM_ABA_Mutants_cDNA_P Parameter: Tissue Value: Aerial
  misc_feature: MA Experiment 20000087 PARAMETER Experiment Name: At_100uM_ABA_Mutants_cDNA_P Parameter: Treatment Value: 100uM ABA vs. No Treatment
  misc_feature: MA Experiment ID: 20000227 Result: Down-regulated in Transcription
  misc_feature: MA Experiment 20000227 PARAMETER Experiment Name: At_Root-Tips-vs-Tops_P Parameter: Tissue Value: Root Tips vs. Root Tops
  misc_feature: MA Experiment ID: 20000495 Result: Down-regulated in Transcription
  misc_feature: MA Experiment 20000495 PARAMETER Experiment Name: At_Guard_Cells_P Parameter: Harvest Date Value: 8/2/2002
  misc_feature: MA Experiment 20000495 PARAMETER Experiment Name: At_Guard_Cells_P Parameter: Organism Value: A. thaliana
  misc_feature: MA Experiment 20000495 PARAMETER Experiment Name: At_Guard_Cells_P Parameter: Tissue Value: Guard Cells vs. Leaves
  misc_feature: MA Experiment ID: 20001557 Result: Down-regulated in Transcription
  misc_feature: MA Experiment 20001557 PARAMETER Experiment Name: At_Drought_Soil_Dry_P Parameter: Age (day) Value: 27
  misc_feature: MA Experiment 20001557 PARAMETER Experiment Name: At_Drought_Soil_Dry_P Parameter: Organism Value: A. thaliana
  misc_feature: MA Experiment 20001557 PARAMETER Experiment Name: At_Drought_Soil_Dry_P Parameter: Plant Line Value: WS
  misc_feature: MA Experiment 20001557 PARAMETER Experiment Name: At_Drought_Soil_Dry_P Parameter: Post Timepoint (hr) Value: 3
  misc_feature: MA Experiment 20001557 PARAMETER Experiment Name: At_Drought_Soil_Dry_P Parameter: Post-Treatment Value: Re-Water vs. No Drought
  misc_feature: MA Experiment 20001557 PARAMETER Experiment Name: At_Drought_Soil_Dry_P Parameter: Timepoint (day) Value: 13
  misc_feature: MA Experiment 20001557 PARAMETER Experiment Name: At_Drought_Soil_Dry_P Parameter: Treatment Value: Drought vs. No Drought
acacaatcattcgttctctctctcaaagtctcaatccatctccagaggtagtgtgtttttagtggaggaagaatcagattcaaaagccaaaatcaaagcttggtgatgggatctggagctggcaatttcctcaaggttcttctcaggaacttcgatgttcttgctgggcctgtggttagtctcgtttatcctctatatgcttcagttcaagcgattgaaactcaatctcatgctgatgacaaacaatggctaacttattgggtcctttattcattacttacactcatcgagctcacattcgccaaactcatcgaatggttaccgatatggtcatacatgaagctgatcttgacttgctggcttgttattccctactttagtggcgctgcttatgtctatgaacattttgtgagaccggtgtttgttaaccctcggagcattaacatttggtatgtgccaaagaagatggatatcttcagaaaaccagacgatgtgttaacagctgctgagaagtacattgcagagaatggacctgatgcttttgagaagatcttaagccgggctgataaatcaaaaagatataataagcatgaatatgaaagctatgaaacgatgtatggtgagggttatcagtactaagagaaatttgaaaaagcttttaattttagaatgtgtgaagcaacttcatgtctttgttgtttgtttatgcttcctttttgtggatctctctcgtgtaaaaaagttgctaattaaaataaagatgctttctgctcc

SEQ ID NO: 24967 - protein, 177 aa, Arabidopsis thaliana
  peptide (1)..(177): Ceres Seq. ID no. 12384811
  misc_feature (9)..(106): Pfam Name: TB2/DP1, HVA22 family Pfam Description: TB2/DP1, HVA22 family
  misc_feature (12)..(103): Homolog of NCBI NO: 33342176 NR Description: hypothetical protein [Triticum aestivum]
  misc_feature (26)..(106): Homolog of NCBI NO: 8777395 NR Description: gene_id:MFB16.12~pir||T05517~similar to unknown
  misc_feature (12)..(103): Homolog of NCBI NO: 1076715 NR Description: abscisic acid-induced protein HVA22 - barley
  misc_feature (20)..(106): Homolog of NCBI NO: 18416458 NR Description: abscisic acid-induced - like protein
  misc_feature (19)..(106): Homolog of NCBI NO: 18423191 NR Description: putative protein
  misc_feature (34)..(158): Homolog of NCBI NO: 34910810 NR Description: P0042A10.34 [Oryza sativa (japonica
  misc_feature (1)..(162): Homolog of NCBI NO: 4884934 NR Description: AtHVA22b [Arabidopsis thaliana]
  misc_feature (1)..(162): Homolog of NCBI NO: 15241840 NR Description: AtHVA22b-like protein
  misc_feature (3)..(177): Homolog of NCBI NO: 15222421 NR Description: AtHVA22c
  misc_feature (1)..(177): Homolog of NCBI NO: 15221266 NR Description: AtHVA22a; protein id: At1g74520.1, supported by
MGSGAGNFLKVLLRNFDVLAGPVVSLVYPLYASVQAIETQSHADDKQWLTYWVLYSLLTLIELTFAKLIEWLPIWSYMKLILTCWLVIPYFSGAAYVYEHFVRPVFVNPRSINIWYVPKKMDIFRKPDDVLTAAEKYIAENGPDAFEKILSRADKSKRYNKHEYESYETMYGEGYQY

SEQ ID NO: 24968 - protein, 100 aa, Arabidopsis thaliana
  peptide (1)..(100): Ceres Seq. ID no. 12384812
  misc_feature (1)..(26): Homolog of NCBI NO: 33342176 NR Description: hypothetical protein [Triticum aestivum]
  misc_feature (1)..(29): Homolog of NCBI NO: 8777395 NR Description: gene_id:MFB16.12~pir||T05517~similar to unknown
  misc_feature (1)..(26): Homolog of NCBI NO: 1076715 NR Description: abscisic acid-induced protein HVA22 - barley
  misc_feature (1)..(29): Homolog of NCBI NO: 18416458 NR Description: abscisic acid-induced - like protein
  misc_feature (1)..(29): Homolog of NCBI NO: 18423191 NR Description: putative protein
  misc_feature (1)..(81): Homolog of NCBI NO: 34910810 NR Description: P0042A10.34 [Oryza sativa (japonica
  misc_feature (1)..(85): Homolog of NCBI NO: 4884934 NR Description: AtHVA22b [Arabidopsis thaliana]
  misc_feature (1)..(85): Homolog of NCBI NO: 15241840 NR Description: AtHVA22b-like protein
  misc_feature (1)..(100): Homolog of NCBI NO: 15222421 NR Description: AtHVA22c
  misc_feature (1)..(100): Homolog of NCBI NO: 15221266 NR Description: AtHVA22a; protein id: At1g74520.1, supported by
MKLILTCWLVIPYFSGAAYVYEHFVRPVFVNPRSINIWYVPKKMDIFRKPDDVLTAAEKYIAENGPDAFEKILSRADKSKRYNKHEYESYETMYGEGYQY

SEQ ID NO: 24969 - DNA, 1174 bp, Arabidopsis thaliana
  misc_feature (1)..(1174): Ceres Seq. ID no. 13490958
  misc_feature: MA Experiment ID: 108462 Result: Down-regulated in Transcription
  misc_feature: MA Experiment 108462 PARAMETER Experiment Name: At_Germinating_Seeds_cDNA_P Parameter: Age (day) Value: 2 vs. 0
  misc_feature: MA Experiment 108462 PARAMETER Experiment Name: At_Germinating_Seeds_cDNA_P Parameter: Tissue Value: Germinating Seeds
  misc_feature: MA Experiment ID: 108463 Result: Down-regulated in Transcription
  misc_feature: MA Experiment 108463 PARAMETER Experiment Name: At_Germinating_Seeds_cDNA_P Parameter: Age (day) Value: 3 vs. 0
  misc_feature: MA Experiment 108463 PARAMETER Experiment Name: At_Germinating_Seeds_cDNA_P Parameter: Tissue Value: Germinating Seeds
  misc_feature: MA Experiment ID: 108464 Result: Down-regulated in Transcription
  misc_feature: MA Experiment 108464 PARAMETER Experiment Name: At_Germinating_Seeds_cDNA_P Parameter: Age (day) Value: 4 vs. 0
  misc_feature: MA Experiment 108464 PARAMETER Experiment Name: At_Germinating_Seeds_cDNA_P Parameter: Tissue Value: Germinating Seeds
  misc_feature: MA Experiment ID: 108577 Result: Down-regulated in Transcription
  misc_feature: MA Experiment 108577 PARAMETER Experiment Name: At_42deg_Heat_cDNA_P Parameter: Temperature (deg C) Value: 42 vs. 22
  misc_feature: MA Experiment 108577 PARAMETER Experiment Name: At_42deg_Heat_cDNA_P Parameter: Timepoint (hr) Value: 6
  misc_feature: MA Experiment 108577 PARAMETER Experiment Name: At_42deg_Heat_cDNA_P Parameter: Tissue Value: Aerial
  misc_feature: MA Experiment ID: 108594 Result: Down-regulated in Transcription
  misc_feature: MA Experiment 108594 PARAMETER Experiment Name: At_Ler-rhl_Root_cDNA_P Parameter: Plant Line Value: null
  misc_feature: MA Experiment ID: 108595 Result: Down-regulated in Transcription
  misc_feature: MA Experiment 108595 PARAMETER Experiment Name: At_Ler-pi_Ovule_cDNA_P Parameter: Plant Line Value: null
  misc_feature: MA Experiment ID: 20000069 Result: Up-regulated in Transcription
  misc_feature: MA Experiment 20000069 PARAMETER Experiment Name: At_100uM_ABA_Mutants_cDNA_P Parameter: Plant Line Value: CS23
  misc_feature: MA Experiment 20000069 PARAMETER Experiment Name: At_100uM_ABA_Mutants_cDNA_P Parameter: Timepoint (hr) Value: 6
  misc_feature: MA Experiment 20000069 PARAMETER Experiment Name: At_100uM_ABA_Mutants_cDNA_P Parameter: Tissue Value: Aerial
  misc_feature: MA Experiment 20000069 PARAMETER Experiment Name: At_100uM_ABA_Mutants_cDNA_P Parameter: Treatment Value: 100uM ABA vs. No Treatment
  misc_feature: MA Experiment ID: 20000070 Result: Up-regulated in Transcription
  misc_feature: MA Experiment 20000070 PARAMETER Experiment Name: At_100uM_ABA_Mutants_cDNA_P Parameter: Plant Line Value: CS24
  misc_feature: MA Experiment 20000070 PARAMETER Experiment Name: At_100uM_ABA_Mutants_cDNA_P Parameter: Timepoint (hr) Value: 6
  misc_feature: MA Experiment 20000070 PARAMETER Experiment Name: At_100uM_ABA_Mutants_cDNA_P Parameter: Tissue Value: Aerial
  misc_feature: MA Experiment 20000070 PARAMETER Experiment Name: At_100uM_ABA_Mutants_cDNA_P Parameter: Treatment Value: 100uM ABA vs. No Treatment
  misc_feature: MA Experiment ID: 20000071 Result: Up-regulated in Transcription
  misc_feature: MA Experiment 20000071 PARAMETER Experiment Name: At_100uM_ABA_Mutants_cDNA_P Parameter: Plant Line Value: CS8104
  misc_feature: MA Experiment 20000071 PARAMETER Experiment Name: At_100uM_ABA_Mutants_cDNA_P Parameter: Timepoint (hr) Value: 6
  misc_feature: MA Experiment 20000071 PARAMETER Experiment Name: At_100uM_ABA_Mutants_cDNA_P Parameter: Tissue Value: Aerial
  misc_feature: MA Experiment 20000071 PARAMETER Experiment Name: At_100uM_ABA_Mutants_cDNA_P Parameter: Treatment Value: 100uM ABA vs. No Treatment
  misc_feature: MA Experiment ID: 20000072 Result: Up-regulated in Transcription
  misc_feature: MA Experiment 20000072 PARAMETER Experiment Name: At_100uM_ABA_Mutants_cDNA_P Parameter: Plant Line Value: CS8105
  misc_feature: MA Experiment 20000072 PARAMETER Experiment Name: At_100uM_ABA_Mutants_cDNA_P Parameter: Timepoint (hr) Value: 6
  misc_feature: MA Experiment 20000072 PARAMETER Experiment Name: At_100uM_ABA_Mutants_cDNA_P Parameter: Tissue Value: Aerial
  misc_feature: MA Experiment 20000072 PARAMETER Experiment Name: At_100uM_ABA_Mutants_cDNA_P Parameter: Treatment Value: 100uM ABA vs. No Treatment
  misc_feature: MA Experiment ID: 20000086 Result: Up-regulated in Transcription
  misc_feature: MA Experiment 20000086 PARAMETER Experiment Name: At_100uM_ABA_Mutants_cDNA_P Parameter: Plant Line Value: CS22
  misc_feature: MA Experiment 20000086 PARAMETER Experiment Name: At_100uM_ABA_Mutants_cDNA_P Parameter: Timepoint (hr) Value: 6
  misc_feature: MA Experiment 20000086 PARAMETER Experiment Name: At_100uM_ABA_Mutants_cDNA_P Parameter: Tissue Value: Aerial
  misc_feature: MA Experiment 20000086 PARAMETER Experiment Name: At_100uM_ABA_Mutants_cDNA_P Parameter: Treatment Value: 100uM ABA vs. No Treatment
  misc_feature: MA Experiment ID: 20000088 Result: Up-regulated in Transcription
  misc_feature: MA Experiment 20000088 PARAMETER Experiment Name: At_100uM_ABA_Mutants_cDNA_P Parameter: Plant Line Value: Landsberg
  misc_feature: MA Experiment 20000088 PARAMETER Experiment Name: At_100uM_ABA_Mutants_cDNA_P Parameter: Timepoint (hr) Value: 6
  misc_feature: MA Experiment 20000088 PARAMETER Experiment Name: At_100uM_ABA_Mutants_cDNA_P Parameter: Tissue Value: Aerial
  misc_feature: MA Experiment 20000088 PARAMETER Experiment Name: At_100uM_ABA_Mutants_cDNA_P Parameter: Treatment Value: 100uM ABA vs. No Treatment
  misc_feature: MA Experiment ID: 20000089 Result: Up-regulated in Transcription
  misc_feature: MA Experiment ID: 20000090 Result: Up-regulated in Transcription
  misc_feature: MA Experiment ID: 20000111 Result: Down-regulated in Transcription
  misc_feature: MA Experiment 20000111 PARAMETER Experiment Name: At_42deg_Heat_cDNA_P Parameter: Temperature (deg C) Value: 42 vs. 22
  misc_feature: MA Experiment 20000111 PARAMETER Experiment Name: At_42deg_Heat_cDNA_P Parameter: Timepoint (hr) Value: 6
  misc_feature: MA Experiment 20000111 PARAMETER Experiment Name: At_42deg_Heat_cDNA_P Parameter: Tissue Value: Aerial
  misc_feature: MA Experiment ID: 20000117 Result: Up-regulated in Transcription
  misc_feature: MA Experiment 20000117 PARAMETER Experiment Name: At_100uM_ABA_Mutants_cDNA_P Parameter: Plant Line Value: Columbia
  misc_feature: MA Experiment 20000117 PARAMETER Experiment Name: At_100uM_ABA_Mutants_cDNA_P Parameter: Timepoint (hr) Value: 6
  misc_feature: MA Experiment 20000117 PARAMETER Experiment Name: At_100uM_ABA_Mutants_cDNA_P Parameter: Tissue Value: Aerial
  misc_feature: MA Experiment 20000117 PARAMETER Experiment Name: At_100uM_ABA_Mutants_cDNA_P Parameter: Treatment Value: 100uM ABA vs. No Treatment
  misc_feature: MA Experiment ID: 20000173 Result: Down-regulated in Transcription
  misc_feature: MA Experiment 20000173 PARAMETER Experiment Name: At_42deg_Heat_P Parameter: Age (day) Value: 14
  misc_feature: MA Experiment 20000173 PARAMETER Experiment Name: At_42deg_Heat_P Parameter: Organism Value: A. thaliana
  misc_feature: MA Experiment 20000173 PARAMETER Experiment Name: At_42deg_Heat_P Parameter: Plant Line Value: WS
  misc_feature: MA Experiment 20000173 PARAMETER Experiment Name: At_42deg_Heat_P Parameter: Temperature (deg C) Value: 42 vs. 22
  misc_feature: MA Experiment 20000173 PARAMETER Experiment Name: At_42deg_Heat_P Parameter: Timepoint (hr) Value: 6
  misc_feature: MA Experiment 20000173 PARAMETER Experiment Name: At_42deg_Heat_P Parameter: Tissue Value: Aerial
  misc_feature: MA Experiment ID: 20000180 Result: Down-regulated in Transcription
  misc_feature: MA Experiment 20000180 PARAMETER Experiment Name: At_Germinating_Seeds_P Parameter: Age (hr) Value: 24 vs. 0
  misc_feature: MA Experiment 20000180 PARAMETER Experiment Name: At_Germinating_Seeds_P Parameter: Tissue Value: Germinating Seeds
  misc_feature: MA Experiment ID: 20000184 Result: Down-regulated in Transcription
  misc_feature: MA Experiment 20000184 PARAMETER Experiment Name: At_Shoots__P Parameter: Age (day) Value: 7
  misc_feature: MA Experiment 20000184 PARAMETER Experiment Name: At_Shoots__P Parameter: Tissue Value: Shoots vs. Whole Plant
  misc_feature: MA Experiment ID: 20000227 Result: Down-regulated in Transcription
  misc_feature: MA Experiment 20000227 PARAMETER Experiment Name: At_Root-Tips-vs-Tops_P Parameter: Tissue Value: Root Tips vs. Root Tops
  misc_feature: MA Experiment ID: 20000235 Result: Down-regulated in Transcription
  misc_feature: MA Experiment 20000235 PARAMETER Experiment Name: At_Siliques_P Parameter: Age (day) Value: 21
  misc_feature: MA Experiment 20000235 PARAMETER Experiment Name: At_Siliques_P Parameter: Organism Value: A. thaliana
  misc_feature: MA Experiment 20000235 PARAMETER Experiment Name: At_Siliques_P Parameter: Plant Line Value: WS
  misc_feature: MA Experiment 20000235 PARAMETER Experiment Name: At_Siliques_P Parameter: Tissue Value: 5-10mm Siliques vs. Whole Plant
  misc_feature: MA Experiment ID: 20000438 Result: Down-regulated in Transcription
  misc_feature: MA Experiment 20000438 PARAMETER Experiment Name: At_Shoots__P Parameter: Age (day) Value: 14
  misc_feature: MA Experiment 20000438 PARAMETER Experiment Name: At_Shoots__P Parameter: Tissue Value: Shoots vs. Whole Plant
  misc_feature: MA Experiment ID: 20001248 Result: Up-regulated in Transcription
  misc_feature: MA Experiment 20001248 PARAMETER Experiment Name: At_Far-red-induction_P Parameter: Age (day) Value: 7
  misc_feature: MA Experiment 20001248 PARAMETER Experiment Name: At_Far-red-induction_P Parameter: Light Value: Far-red vs. White
  misc_feature: MA Experiment 20001248 PARAMETER Experiment Name: At_Far-red-induction_P Parameter: Organism Value: A. thaliana
  misc_feature: MA Experiment 20001248 PARAMETER Experiment Name: At_Far-red-induction_P Parameter: Plant Line Value: Columbia
  misc_feature: MA Experiment 20001248 PARAMETER Experiment Name: At_Far-red-induction_P Parameter: Timepoint (hr) Value: 4
  misc_feature: MA Experiment 20001248 PARAMETER Experiment Name: At_Far-red-induction_P Parameter: Tissue Value: Whole Plant
gaatagaaatccaaatcgtgggcaaagaaagaaacacaaaacaaaatcgtcgatggctgttacaaaaaggcttttgtgagtgtcccaattccattcacaaagttttagtgtttaataatatctgacactctctttctttgaccgtcgccgccgcaatgaccgtcggagttttagctttgcaaggttctttcaatgagcacatcgcggctctgcggcggctcggtgtccaaggcgtcgagattaggaaggctgaccagcttctcaccgtttcttctcttatcattcctggcggcgagagcaccaccatggccaaactcgccgagtatcataacttgtttccggctctacgtgagtttgttaagatggggaaacctgtttgggggacatgcgcaggtcttatattcttggcagacagagcagttggtcagaaagagggaggtcaggaattagttggtggccttgattgcaccgtacataggaacttcttcggtagccagattcaaagttttgaagctgatatcttagtacctcaactaacatctcaagaaggtgggccagagacatacaggggagtgttcatacgtgctccagctgttcttgatgtaggtcctgatgtcgaagtcctggcggattatcccgtcccatcaaacaaggtcttgtattcaagctccaccgtacaaattcaagaggaagatgctcttcctgaaacaaaagtcattgttgctgtgaagcaaggaaacttgttagcaactgcttttcatcccgagcttactgcagacactcgatggcacagttatttcataaagatgacgaaagagattgagcaaggagcttcttcaagcagtagtaagactattgtatctgttggagaaacaagtgctggtcccgagccagctaagcctgatcttcctatatttcaataactgaacagagagaagatacacacttcttaaaataaaaaccagagaaagtgtcagattctttatctttctaaagatgttttggaaaaattgcaagctagtttgcaatttgcactcaagaaagtttcacaagactctttaatggattcatgtacttgtttcttgatacaactttatatatacagttgaatctcaaacttttttgctgattcaatttggtctatgtcttgtgaaatgtgaaaggtcgtttggcc

SEQ ID NO: 24970 - protein, 255 aa, Arabidopsis thaliana
  peptide (1)..(255): Ceres Seq. ID no. 13490959
  misc_feature (5)..(221): Pfam Name: SNO glutamine amidotransferase family Pfam Description: SNO glutamine amidotransferase family
  misc_feature (153)..(221): Homolog of NCBI NO: 13937025 NR Description: pyridoxine [Aspergillus nidulans]
  misc_feature (1)..(152): Homolog of NCBI NO: 13937025 NR Description: pyridoxine [Aspergillus nidulans]
  misc_feature (142)..(217): Homolog of NCBI NO: 9954418 NR Description: pyridoxine synthesis protein PDX2 [Cercospora
  misc_feature (1)..(150): Homolog of NCBI NO: 9954418 NR Description: pyridoxine synthesis protein PDX2 [Cercospora
  misc_feature (188)..(221): Homolog of NCBI NO: 23038400 NR Description: hypothetical protein [Oenococcus oeni MCW]
  misc_feature (3)..(160): Homolog of NCBI NO: 23038400 NR Description: hypothetical protein [Oenococcus oeni MCW]
  misc_feature (188)..(220): Homolog of NCBI NO: 23017678 NR Description: hypothetical protein [Thermobifida fusca]
  misc_feature (2)..(157): Homolog of NCBI NO: 23017678 NR Description: hypothetical protein [Thermobifida fusca]
  misc_feature (1)..(255): Homolog of NCBI NO: 9757756 NR Description: amidotransferase hisH-like protein [Arabidopsis
  misc_feature (1)..(255): Homolog of NCBI NO: 18424366 NR Description: imidazoleglycerol-phosphate synthase subunit H -
MTVGVLALQGSFNEHIAALRRLGVQGVEIRKADQLLTVSSLIIPGGESTTMAKLAEYHNLFPALREFVKMGKPVWGTCAGLIFLADRAVGQKEGGQELVGGLDCTVHRNFFGSQIQSFEADILVPQLTSQEGGPETYRGVFIRAPAVLDVGPDVEVLADYPVPSNKVLYSSSTVQIQEEDALPETKVIVAVKQGNLLATAFHPELTADTRWHSYFIKMTKEIEQGASSSSSKTIVSVGETSAGPEPAKPDLPIFQ

SEQ ID NO: 24971 - protein, 205 aa, Arabidopsis thaliana
  peptide (1)..(205): Ceres Seq. ID no. 13490960
  misc_feature (1)..(171): Pfam Name: SNO glutamine amidotransferase family Pfam Description: SNO glutamine amidotransferase family
  misc_feature (103)..(171): Homolog of NCBI NO: 13937025 NR Description: pyridoxine [Aspergillus nidulans]
  misc_feature (1)..(102): Homolog of NCBI NO: 13937025 NR Description: pyridoxine [Aspergillus nidulans]
  misc_feature (92)..(167): Homolog of NCBI NO: 9954418 NR Description: pyridoxine synthesis protein PDX2 [Cercospora
  misc_feature (1)..(100): Homolog of NCBI NO: 9954418 NR Description: pyridoxine synthesis protein PDX2 [Cercospora
  misc_feature (138)..(171): Homolog of NCBI NO: 23038400 NR Description: hypothetical protein [Oenococcus oeni MCW]
  misc_feature (1)..(110): Homolog of NCBI NO: 23038400 NR Description: hypothetical protein [Oenococcus oeni MCW]
  misc_feature (138)..(170): Homolog of NCBI NO: 23017678 NR Description: hypothetical protein [Thermobifida fusca]
  misc_feature (1)..(107): Homolog of NCBI NO: 23017678 NR Description: hypothetical protein [Thermobifida fusca]
  misc_feature (1)..(205): Homolog of NCBI NO: 9757756 NR Description: amidotransferase hisH-like protein [Arabidopsis
  misc_feature (1)..(205): Homolog of NCBI NO: 18424366 NR Description: imidazoleglycerol-phosphate synthase subunit H -
MAKLAEYHNLFPALREFVKMGKPVWGTCAGLIFLADRAVGQKEGGQELVGGLDCTVHRNFFGSQIQSFEADILVPQLTSQEGGPETYRGVFIRAPAVLDVGPDVEVLADYPVPSNKVLYSSSTVQIQEEDALPETKVIVAVKQGNLLATAFHPELTADTRWHSYFIKMTKEIEQGASSSSSKTIVSVGETSAGPEPAKPDLPIFQ

SEQ ID NO: 24972 - protein, 186 aa, Arabidopsis thaliana
  peptide (1)..(186): Ceres Seq. ID no. 13490961
  misc_feature (1)..(152): Pfam Name: SNO glutamine amidotransferase family Pfam Description: SNO glutamine amidotransferase family
  misc_feature (84)..(152): Homolog of NCBI NO: 13937025 NR Description: pyridoxine [Aspergillus nidulans]
  misc_feature (1)..(83): Homolog of NCBI NO: 13937025 NR Description: pyridoxine [Aspergillus nidulans]
  misc_feature (73)..(148): Homolog of NCBI NO: 9954418 NR Description: pyridoxine synthesis protein PDX2 [Cercospora
  misc_feature (1)..(81): Homolog of NCBI NO: 9954418 NR Description: pyridoxine synthesis protein PDX2 [Cercospora
  misc_feature (119)..(152): Homolog of NCBI NO: 23038400 NR Description: hypothetical protein [Oenococcus oeni MCW]
  misc_feature (1)..(91): Homolog of NCBI NO: 23038400 NR Description: hypothetical protein [Oenococcus oeni MCW]
  misc_feature (119)..(151): Homolog of NCBI NO: 23017678 NR Description: hypothetical protein [Thermobifida fusca]
  misc_feature (1)..(88): Homolog of NCBI NO: 23017678 NR Description: hypothetical protein [Thermobifida fusca]
  misc_feature (1)..(186): Homolog of NCBI NO: 9757756 NR Description: amidotransferase hisH-like protein [Arabidopsis
  misc_feature (1)..(186): Homolog of NCBI NO: 18424366 NR Description: imidazoleglycerol-phosphate synthase subunit H -
MGKPVWGTCAGLIFLADRAVGQKEGGQELVGGLDCTVHRNFFGSQIQSFEADILVPQLTSQEGGPETYRGVFIRAPAVLDVGPDVEVLADYPVPSNKVLYSSSTVQIQEEDALPETKVIVAVKQGNLLATAFHPELTADTRWHSYFIKMTKEIEQGASSSSSKTIVSVGETSAGPEPAKPDLPIFQ

SEQ ID NO: 24973 - DNA, 1379 bp, Arabidopsis thaliana
  misc_feature (1)..(1379): Ceres Seq. ID no. 13622108
  misc_feature: MA Experiment ID: 108668 Result: Down-regulated in Transcription
  misc_feature: MA Experiment 108668 PARAMETER Experiment Name: At_2mM_SA_cDNA_P Parameter: Plant Line Value: WS
  misc_feature: MA Experiment 108668 PARAMETER Experiment Name: At_2mM_SA_cDNA_P Parameter: Timepoint (hr) Value: 6
  misc_feature: MA Experiment 108668 PARAMETER Experiment Name: At_2mM_SA_cDNA_P Parameter: Treatment Value: 2mM SA vs. No Treatment
  misc_feature: MA Experiment ID: 20000224 Result: Down-regulated in Transcription
  misc_feature: MA Experiment ID: 20000286 Result: Down-regulated in Transcription
  misc_feature: MA Experiment 20000286 PARAMETER Experiment Name: At_Open_Flower_P Parameter: Age (day) Value: 21
  misc_feature: MA Experiment 20000286 PARAMETER Experiment Name: At_Open_Flower_P Parameter: Plant Line Value: WS
  misc_feature: MA Experiment 20000286 PARAMETER Experiment Name: At_Open_Flower_P Parameter: Tissue Value: Half Open vs. Whole Plant
  misc_feature: MA Experiment ID: 20000439 Result: Down-regulated in Transcription
  misc_feature: MA Experiment 20000439 PARAMETER Experiment Name: At_Roots__P Parameter: Age (day) Value: 14 vs. 21
  misc_feature: MA Experiment 20000439 PARAMETER Experiment Name: At_Roots__P Parameter: Organism Value: A. thaliana
  misc_feature: MA Experiment 20000439 PARAMETER Experiment Name: At_Roots__P Parameter: Tissue Value: Roots vs. Whole Plant
  misc_feature: MA Experiment ID: 20000451 Result: Down-regulated in Transcription
  misc_feature: MA Experiment 20000451 PARAMETER Experiment Name: At_CS6879_Shoots-Roots_P Parameter: Age (day) Value: 14
  misc_feature: MA Experiment 20000451 PARAMETER Experiment Name: At_CS6879_Shoots-Roots_P Parameter: Organism Value: A. thaliana
  misc_feature: MA Experiment 20000451 PARAMETER Experiment Name: At_CS6879_Shoots-Roots_P Parameter: Plant Line Value: CS6879 vs. WS
  misc_feature: MA Experiment 20000451 PARAMETER Experiment Name: At_CS6879_Shoots-Roots_P Parameter: Tissue Value: Roots
acttatcctgatcactagtgatcagtgataatctattaatcatctaggtggcagaagcagcatcgttgagaacgaagaagcttgaaaaagttgcgagctcagagaatctggaagtagcaaaatttggcggctttaactcagcaatttgttctgtacatggtattttgagaagagagcattcagctcacagttacgctctgcctatccagcttctaaatctactcactttggtcgagtcatggcttcttctggatctgaggcaaaagctaattacgcacccatatctaccaatgaacctgttgtgtctgttgattggctccactctaatcttggagatgctgatataaaggttttggatgcctcatggtacatggcacatgagcaaagaaatccaatccaagagtatcaagttgctcatattccaggtgctctcttctttgatttgaatggaatagcagatcgaaaaacaaatttacgacacatgctaccatctgaggaagcttttgctgctggttgttctgctcttggaatcgagaacaacgatggagtggttgtgtatgatggaatggggctctttagtgcagctcgtgtatggtggatgtttagagtctttggacatgacaaagtatgggtacttgatggaggcttgccgaaatggcgtgcttcaggctatgacgttgaatccagtgtttcaaatgatgccattttgaaagccagtgcagcaactgaggctatagagaagatctatcaaggacaaacaattagcccaataacttttcagacgaagttccggccacatcttgtattggcacttgatcaggtgaaggaaaacatcgaggataagacttatcagcacatcgatgcgcgttcaaaggctagatttgacggtattgctccagaaccttggaagggtttaccgagtggtcatatacccggtagcaagtgtgtcccttttcccctaatgtttgattcctctcaaacactgttaccagcagaggagctgaagaagcagtttgaacaggaagacatatctctggacagtccgattgcggcctcatgtggaaccggtgtaacagcttgtattttggcattgggactttatcgtctgggaaaaactaatgtggcaatctatgatgggtcttggactgaatgggcaactgcaccaaacttgcccatagtgggttcttcttcataagaaagtccaagaaaaagctacaagatcacaagccagtggatatatatttataagcttagcttggttcaatccatttctgtgttaaactttaacaaattgctgggagggttgtattagtattatacatcagtattcaggattcttgagtttggtctcatctttgtggagattgattaaaagtctt

SEQ ID NO: 24974 - protein, 318 aa, Arabidopsis thaliana
  peptide (1)..(318): Ceres Seq. ID no. 13622109
  misc_feature (23)..(143): Pfam Name: Rhodanese-like domain Pfam Description: Rhodanese-like domain
  misc_feature (177)..(313): Homolog of NCBI NO: 27381801 NR Description: thiosulfate sulfurtransferase [Bradyrhizobium
  misc_feature (17)..(171): Homolog of NCBI NO: 27381801 NR Description: thiosulfate sulfurtransferase [Bradyrhizobium
  misc_feature (15)..(317): Homolog of NCBI NO: 14571545 NR Description: thiosulfate transferase [Triticum aestivum]
  misc_feature (1)..(313): Homolog of NCBI NO: 4406372 NR Description: thiosulfate sulfurtransferase [Datisca glomerata]
  misc_feature (1)..(318): Homolog of NCBI NO: 25288794 NR Description: thiosulfate sulfurtransferase (EC 2.8.1.1) Mst1
  misc_feature (1)..(318): Homolog of NCBI NO: 18412307 NR Description: mercaptopyruvate sulfurtransferase (Mst1/Rdh1)
  misc_feature (1)..(318): Homolog of NCBI NO: 25288797 NR Description: hypothetical protein F3O9.26 [imported] -
  misc_feature (1)..(318): Homolog of NCBI NO: 18394364 NR Description: mercaptopyruvate sulfurtransferase (Mst2/Rdh2)
  misc_feature (1)..(318): Homolog of NCBI NO: 30684873 NR Description: mercaptopyruvate sulfurtransferase (Mst2/Rdh2)
  misc_feature (1)..(318): Homolog of NCBI NO: 25456716 NR Description: thiosulfate sulfurtransferase (EC 2.8.1.1)
MASSGSEAKANYAPISTNEPVVSVDWLHSNLGDADIKVLDASWYMAHEQRNPIQEYQVAHIPGALFFDLNGIADRKTNLRHMLPSEEAFAAGCSALGIENNDGVVVYDGMGLFSAARVWWMFRVFGHDKVWVLDGGLPKWRASGYDVESSVSNDAILKASAATEAIEKIYQGQTISPITFQTKFRPHLVLALDQVKENIEDKTYQHIDARSKARFDGIAPEPWKGLPSGHIPGSKCVPFPLMFDSSQTLLPAEELKKQFEQEDISLDSPIAASCGTGVTACILALGLYRLGKTNVAIYDGSWTEWATAPNLPIVGSSS

SEQ ID NO: 24975 - protein, 274 aa, Arabidopsis thaliana
  peptide (1)..(274): Ceres Seq. ID no. 13622110
  misc_feature (1)..(99): Pfam Name: Rhodanese-like domain Pfam Description: Rhodanese-like domain
  misc_feature (1)..(127): Homolog of NCBI NO: 27381801 NR Description: thiosulfate sulfurtransferase [Bradyrhizobium
  misc_feature (1)..(273): Homolog of NCBI NO: 14571545 NR Description: thiosulfate transferase [Triticum aestivum]
  misc_feature (1)..(269): Homolog of NCBI NO: 4406372 NR Description: thiosulfate sulfurtransferase [Datisca glomerata]
  misc_feature (1)..(274): Homolog of NCBI NO: 25288794 NR Description: thiosulfate sulfurtransferase (EC 2.8.1.1) Mst1
  misc_feature (1)..(274): Homolog of NCBI NO: 18412307 NR Description: mercaptopyruvate sulfurtransferase (Mst1/Rdh1)
  misc_feature (133)..(269): Homolog of NCBI NO: 27381801 NR Description: thiosulfate sulfurtransferase [Bradyrhizobium
  misc_feature (1)..(274): Homolog of NCBI NO: 25288797 NR Description: hypothetical protein F3O9.26 [imported] -
  misc_feature (1)..(274): Homolog of NCBI NO: 18394364 NR Description: mercaptopyruvate sulfurtransferase (Mst2/Rdh2)
  misc_feature (1)..(274): Homolog of NCBI NO: 30684873 NR Description: mercaptopyruvate sulfurtransferase (Mst2/Rdh2)
  misc_feature (1)..(274): Homolog of NCBI NO: 25456716 NR Description: thiosulfate sulfurtransferase (EC 2.8.1.1)
MAHEQRNPIQEYQVAHIPGALFFDLNGIADRKTNLRHMLPSEEAFAAGCSALGIENNDGVVVYDGMGLFSAARVWWMFRVFGHDKVWVLDGGLPKWRASGYDVESSVSNDAILKASAATEAIEKIYQGQTISPITFQTKFRPHLVLALDQVKENIEDKTYQHIDARSKARFDGIAPEPWKGLPSGHIPGSKCVPFPLMFDSSQTLLPAEELKKQFEQEDISLDSPIAASCGTGVTACILALGLYRLGKTNVAIYDGSWTEWATAPNLPIVGSSS

SEQ ID NO: 24976 - protein, 237 aa, Arabidopsis thaliana
  peptide (1)..(237): Ceres Seq. ID no. 13622111
  misc_feature (1)..(62): Pfam Name: Rhodanese-like domain Pfam Description: Rhodanese-like domain
  misc_feature (96)..(232): Homolog of NCBI NO: 27381801 NR Description: thiosulfate sulfurtransferase [Bradyrhizobium
  misc_feature (1)..(90): Homolog of NCBI NO: 27381801 NR Description: thiosulfate sulfurtransferase [Bradyrhizobium
  misc_feature (1)..(236): Homolog of NCBI NO: 14571545 NR Description: thiosulfate transferase [Triticum aestivum]
  misc_feature (1)..(232): Homolog of NCBI NO: 4406372 NR Description: thiosulfate sulfurtransferase [Datisca glomerata]
  misc_feature (1)..(237): Homolog of NCBI NO: 25288794 NR Description: thiosulfate sulfurtransferase (EC 2.8.1.1) Mst1
  misc_feature (1)..(237): Homolog of NCBI NO: 18412307 NR Description: mercaptopyruvate sulfurtransferase (Mst1/Rdh1)
  misc_feature (1)..(237): Homolog of NCBI NO: 25288797 NR Description: hypothetical protein F3O9.26 [imported] -
  misc_feature (1)..(237): Homolog of NCBI NO: 18394364 NR Description: mercaptopyruvate sulfurtransferase (Mst2/Rdh2)
  misc_feature (1)..(237): Homolog of NCBI NO: 30684873 NR Description: mercaptopyruvate sulfurtransferase (Mst2/Rdh2)
  misc_feature (1)..(237): Homolog of NCBI NO: 25456716 NR Description: thiosulfate sulfurtransferase (EC 2.8.1.1)
MLPSEEAFAAGCSALGIENNDGVVVYDGMGLFSAARVWWMFRVFGHDKVWVLDGGLPKWRASGYDVESSVSNDAILKASAATEAIEKIYQGQTISPITFQTKFRPHLVLALDQVKENIEDKTYQHIDARSKARFDGIAPEPWKGLPSGHIPGSKCVPFPLMFDSSQTLLPAEELKKQFEQEDISLDSPIAASCGTGVTACILALGLYRLGKTNVAIYDGSWTEWATAPNLPIVGSSS

SEQ ID NO: 24977 - DNA, 1081 bp, Arabidopsis thaliana
  misc_feature (1)..(1081): Ceres Seq. ID no. 12321161
  misc_feature: MA Experiment ID: 108434 Result: Up-regulated in Transcription
  misc_feature: MA Experiment 108434 PARAMETER Experiment Name: At_Root_Tips_cDNA_P Parameter: Tissue Value: Root Tips
  misc_feature: MA Experiment ID: 108461 Result: Up-regulated in Transcription
  misc_feature: MA Experiment 108461 PARAMETER Experiment Name: At_Germinating_Seeds_cDNA_P Parameter: Age (day) Value: 1 vs. 0
  misc_feature: MA Experiment 108461 PARAMETER Experiment Name: At_Germinating_Seeds_cDNA_P Parameter: Tissue Value: Germinating Seeds
ataaatgacccaattgggtcactcgaggaataaactgcaatttacgaataacaaactctcactaatacagtatttgcaattccagagcgacgggatctctctccggtaaatatcggaaacttttattctcagcaaagcgagatctcgacgtttctcagatccgtccggcgagttagatccttgagaaatcatggctccggtctcggcactcgctaagtataagctggtgtttctgggagatcaatccgtcggcaaaaccagtatcattactcgattcatgtacgacaaattcgacaacacttaccaggccacaattggtattgattttctatcaaagacaatgtaccttgaagatcgaacggtcagacttcagttgtgggatacagctgggcaagagcgattcaggagtctaattccgagctatatcagggattcctccgttgctgttattgtgtatgatgttgcaagcaggcagtccttcctaaacactactaagtggatcgatgaggttaggacagaacgtggtagtgatgtcatagtcgtgcttgtgggaaacaaaactgatctagtggacaaaaggcaagtgtcaatagaggaagcagaagctaaggcacgcgaacttaatgtaatgttcatcgaaaccagtgccaaagcgggcttcaacattaaggcgctcttccgcaagatagcagcagctttgccgggaatggagacattgtcttcaacaaagcaagaggatatggttgatgtcaatctcaagtcttccaatgcaaatgcatctctcgctcagcagcaatcaggaggatgctcttgttagatttggcaacaacaacacaacaacaaatcgatagagaacaacaaaacacactactaaaaaatgtcctcaagcccctttgcatgattcgatcagttatcgtcttccatctgtaaaatttttgcctgtttttcaactttttttcttcatcggattgtttttaaagaagactctgttttagctatggtttgtccctaactgtgatcttttgtggtctttggagtttcaaatgctcgctgcttcagtacttttgtttacttatttctc

SEQ ID NO: 24978 - protein, 208 aa, Arabidopsis thaliana
  peptide (1)..(208): Ceres Seq. ID no. 12321162
  misc_feature (11)..(172): Pfam Name: Ras family Pfam Description: Ras family
  misc_feature (7)..(208): Homolog of NCBI NO: 19923231 NR Description: RAB6A, member RAS oncogene family
  misc_feature (7)..(208): Homolog of NCBI NO: 17512290 NR Description: Similar to RAB6C, member RAS oncogene family [Mus
  misc_feature (7)..(208): Homolog of NCBI NO: 38679888 NR Description: RAB6A, member RAS oncogene family isoform b
  misc_feature (7)..(208): Homolog of NCBI NO: 13195674 NR Description: RAB6, member RAS oncogene family [Mus musculus]
  misc_feature (1)..(208): Homolog of NCBI NO: 15236081 NR Description: GTP-binding protein, putative
  misc_feature (1)..(208): Homolog of NCBI NO: 15227173 NR Description: GTP-binding protein, putative; protein id:
  misc_feature (1)..(208): Homolog of NCBI NO: 15238112 NR Description: Ras family GTP-binding protein, putative; protein
  misc_feature (1)..(208): Homolog of NCBI NO: 34901804 NR Description: putative ras-related protein Rab-6A
  misc_feature (1)..(208): Homolog of NCBI NO: 7438385 NR Description: GTP-binding protein Rab6 - common tobacco
  misc_feature (1)..(208): Homolog of NCBI NO: 15224916 NR Description: GTP-binding protein, putative
MAPVSALAKYKLVFLGDQSVGKTSIITRFMYDKFDNTYQATIGIDFLSKTMYLEDRTVRLQLWDTAGQERFRSLIPSYIRDSSVAVIVYDVASRQSFLNTTKWIDEVRTERGSDVIVVLVGNKTDLVDKRQVSIEEAEAKARELNVMFIETSAKAGFNIKALFRKIAAALPGMETLSSTKQEDMVDVNLKSSNANASLAQQQSGGCSC

SEQ ID NO: 24979 - protein, 179 aa, Arabidopsis thaliana
  peptide (1)..(179): Ceres Seq. ID no. 12321163
  misc_feature (1)..(143): Pfam Name: Ras family Pfam Description: Ras family
  misc_feature (1)..(179): Homolog of NCBI NO: 19923231 NR Description: RAB6A, member RAS oncogene family
  misc_feature (1)..(179): Homolog of NCBI NO: 17512290 NR Description: Similar to RAB6C, member RAS oncogene family [Mus
  misc_feature (1)..(179): Homolog of NCBI NO: 38679888 NR Description: RAB6A, member RAS oncogene family isoform b
  misc_feature (1)..(179): Homolog of NCBI NO: 13195674 NR Description: RAB6, member RAS oncogene family [Mus musculus]
  misc_feature (1)..(179): Homolog of NCBI NO: 15236081 NR Description: GTP-binding protein, putative
  misc_feature (1)..(179): Homolog of NCBI NO: 15227173 NR Description: GTP-binding protein, putative; protein id:
  misc_feature (1)..(179): Homolog of NCBI NO: 15238112 NR Description: Ras family GTP-binding protein, putative; protein
  misc_feature (1)..(179): Homolog of NCBI NO: 34901804 NR Description: putative ras-related protein Rab-6A
  misc_feature (1)..(179): Homolog of NCBI NO: 7438385 NR Description: GTP-binding protein Rab6 - common tobacco
  misc_feature (1)..(179): Homolog of NCBI NO: 15224916 NR Description: GTP-binding protein, putative
MYDKFDNTYQATIGIDFLSKTMYLEDRTVRLQLWDTAGQERFRSLIPSYIRDSSVAVIVYDVASRQSFLNTTKWIDEVRTERGSDVIVVLVGNKTDLVDKRQVSIEEAEAKARELNVMFIETSAKAGFNIKALFRKIAAALPGMETLSSTKQEDMVDVNLKSSNANASLAQQQSGGCSC

SEQ ID NO: 24980 - protein, 158 aa, Arabidopsis thaliana
  peptide (1)..(158): Ceres Seq. ID no. 12321164
  misc_feature (1)..(122): Pfam Name: Ras family Pfam Description: Ras family
  misc_feature (1)..(158): Homolog of NCBI NO: 19923231 NR Description: RAB6A, member RAS oncogene family
  misc_feature (1)..(158): Homolog of NCBI NO: 17512290 NR Description: Similar to RAB6C, member RAS oncogene family [Mus
  misc_feature (1)..(158): Homolog of NCBI NO: 38679888 NR Description: RAB6A, member RAS oncogene family isoform b
  misc_feature (1)..(158): Homolog of NCBI NO: 13195674 NR Description: RAB6, member RAS oncogene family [Mus musculus]
  misc_feature (1)..(158): Homolog of NCBI NO: 15236081 NR Description: GTP-binding protein, putative
  misc_feature (1)..(158): Homolog of NCBI NO: 15227173 NR Description: GTP-binding protein, putative; protein id:
  misc_feature (1)..(158): Homolog of NCBI NO: 15238112 NR Description: Ras family GTP-binding protein, putative; protein
  misc_feature (1)..(158): Homolog of NCBI NO: 34901804 NR Description: putative ras-related protein Rab-6A
  misc_feature (1)..(158): Homolog of NCBI NO: 7438385 NR Description: GTP-binding protein Rab6 - common tobacco
  misc_feature (1)..(158): Homolog of NCBI NO: 15224916 NR Description: GTP-binding protein, putative
MYLEDRTVRLQLWDTAGQERFRSLIPSYIRDSSVAVIVYDVASRQSFLNTTKWIDEVRTERGSDVIVVLVGNKTDLVDKRQVSIEEAEAKARELNVMFIETSAKAGFNIKALFRKIAAALPGMETLSSTKQEDMVDVNLKSSNANASLAQQQSGGCSC

SEQ ID NO: 24981 - DNA, 1749 bp, Arabidopsis thaliana
  misc_feature (1)..(1749): Ceres Seq. ID no. 12326633
  misc_feature: MA Experiment ID: 108434 Result: Up-regulated in Transcription
  misc_feature: MA Experiment 108434 PARAMETER Experiment Name: At_Root_Tips_cDNA_P Parameter: Tissue Value: Root Tips
  misc_feature: MA Experiment ID: 108462 Result: Down-regulated in Transcription
  misc_feature: MA Experiment 108462 PARAMETER Experiment Name: At_Germinating_Seeds_cDNA_P Parameter: Age (day) Value: 2 vs. 0
  misc_feature: MA Experiment 108462 PARAMETER Experiment Name: At_Germinating_Seeds_cDNA_P Parameter: Tissue Value: Germinating Seeds
  misc_feature: MA Experiment ID: 108463 Result: Down-regulated in Transcription
  misc_feature: MA Experiment 108463 PARAMETER Experiment Name: At_Germinating_Seeds_cDNA_P Parameter: Age (day) Value: 3 vs. 0
  misc_feature: MA Experiment 108463 PARAMETER Experiment Name: At_Germinating_Seeds_cDNA_P Parameter: Tissue Value: Germinating Seeds
  misc_feature: MA Experiment ID: 108464 Result: Down-regulated in Transcription
  misc_feature: MA Experiment 108464 PARAMETER Experiment Name: At_Germinating_Seeds_cDNA_P Parameter: Age (day) Value: 4 vs. 0
  misc_feature: MA Experiment 108464 PARAMETER Experiment Name: At_Germinating_Seeds_cDNA_P Parameter: Tissue Value: Germinating Seeds
  misc_feature: MA Experiment ID: 108573 Result: Up-regulated in Transcription
  misc_feature: MA Experiment 108573 PARAMETER Experiment Name: At_Drought_cDNA_P Parameter: Timepoint (hr) Value: 6
  misc_feature: MA Experiment 108573 PARAMETER Experiment Name: At_Drought_cDNA_P Parameter: Tissue Value: Aerial
  misc_feature: MA Experiment 108573 PARAMETER Experiment Name: At_Drought_cDNA_P Parameter: Treatment Value: Drought vs. No Drought
  misc_feature: MA Experiment ID: 20000087 Result: Down-regulated in Transcription
  misc_feature: MA Experiment 20000087 PARAMETER Experiment Name: At_100uM_ABA_Mutants_cDNA_P Parameter: Plant Line Value: WS
  misc_feature: MA Experiment 20000087 PARAMETER Experiment Name: At_100uM_ABA_Mutants_cDNA_P Parameter: Timepoint (hr) Value: 6
  misc_feature: MA Experiment 20000087 PARAMETER Experiment Name: At_100uM_ABA_Mutants_cDNA_P Parameter: Tissue Value: Aerial
  misc_feature: MA Experiment 20000087 PARAMETER Experiment Name: At_100uM_ABA_Mutants_cDNA_P Parameter: Treatment Value: 100uM ABA vs. No Treatment
  misc_feature: MA Experiment ID: 20000224 Result: Down-regulated in Transcription
  misc_feature: MA Experiment ID: 20000794 Result: Down-regulated in Transcription
  misc_feature: MA Experiment 20000794 PARAMETER Experiment Name: At_Petals_P Parameter: Age (day) Value: 23-25 days
  misc_feature: MA Experiment 20000794 PARAMETER Experiment Name: At_Petals_P Parameter: Plant Line Value: WS
  misc_feature: MA Experiment 20000794 PARAMETER Experiment Name: At_Petals_P Parameter: Tissue Value: Petals vs. Whole plant
  misc_feature: MA Experiment ID: 20001557 Result: Up-regulated in Transcription
  misc_feature: MA Experiment 20001557 PARAMETER Experiment Name: At_Drought_Soil_Dry_P Parameter: Age (day) Value: 27
  misc_feature: MA Experiment 20001557 PARAMETER Experiment Name: At_Drought_Soil_Dry_P Parameter: Organism Value: A. thaliana
  misc_feature: MA Experiment 20001557 PARAMETER Experiment Name: At_Drought_Soil_Dry_P Parameter: Plant Line Value: WS
  misc_feature: MA Experiment 20001557 PARAMETER Experiment Name: At_Drought_Soil_Dry_P Parameter: Post Timepoint (hr) Value: 3
  misc_feature: MA Experiment 20001557 PARAMETER Experiment Name: At_Drought_Soil_Dry_P Parameter: Post-Treatment Value: Re-Water vs. No Drought
  misc_feature: MA Experiment 20001557 PARAMETER Experiment Name: At_Drought_Soil_Dry_P Parameter: Timepoint (day) Value: 13
  misc_feature: MA Experiment 20001557 PARAMETER Experiment Name: At_Drought_Soil_Dry_P Parameter: Treatment Value: Drought vs. No Drought
  misc_feature: MA Experiment ID: 20001558 Result: Up-regulated in Transcription
  misc_feature: MA Experiment 20001558 PARAMETER Experiment Name: At_Drought_Soil_Dry_P Parameter: Age (day) Value: 27
  misc_feature: MA Experiment 20001558 PARAMETER Experiment Name: At_Drought_Soil_Dry_P Parameter: Organism Value: A. thaliana
  misc_feature: MA Experiment 20001558 PARAMETER Experiment Name: At_Drought_Soil_Dry_P Parameter: Plant Line Value: WS
  misc_feature: MA Experiment 20001558 PARAMETER Experiment Name: At_Drought_Soil_Dry_P Parameter: Post Timepoint (hr) Value: 6
  misc_feature: MA Experiment 20001558 PARAMETER Experiment Name: At_Drought_Soil_Dry_P Parameter: Post-Treatment Value: Re-Water vs. No Drought
  misc_feature: MA Experiment 20001558 PARAMETER Experiment Name: At_Drought_Soil_Dry_P Parameter: Timepoint (day) Value: 13
  misc_feature: MA Experiment 20001558 PARAMETER Experiment Name: At_Drought_Soil_Dry_P Parameter: Treatment Value: Drought vs. No Drought
aaacactcctttatagcttttctccgcctcaactttttgcttcttctctctcgatttgctctcacggaagattcttcagaatatctgatccgatatcagaagccccaagttcgcttgaattccgtctgagcaatggctttggtcttgcacacgtacaagggaaacaaaagtgctgagaaggcactcattgcagcagagtacgttgtgtgcagatcgatgtgccctctgactttcagatgggtgtcactaacaaaacccctgcgttcctcaagatgaaccctattggaaaggttcctgtacttgagactcccgagggttcagtatttgaaagcaacgcaattgcccgttatgtaagccgattgaatggtgacaactctttgaacggatcctccctgatcgaatatgcacaaattgagcaatggattgatttctcttcattggagatctatgcaagtatcttgaggtggttcggcccaagaatgggctttatgccatacagtgctccggctgaagaaggtgcgatctctacgttgaagagagcacttgatgctctgaacacacatctcacgtctaacacttaccttgtcggacactctattacccttgctgatatcatcactgtctgcaacttgaacttgggatttgctactgtcatgaccaagaaatttacctctgaatttcctcatgttgagaggtacttctggactgtggttaaccaaccaaacttcactaaagtgttgggtgatgtcaaacagactgaagctgtccctcctattgcttccaagaaagctgcccagcctgcaaagcccaaagaagagcctaagaaaaaggaagccccagtagcagaggcacctaagcttgctgaagaggaagaggcaccaaagcccaaagccaagaaccctcttgacttgctaccaccaagccctatggttctagatgattggaagaggctttactcaaacaccaaatctaacttccgcgaggttgctattaaaggattctgggacatgtatgacccagagggatactcactatggttctgtgactacaagtacaacgatgagaacatggtgtcatttgtcacgctcaacaaggttggtgggttccttcagcgtatggacttggcacgtaaatactcctttggaaagatgctgatttgtgggtcagagggtccgttcaaggtgaagggtttatggctgttccgtggaccagagatcccaaagttcataatggacgaggtgtacgacatggagctgtatgagtggactaaggttgatatctcagatgaagcccagaaggagcgtgttagccagatgattgaagacgcagagccatttgaaggtgaggctctcttggacgccaagtgcttcaagtgagaagagagaatggtttggtacttccatttacaggttttgcagctggggctttacatatctttctatctgtctgtctcacataggggttttgctctgtgacgtgtcgcatagactgttttttttcttttctaatcgagtgtcaaggacaagtctttttagttctttgttaatgtttcgcctccgtccagaattgtttactataccagttttcgaaatcctgaccggccagtctaccctggcaataggcaatacatggtctggtttatttgttttacggtaattttgccttgattgattttctttgacgcgtttcggtcaacttatatacattggtctttgagttgaacatttagtggtaaagtctttttggcac

SEQ ID NO: 24982 - protein, 379 aa, Arabidopsis thaliana
  peptide (1)..(379): Ceres Seq. ID no. 12326634
  misc_feature (218)..(326): Pfam Name: Elongation factor 1 gamma, conserved domain Pfam Description: Elongation factor 1 gamma, conserved domain
  misc_feature (218)..(326): Pfam Name: Elongation factor 1 gamma, conserved domain Pfam Description: Elongation factor 1 gamma, conserved domain
  misc_feature (1)..(379): Homolog of NCBI NO: 13626392 NR Description: Elongation factor 1-gamma (EF-1-gamma) (eEF-1B
  misc_feature (1)..(379): Homolog of NCBI NO: 29367403 NR Description: elongation factor 1 gamma-like protein
  misc_feature (1)..(379): Homolog of NCBI NO: 13626515 NR Description: Elongation factor 1-gamma (EF-1-gamma) (eEF-1B
  misc_feature (35)..(379): Homolog of NCBI NO: 19423960 NR Description: unknown protein [Arabidopsis thaliana]
  misc_feature (1)..(379): Homolog of NCBI NO: 29367403 NR Description: elongation factor 1 gamma-like protein
  misc_feature (35)..(379): Homolog of NCBI NO: 19423960 NR Description: unknown protein [Arabidopsis thaliana]
  misc_feature (1)..(379): Homolog of NCBI NO: 15223649 NR Description: elongation factor 1B-gamma, putative (eEF-1B
  misc_feature (1)..(379): Homolog of NCBI NO: 18391048 NR Description: elongation factor 1B-gamma, putative (eEF-1B
  misc_feature (1)..(379): Homolog of NCBI NO: 14334818 NR Description: putative elongation factor 1B gamma [Arabidopsis
  misc_feature (1)..(379): Homolog of NCBI NO: 13626515 NR Description: Elongation factor 1-gamma (EF-1-gamma) (eEF-1B
  misc_feature (1)..(379): Homolog of NCBI NO: 13626392 NR Description: Elongation factor 1-gamma (EF-1-gamma) (eEF-1B
  misc_feature (1)..(379): Homolog of NCBI NO: 14334818 NR Description: putative elongation factor 1B gamma [Arabidopsis
  misc_feature (1)..(379): Homolog of NCBI NO: 15223649 NR Description: elongation factor 1B-gamma, putative (eEF-1B
  misc_feature (1)..(379): Homolog of NCBI NO: 18391048 NR Description: elongation factor 1B-gamma, putative (eEF-1B
MGVTNKTPAFLKMNPIGKVPVLETPEGSVFESNAIARYVSRLNGDNSLNGSSLIEYAQIEQWIDFSSLEIYASILRWFGPRMGFMPYSAPAEEGAISTLKRALDALNTHLTSNTYLVGHSITLADIITVCNLNLGFATVMTKKFTSEFPHVERYFWTVVNQPNFTKVLGDVKQTEAVPPIASKKAAQPAKPKEEPKKKEAPVAEAPKLAEEEEAPKPKAKNPLDLLPPSPMVLDDWKRLYSNTKSNFREVAIKGFWDMYDPEGYSLWFCDYKYNDENMVSFVTLNKVGGFLQRMDLARKYSFGKMLICGSEGPFKVKGLWLFRGPEIPKFIMDEVYDMELYEWTKVDISDEAQKERVSQMIEDAEPFEGEALLDAKCFK

SEQ ID NO: 24983 - protein, 367 aa, Arabidopsis thaliana
  peptide (1)..(367): Ceres Seq. ID no. 12326635
  misc_feature (206)..(314): Pfam Name: Elongation factor 1 gamma, conserved domain Pfam Description: Elongation factor 1 gamma, conserved domain
  misc_feature (206)..(314): Pfam Name: Elongation factor 1 gamma, conserved domain Pfam Description: Elongation factor 1 gamma, conserved domain
  misc_feature (1)..(367): Homolog of NCBI NO: 13626392 NR Description: Elongation factor 1-gamma (EF-1-gamma) (eEF-1B
  misc_feature (1)..(367): Homolog of NCBI NO: 29367403 NR Description: elongation factor 1 gamma-like protein
  misc_feature (1)..(367): Homolog of NCBI NO: 13626515 NR Description: Elongation factor 1-gamma (EF-1-gamma) (eEF-1B
  misc_feature (23)..(367): Homolog of NCBI NO: 19423960 NR Description: unknown protein [Arabidopsis thaliana]
  misc_feature (1)..(367): Homolog of NCBI NO: 29367403 NR Description: elongation factor 1 gamma-like protein
  misc_feature (23)..(367): Homolog of NCBI NO: 19423960 NR Description: unknown protein [Arabidopsis thaliana]
  misc_feature (1)..(367): Homolog of NCBI NO: 15223649 NR Description: elongation factor 1B-gamma, putative (eEF-1B
  misc_feature (1)..(367): Homolog of NCBI NO: 18391048 NR Description: elongation factor 1B-gamma, putative (eEF-1B
  misc_feature (1)..(367): Homolog of NCBI NO: 14334818 NR Description: putative elongation factor 1B gamma [Arabidopsis
  misc_feature (1)..(367): Homolog of NCBI NO: 13626515 NR Description: Elongation factor 1-gamma (EF-1-gamma) (eEF-1B
  misc_feature (1)..(367): Homolog of NCBI NO: 13626392 NR Description: Elongation factor 1-gamma (EF-1-gamma) (eEF-1B
  misc_feature (1)..(367): Homolog of NCBI NO: 14334818 NR Description: putative elongation factor 1B gamma [Arabidopsis
  misc_feature (1)..(367): Homolog of NCBI NO: 15223649 NR Description: elongation factor 1B-gamma, putative (eEF-1B
  misc_feature (1)..(367): Homolog of NCBI NO: 18391048 NR Description: elongation factor 1B-gamma, putative (eEF-1B
MNPIGKVPVLETPEGSVFESNAIARYVSRLNGDNSLNGSSLIEYAQIEQWIDFSSLEIYASILRWFGPRMGFMPYSAPAEEGAISTLKRALDALNTHLTSNTYLVGHSITLADIITVCNLNLGFATVMTKKFTSEFPHVERYFWTVVNQPNFTKVLGDVKQTEAVPPIASKKAAQPAKPKEEPKKKEAPVAEAPKLAEEEEAPKPKAKNPLDLLPPSPMVLDDWKRLYSNTKSNFREVAIKGFWDMYDPEGYSLWFCDYKYNDENMVSFVTLNKVGGFLQRMDLARKYSFGKMLICGSEGPFKVKGLWLFRGPEIPKFIMDEVYDMELYEWTKVDISDEAQKERVSQMIEDAEPFEGEALLDAKCFK

SEQ ID NO: 24984 - protein, 298 aa, Arabidopsis thaliana
  peptide (1)..(298): Ceres Seq. ID no. 12326636
  misc_feature (137)..(245): Pfam Name: Elongation factor 1 gamma, conserved domain Pfam Description: Elongation factor 1 gamma, conserved domain
  misc_feature (137)..(245): Pfam Name: Elongation factor 1 gamma, conserved domain Pfam Description: Elongation factor 1 gamma, conserved domain
  misc_feature (1)..(298): Homolog of NCBI NO: 13626392 NR Description: Elongation factor 1-gamma (EF-1-gamma) (eEF-1B
  misc_feature (1)..(298): Homolog of NCBI NO: 29367403 NR Description: elongation factor 1 gamma-like protein
  misc_feature (1)..(298): Homolog of NCBI NO: 13626515 NR Description: Elongation factor 1-gamma (EF-1-gamma) (eEF-1B
  misc_feature (1)..(298): Homolog of NCBI NO: 19423960 NR Description: unknown protein [Arabidopsis thaliana]
  misc_feature (1)..(298): Homolog of NCBI NO: 29367403 NR Description: elongation factor 1 gamma-like protein
  misc_feature (1)..(298): Homolog of NCBI NO: 19423960 NR Description: unknown protein [Arabidopsis thaliana]
  misc_feature (1)..(298): Homolog of NCBI NO: 15223649 NR Description: elongation factor 1B-gamma, putative (eEF-1B
  misc_feature (1)..(298): Homolog of NCBI NO: 18391048 NR Description: elongation factor 1B-gamma, putative (eEF-1B
  misc_feature (1)..(298): Homolog of NCBI NO: 14334818 NR Description: putative elongation factor 1B gamma [Arabidopsis
  misc_feature (1)..(298): Homolog of NCBI NO: 13626515 NR Description: Elongation factor 1-gamma (EF-1-gamma) (eEF-1B
  misc_feature (1)..(298): Homolog of NCBI NO: 13626392 NR Description: Elongation factor 1-gamma (EF-1-gamma) (eEF-1B
  misc_feature (1)..(298): Homolog of NCBI NO: 14334818 NR Description: putative elongation factor 1B gamma [Arabidopsis
  misc_feature (1)..(298): Homolog of NCBI NO: 15223649 NR Description: elongation factor 1B-gamma, putative (eEF-1B
  misc_feature (1)..(298): Homolog of NCBI NO: 18391048 NR Description: elongation factor 1B-gamma, putative (eEF-1B
MGFMPYSAPAEEGAISTLKRALDALNTHLTSNTYLVGHSITLADIITVCNLNLGFATVMTKKFTSEFPHVERYFWTVVNQPNFTKVLGDVKQTEAVPPIASKKAAQPAKPKEEPKKKEAPVAEAPKLAEEEEAPKPKAKNPLDLLPPSPMVLDDWKRLYSNTKSNFREVAIKGFWDMYDPEGYSLWFCDYKYNDENMVSFVTLNKVGGFLQRMDLARKYSFGKMLICGSEGPFKVKGLWLFRGPEIPKFIMDEVYDMELYEWTKVDISDEAQKERVSQMIEDAEPFEGEALLDAKCFK

SEQ ID NO: 24985 - DNA, 1907 bp, Arabidopsis thaliana
  misc_feature (1)..(1907): Ceres Seq. ID no. 13491988
  misc_feature: MA Experiment ID: 108572 Result: Up-regulated in Transcription
  misc_feature: MA Experiment 108572 PARAMETER Experiment Name: At_Drought_cDNA_P Parameter: Timepoint (hr) Value: 1
  misc_feature: MA Experiment 108572 PARAMETER Experiment Name: At_Drought_cDNA_P Parameter: Tissue Value: Aerial
  misc_feature: MA Experiment 108572 PARAMETER Experiment Name: At_Drought_cDNA_P Parameter: Treatment Value: Drought vs. No Drought
  misc_feature: MA Experiment ID: 108573 Result: Up-regulated in Transcription
  misc_feature: MA Experiment 108573 PARAMETER Experiment Name: At_Drought_cDNA_P Parameter: Timepoint (hr) Value: 6
  misc_feature: MA Experiment 108573 PARAMETER Experiment Name: At_Drought_cDNA_P Parameter: Tissue Value: Aerial
  misc_feature: MA Experiment 108573 PARAMETER Experiment Name: At_Drought_cDNA_P Parameter: Treatment Value: Drought vs. No Drought
  misc_feature: MA Experiment ID: 108577 Result: Down-regulated in Transcription
  misc_feature: MA Experiment 108577 PARAMETER Experiment Name: At_42deg_Heat_cDNA_P Parameter: Temperature (deg C) Value: 42 vs. 22
  misc_feature: MA Experiment 108577 PARAMETER Experiment Name: At_42deg_Heat_cDNA_P Parameter: Timepoint (hr) Value: 6
  misc_feature: MA Experiment 108577 PARAMETER Experiment Name: At_42deg_Heat_cDNA_P Parameter: Tissue Value: Aerial
  misc_feature: MA Experiment ID: 20000179 Result: Up-regulated in Transcription
  misc_feature: MA Experiment 20000179 PARAMETER Experiment Name: At_Germinating_Seeds_P Parameter: Age (hr) Value: 6 vs. 0
  misc_feature: MA Experiment 20000179 PARAMETER Experiment Name: At_Germinating_Seeds_P Parameter: Tissue Value: Germinating Seeds
  misc_feature: MA Experiment ID: 20000180 Result: Up-regulated in Transcription
  misc_feature: MA Experiment 20000180 PARAMETER Experiment Name: At_Germinating_Seeds_P Parameter: Age (hr) Value: 24 vs. 0
  misc_feature: MA Experiment 20000180 PARAMETER Experiment Name: At_Germinating_Seeds_P Parameter: Tissue Value: Germinating Seeds
  misc_feature: MA Experiment ID: 20000185 Result: Down-regulated in Transcription
  misc_feature: MA Experiment 20000185 PARAMETER Experiment Name: At_Roots__P Parameter: Age (day) Value: 7 vs. 21
  misc_feature: MA Experiment 20000185 PARAMETER Experiment Name: At_Roots__P Parameter: Organism Value: A. thaliana
  misc_feature: MA Experiment 20000185 PARAMETER Experiment Name: At_Roots__P Parameter: Tissue Value: Roots vs. Whole Plant
  misc_feature: MA Experiment ID: 20000227 Result: Down-regulated in Transcription
  misc_feature: MA Experiment 20000227 PARAMETER Experiment Name: At_Root-Tips-vs-Tops_P Parameter: Tissue Value: Root Tips vs. Root Tops
  misc_feature: MA Experiment ID: 20000437 Result: Up-regulated in Transcription
  misc_feature: MA Experiment 20000437 PARAMETER Experiment Name: At_Drought_P Parameter: Age (day) Value: 8
  misc_feature: MA Experiment 20000437 PARAMETER Experiment Name: At_Drought_P Parameter: Organism Value: A. thaliana
  misc_feature: MA Experiment 20000437 PARAMETER Experiment Name: At_Drought_P Parameter: Plant Line Value: WS
  misc_feature: MA Experiment 20000437 PARAMETER Experiment Name: At_Drought_P Parameter: Timepoint (hr) Value: 24
  misc_feature: MA Experiment 20000437 PARAMETER Experiment Name: At_Drought_P Parameter: Tissue Value: Whole Plant
  misc_feature: MA Experiment 20000437 PARAMETER Experiment Name: At_Drought_P Parameter: Treatment Value: Drought vs. No Drought
  misc_feature: MA Experiment ID: 20000439 Result: Down-regulated in Transcription
  misc_feature: MA Experiment 20000439 PARAMETER Experiment Name: At_Roots__P Parameter: Age (day) Value: 14 vs. 21
  misc_feature: MA Experiment 20000439 PARAMETER Experiment Name: At_Roots__P Parameter: Organism Value: A. thaliana
  misc_feature: MA Experiment 20000439 PARAMETER Experiment Name: At_Roots__P Parameter: Tissue Value: Roots vs. Whole Plant
  misc_feature: MA Experiment ID: 20000451 Result: Down-regulated in Transcription
  misc_feature: MA Experiment 20000451 PARAMETER Experiment Name: At_CS6879_Shoots-Roots_P Parameter: Age (day) Value: 14
  misc_feature: MA Experiment 20000451 PARAMETER Experiment Name: At_CS6879_Shoots-Roots_P Parameter: Organism Value: A. thaliana
  misc_feature: MA Experiment 20000451 PARAMETER Experiment Name: At_CS6879_Shoots-Roots_P Parameter: Plant Line Value: CS6879 vs. WS
  misc_feature: MA Experiment 20000451 PARAMETER Experiment Name: At_CS6879_Shoots-Roots_P Parameter: Tissue Value: Roots
  misc_feature: MA Experiment ID: 20000496 Result: Up-regulated in Transcription
  misc_feature: MA Experiment 20000496 PARAMETER Experiment Name: At_Guard_Cells_P Parameter: Harvest Date Value: 7/19/2002
  misc_feature: MA Experiment 20000496 PARAMETER Experiment Name: At_Guard_Cells_P Parameter: Organism Value: Canola
  misc_feature: MA Experiment 20000496 PARAMETER Experiment Name: At_Guard_Cells_P Parameter: Tissue Value: Guard Cells vs. Leaves
  misc_feature: MA Experiment ID: 20001558 Result: Down-regulated in Transcription
  misc_feature: MA Experiment 20001558 PARAMETER Experiment Name: At_Drought_Soil_Dry_P Parameter: Age (day) Value: 27
  misc_feature: MA Experiment 20001558 PARAMETER Experiment Name: At_Drought_Soil_Dry_P Parameter: Organism Value: A. thaliana
  misc_feature: MA Experiment 20001558 PARAMETER Experiment Name: At_Drought_Soil_Dry_P Parameter: Plant Line Value: WS
  misc_feature: MA Experiment 20001558 PARAMETER Experiment Name: At_Drought_Soil_Dry_P Parameter: Post Timepoint (hr) Value: 6
  misc_feature: MA Experiment 20001558 PARAMETER Experiment Name: At_Drought_Soil_Dry_P Parameter: Post-Treatment Value: Re-Water vs. No Drought
  misc_feature: MA Experiment 20001558 PARAMETER Experiment Name: At_Drought_Soil_Dry_P Parameter: Timepoint (day) Value: 13
  misc_feature: MA Experiment 20001558 PARAMETER Experiment Name: At_Drought_Soil_Dry_P Parameter: Treatment Value: Drought vs. No Drought
  misc_feature: MA Experiment ID: 20001560 Result: Down-regulated in Transcription
  misc_feature: MA Experiment 20001560 PARAMETER Experiment Name: At_Drought_Soil_Dry_P Parameter: Age (day) Value: 28
  misc_feature: MA Experiment 20001560 PARAMETER Experiment Name: At_Drought_Soil_Dry_P Parameter: Organism Value: A. thaliana
  misc_feature: MA Experiment 20001560 PARAMETER Experiment Name: At_Drought_Soil_Dry_P Parameter: Plant Line Value: WS
  misc_feature: MA Experiment 20001560 PARAMETER Experiment Name: At_Drought_Soil_Dry_P Parameter: Post Timepoint (hr) Value: None
  misc_feature: MA Experiment 20001560 PARAMETER Experiment Name: At_Drought_Soil_Dry_P Parameter: Post-Treatment Value: None
  misc_feature: MA Experiment 20001560 PARAMETER Experiment Name: At_Drought_Soil_Dry_P Parameter: Timepoint (day) Value: 14
  misc_feature: MA Experiment 20001560 PARAMETER Experiment Name: At_Drought_Soil_Dry_P Parameter: Treatment Value: Drought vs. No Drought
gtctcctcttcggataatcctatccttctcttcctataaatacctctccactcttcctcttcctccaccactacaaccaccgcaacaaccaccaaaaaccctctcaaagaaatttcttttttttcttactttcttggtttgtcaaatatggtcagccatccaatggagaaagctgcaaatggtgcgtctgcgttggaaacgcagacgggtgagttagatcagccggaacggcttcgtaagatcatatcggtgtcttccattgccgccggtgtacagttcggttgggctttacagttatctctgttgactccttacgtgcagctactcggaatcccacataaatgggcttctctgatttggctctgtggtccaatctccggtatgcttgttcagcctatcgtcggttaccacagtgaccgttgcacctcaagattcggccgtcgtcgtcccttcatcgtcgctggagctggtttagtcaccgttgctgttttccttatcggttacgctgccgatataggtcacagcatgggcgatcagcttgacaaaccgccgaaaacgcgagccatagcgatattcgctctcgggttttggattcttgacgtggctaacaacaccttacaaggaccctgcagagctttcttggctgatttatcagcagggaacgctaagaaaacgcgaaccgcaaacgcgtttttctcgtttttcatggcggttggaaacgttttgggttacgctgcgggatcttacagaaatctctacaaagttgtgcctttcacgatgactgagtcatgcgatctctactgcgcaaacctcaaaacgtgttttttcctatccataacgcttctcctcatagtcactttcgtatctctctgttacgtgaaggagaagccatggacgccagagccaacagccgatggaaaagcctccaacgttccgtttttcggagaaatcttcggagctttcaaggaactaaaaagacccatgtggatgcttcttatagtcactgcactaaactggatcgcttggttccctttccttctcttcgacactgattggatgggccgtgaggtgtacggaggaaactcagacgcaaccgcaaccgcagcctctaagaagctttacaacgacggagtcagagctggtgctttggggcttatgcttaacgctattgttcttggtttcatgtctcttggtgttgaatggattggtcggaaattgggaggagctaaaaggctttggggtattgttaacttcatcctcgccatttgcttggccatgacggttgtggttacgaaacaagctgagaatcaccgacgagatcacggcggcgctaaaacaggtccacctggtaacgtcacagctggtgctttaactctcttcgccatcctcggtatcccccaagccattacgtttagcattccttttgcactagcttccatattttcaaccaattccggtgccggccaaggactttccctaggtgttctgaatctagccattgtcgtccctcagatggtaatatctgtgggaggtggaccattcgacgaactattcggtggtggaaacattccagcatttgtgttaggagcgattgcggcagcggtaagtggtgtattggcgttgacggtgttgccttcaccgcctccggatgctcctgccttcaaagctactatgggatttcattgaattttagcagtggttgtttggctctctttctctcataaaacagtagtgttgtgcaaatcctacataaagaaaaaagaaaaggaaattaaactcattgggttggtttgtattttacctaaacccacgaagttcctttttctttttgtaactcaatttaaatttggagtatattttactttttgttaccttcaaggcttcaatattacgacttcattgttcgg

SEQ ID NO: 24986 - protein, 512 aa, Arabidopsis thaliana
  peptide (1)..(512): Ceres Seq. ID no. 13491989
  misc_feature (32)..(472): Pfam Name: Sugar (and other) transporter Pfam Description: Sugar (and other) transporter
  misc_feature (7)..(509): Homolog of NCBI NO: 12057172 NR Description: sucrose trasporter [Arabidopsis thaliana]
  misc_feature (7)..(512): Homolog of NCBI NO: 15217602 NR Description: sucrose transporter (sucrose-proton symporter)
  misc_feature (1)..(512): Homolog of NCBI NO: 15217601 NR Description: sucrose transporter SUC1 (sucrose-proton
  misc_feature (7)..(512): Homolog of NCBI NO: 18091779 NR Description: sucrose transporter SUC1 [Brassica oleracea]
  misc_feature (29)..(512): Homolog of NCBI NO: 542020 NR Description: sucrose transport protein - castor bean
  misc_feature (8)..(496): Homolog of NCBI NO: 15225986 NR Description: sucrose transporter (sucrose-proton symporter),
  misc_feature (6)..(512): Homolog of NCBI NO: 18091781 NR Description: sucrose transporter SUC2 [Brassica oleracea]
  misc_feature (1)..(512): Homolog of NCBI NO: 20147213 NR Description: At1g22710/T22J18_12 [Arabidopsis thaliana]
  misc_feature (1)..(512): Homolog of NCBI NO: 481131 NR Description: sucrose transport protein SUC2 - Arabidopsis
  misc_feature (1)..(512): Homolog of NCBI NO: 15219938 NR Description: sucrose transporter SUC2 (sucrose-proton
MVSHPMEKAANGASALETQTGELDQPERLRKIISVSSIAAGVQFGWALQLSLLTPYVQLLGIPHKWASLIWLCGPISGMLVQPIVGYHSDRCTSRFGRRRPFIVAGAGLVTVAVFLIGYAADIGHSMGDQLDKPPKTRAIAIFALGFWILDVANNTLQGPCRAFLADLSAGNAKKTRTANAFFSFFMAVGNVLGYAAGSYRNLYKVVPFTMTESCDLYCANLKTCFFLSITLLLIVTFVSLCYVKEKPWTPEPTADGKASNVPFFGEIFGAFKELKRPMWMLLIVTALNWIAWFPFLLFDTDWMGREVYGGNSDATATAASKKLYNDGVRAGALGLMLNAIVLGFMSLGVEWIGRKLGGAKRLWGIVNFILAICLAMTVVVTKQAENHRRDHGGAKTGPPGNVTAGALTLFAILGIPQAITFSIPFALASIFSTNSGAGQGLSLGVLNLAIVVPQMVISVGGGPFDELFGGGNIPAFVLGAIAAAVSGVLALTVLPSPPPDAPAFKATMGFH

SEQ ID NO: 24987 - protein, 507 aa, Arabidopsis thaliana
  peptide (1)..(507): Ceres Seq. ID no. 13491990
  misc_feature (27)..(467): Pfam Name: Sugar (and other) transporter Pfam Description: Sugar (and other) transporter
  misc_feature (24)..(507): Homolog of NCBI NO: 542020 NR Description: sucrose transport protein - castor bean
  misc_feature (3)..(491): Homolog of NCBI NO: 15225986 NR Description: sucrose transporter (sucrose-proton symporter),
  misc_feature (2)..(504): Homolog of NCBI NO: 12057172 NR Description: sucrose trasporter [Arabidopsis thaliana]
  misc_feature (2)..(507): Homolog of NCBI NO: 15217602 NR Description: sucrose transporter (sucrose-proton symporter)
  misc_feature (1)..(507): Homolog of NCBI NO: 15217601 NR Description: sucrose transporter SUC1 (sucrose-proton
  misc_feature (2)..(507): Homolog of NCBI NO: 18091779 NR Description: sucrose transporter SUC1 [Brassica oleracea]
  misc_feature (1)..(507): Homolog of NCBI NO: 18091781 NR Description: sucrose transporter SUC2 [Brassica oleracea]
  misc_feature (1)..(507): Homolog of NCBI NO: 20147213 NR Description: At1g22710/T22J18_12 [Arabidopsis thaliana]
  misc_feature (1)..(507): Homolog of NCBI NO: 481131 NR Description: sucrose transport protein SUC2 - Arabidopsis
  misc_feature (1)..(507): Homolog of NCBI NO: 15219938 NR Description: sucrose transporter SUC2 (sucrose-proton
MEKAANGASALETQTGELDQPERLRKIISVSSIAAGVQFGWALQLSLLTPYVQLLGIPHKWASLIWLCGPISGMLVQPIVGYHSDRCTSRFGRRRPFIVAGAGLVTVAVFLIGYAADIGHSMGDQLDKPPKTRAIAIFALGFWILDVANNTLQGPCRAFLADLSAGNAKKTRTANAFFSFFMAVGNVLGYAAGSYRNLYKVVPFTMTESCDLYCANLKTCFFLSITLLLIVTFVSLCYVKEKPWTPEPTADGKASNVPFFGEIFGAFKELKRPMWMLLIVTALNWIAWFPFLLFDTDWMGREVYGGNSDATATAASKKLYNDGVRAGALGLMLNAIVLGFMSLGVEWIGRKLGGAKRLWGIVNFILAICLAMTVVVTKQAENHRRDHGGAKTGPPGNVTAGALTLFAILGIPQAITFSIPFALASIFSTNSGAGQGLSLGVLNLAIVVPQMVISVGGGPFDELFGGGNIPAFVLGAIAAAVSGVLALTVLPSPPPDAPAFKATMGFH

SEQ ID NO: 24988 - protein, 434 aa, Arabidopsis thaliana
  peptide (1)..(434): Ceres Seq. ID no. 13491991
  misc_feature (1)..(394): Pfam Name: Sugar (and other) transporter Pfam Description: Sugar (and other) transporter
  misc_feature (1)..(434): Homolog of NCBI NO: 542020 NR Description: sucrose transport protein - castor bean
  misc_feature (1)..(418): Homolog of NCBI NO: 15225986 NR Description: sucrose transporter (sucrose-proton symporter),
  misc_feature (1)..(431): Homolog of NCBI NO: 12057172 NR Description: sucrose trasporter [Arabidopsis thaliana]
  misc_feature (1)..(434): Homolog of NCBI NO: 15217602 NR Description: sucrose transporter (sucrose-proton symporter)
  misc_feature (1)..(434): Homolog of NCBI NO: 15217601 NR Description: sucrose transporter SUC1 (sucrose-proton
  misc_feature (1)..(434): Homolog of NCBI NO: 18091779 NR Description: sucrose transporter SUC1 [Brassica oleracea]
  misc_feature (1)..(434): Homolog of NCBI NO: 18091781 NR Description: sucrose transporter SUC2 [Brassica oleracea]
  misc_feature (1)..(434): Homolog of NCBI NO: 20147213 NR Description: At1g22710/T22J18_12 [Arabidopsis thaliana]
  misc_feature (1)..(434): Homolog of NCBI NO: 481131 NR Description: sucrose transport protein SUC2 - Arabidopsis
  misc_feature (1)..(434): Homolog of NCBI NO: 15219938 NR Description: sucrose transporter SUC2 (sucrose-proton
MLVQPIVGYHSDRCTSRFGRRRPFIVAGAGLVTVAVFLIGYAADIGHSMGDQLDKPPKTRAIAIFALGFWILDVANNTLQGPCRAFLADLSAGNAKKTRTANAFFSFFMAVGNVLGYAAGSYRNLYKVVPFTMTESCDLYCANLKTCFFLSITLLLIVTFVSLCYVKEKPWTPEPTADGKASNVPFFGEIFGAFKELKRPMWMLLIVTALNWIAWFPFLLFDTDWMGREVYGGNSDATATAASKKLYNDGVRAGALGLMLNAIVLGFMSLGVEWIGRKLGGAKRLWGIVNFILAICLAMTVVVTKQAENHRRDHGGAKTGPPGNVTAGALTLFAILGIPQAITFSIPFALASIFSTNSGAGQGLSLGVLNLAIVVPQMVISVGGGPFDELFGGGNIPAFVLGAIAAAVSGVLALTVLPSPPPDAPAFKATMGFH

SEQ ID NO: 24989 - DNA, 1305 bp, Arabidopsis thaliana
  misc_feature (1)..(1305): Ceres Seq. ID no. 12394693
  misc_feature: MA Experiment ID: 108462 Result: Down-regulated in Transcription
  misc_feature: MA Experiment 108462 PARAMETER Experiment Name: At_Germinating_Seeds_cDNA_P Parameter: Age (day) Value: 2 vs. 0
  misc_feature: MA Experiment 108462 PARAMETER Experiment Name: At_Germinating_Seeds_cDNA_P Parameter: Tissue Value: Germinating Seeds
  misc_feature: MA Experiment ID: 108463 Result: Down-regulated in Transcription
  misc_feature: MA Experiment 108463 PARAMETER Experiment Name: At_Germinating_Seeds_cDNA_P Parameter: Age (day) Value: 3 vs. 0
  misc_feature: MA Experiment 108463 PARAMETER Experiment Name: At_Germinating_Seeds_cDNA_P Parameter: Tissue Value: Germinating Seeds
  misc_feature: MA Experiment ID: 108464 Result: Down-regulated in Transcription
  misc_feature: MA Experiment 108464 PARAMETER Experiment Name: At_Germinating_Seeds_cDNA_P Parameter: Age (day) Value: 4 vs. 0
  misc_feature: MA Experiment 108464 PARAMETER Experiment Name: At_Germinating_Seeds_cDNA_P Parameter: Tissue Value: Germinating Seeds
  misc_feature: MA Experiment ID: 108488 Result: Up-regulated in Transcription
  misc_feature: MA Experiment ID: 108489 Result: Up-regulated in Transcription
  misc_feature: MA Experiment ID: 108561 Result: Down-regulated in Transcription
  misc_feature: MA Experiment 108561 PARAMETER Experiment Name: At_100uM_ABA_cDNA_P Parameter: Timepoint (hr) Value: 6
  misc_feature: MA Experiment 108561 PARAMETER Experiment Name: At_100uM_ABA_cDNA_P Parameter: Tissue Value: Aerial
  misc_feature: MA Experiment 108561 PARAMETER Experiment Name: At_100uM_ABA_cDNA_P Parameter: Treatment Value: 100uM ABA vs. No Treatment
  misc_feature: MA Experiment ID: 108569 Result: Up-regulated in Transcription
  misc_feature: MA Experiment 108569 PARAMETER Experiment Name: At_0.001%_MeJA__cDNA_P Parameter: Timepoint (hr) Value: 6
  misc_feature: MA Experiment 108569 PARAMETER Experiment Name: At_0.001%_MeJA__cDNA_P Parameter: Tissue Value: Aerial
  misc_feature: MA Experiment 108569 PARAMETER Experiment Name: At_0.001%_MeJA__cDNA_P Parameter: Treatment Value: 0.001% MeJA vs. No Treatment
  misc_feature: MA Experiment ID: 108573 Result: Up-regulated in Transcription
  misc_feature: MA Experiment 108573 PARAMETER Experiment Name: At_Drought_cDNA_P Parameter: Timepoint (hr) Value: 6
  misc_feature: MA Experiment 108573 PARAMETER Experiment Name: At_Drought_cDNA_P Parameter: Tissue Value: Aerial
  misc_feature: MA Experiment 108573 PARAMETER Experiment Name: At_Drought_cDNA_P Parameter: Treatment Value: Drought vs. No Drought
  misc_feature: MA Experiment ID: 108576 Result: Down-regulated in Transcription
  misc_feature: MA Experiment 108576 PARAMETER Experiment Name: At_42deg_Heat_cDNA_P Parameter: Temperature (deg C) Value: 42 vs. 22
  misc_feature: MA Experiment 108576 PARAMETER Experiment Name: At_42deg_Heat_cDNA_P Parameter: Timepoint (hr) Value: 1
  misc_feature: MA Experiment 108576 PARAMETER Experiment Name: At_42deg_Heat_cDNA_P Parameter: Tissue Value: Aerial
  misc_feature: MA Experiment ID: 108577 Result: Down-regulated in Transcription
  misc_feature: MA Experiment 108577 PARAMETER Experiment Name: At_42deg_Heat_cDNA_P Parameter: Temperature (deg C) Value: 42 vs. 22
  misc_feature: MA Experiment 108577 PARAMETER Experiment Name: At_42deg_Heat_cDNA_P Parameter: Timepoint (hr) Value: 6
  misc_feature: MA Experiment 108577 PARAMETER Experiment Name: At_42deg_Heat_cDNA_P Parameter: Tissue Value: Aerial
  misc_feature: MA Experiment ID: 108579 Result: Down-regulated in Transcription
  misc_feature: MA Experiment 108579 PARAMETER Experiment Name: At_4deg_Cold_cDNA_P Parameter: Temperature (deg C) Value: 4 vs. 22
  misc_feature: MA Experiment 108579 PARAMETER Experiment Name: At_4deg_Cold_cDNA_P Parameter: Timepoint (hr) Value: 6
  misc_feature: MA Experiment 108579 PARAMETER Experiment Name: At_4deg_Cold_cDNA_P Parameter: Tissue Value: Aerial
  misc_feature: MA Experiment ID: 108585 Result: Down-regulated in Transcription
  misc_feature: MA Experiment 108585 PARAMETER Experiment Name: At_5mM_NaNP_cDNA_P Parameter: Timepoint (hr) Value: 6
  misc_feature: MA Experiment 108585 PARAMETER Experiment Name: At_5mM_NaNP_cDNA_P Parameter: Tissue Value: Aerial
  misc_feature: MA Experiment 108585 PARAMETER Experiment Name: At_5mM_NaNP_cDNA_P Parameter: Treatment Value: null
  misc_feature: MA Experiment ID: 108595 Result: Down-regulated in Transcription
  misc_feature: MA Experiment 108595 PARAMETER Experiment Name: At_Ler-pi_Ovule_cDNA_P Parameter: Plant Line Value: null
  misc_feature: MA Experiment ID: 108607 Result: Down-regulated in Transcription
  misc_feature: MA Experiment 108607 PARAMETER Experiment Name: At_100uM_ABA_cDNA_P Parameter: Timepoint (hr) Value: 4
  misc_feature: MA Experiment 108607 PARAMETER Experiment Name: At_100uM_ABA_cDNA_P Parameter: Tissue Value: Aerial
  misc_feature: MA Experiment 108607 PARAMETER Experiment Name: At_100uM_ABA_cDNA_P Parameter: Treatment Value: 100uM ABA vs. No Treatment
  misc_feature: MA Experiment ID: 108608 Result: Down-regulated in Transcription
  misc_feature: MA Experiment 108608 PARAMETER Experiment Name: At_100uM_ABA_cDNA_P Parameter: Timepoint (hr) Value: 1
  misc_feature: MA Experiment 108608 PARAMETER Experiment Name: At_100uM_ABA_cDNA_P Parameter: Tissue Value: Aerial
  misc_feature: MA Experiment 108608 PARAMETER Experiment Name: At_100uM_ABA_cDNA_P Parameter: Treatment Value: 100uM ABA vs. No Treatment
  misc_feature: MA Experiment ID: 108609 Result: Down-regulated in Transcription
  misc_feature: MA Experiment 108609 PARAMETER Experiment Name: At_100uM_ABA_cDNA_P Parameter: Timepoint (hr) Value: 24
  misc_feature: MA Experiment 108609 PARAMETER Experiment Name: At_100uM_ABA_cDNA_P Parameter: Tissue Value: Aerial
  misc_feature: MA Experiment 108609 PARAMETER Experiment Name: At_100uM_ABA_cDNA_P Parameter: Treatment Value: 100uM ABA vs. No Treatment
  misc_feature: MA Experiment ID: 20000069 Result: Down-regulated in Transcription
  misc_feature: MA Experiment 20000069 PARAMETER Experiment Name: At_100uM_ABA_Mutants_cDNA_P Parameter: Plant Line Value: CS23
  misc_feature: MA Experiment 20000069 PARAMETER Experiment Name: At_100uM_ABA_Mutants_cDNA_P Parameter: Timepoint (hr) Value: 6
  misc_feature: MA Experiment 20000069 PARAMETER Experiment Name: At_100uM_ABA_Mutants_cDNA_P Parameter: Tissue Value: Aerial
  misc_feature: MA Experiment 20000069 PARAMETER Experiment Name: At_100uM_ABA_Mutants_cDNA_P Parameter: Treatment Value: 100uM ABA vs. No Treatment
  misc_feature: MA Experiment ID: 20000070 Result: Down-regulated in Transcription
  misc_feature: MA Experiment 20000070 PARAMETER Experiment Name: At_100uM_ABA_Mutants_cDNA_P Parameter: Plant Line Value: CS24
  misc_feature: MA Experiment 20000070 PARAMETER Experiment Name: At_100uM_ABA_Mutants_cDNA_P Parameter: Timepoint (hr) Value: 6
  misc_feature: MA Experiment 20000070 PARAMETER Experiment Name: At_100uM_ABA_Mutants_cDNA_P Parameter: Tissue Value: Aerial
  misc_feature: MA Experiment 20000070 PARAMETER Experiment Name: At_100uM_ABA_Mutants_cDNA_P Parameter: Treatment Value: 100uM ABA vs. No Treatment
  misc_feature: MA Experiment ID: 20000071 Result: Down-regulated in Transcription
  misc_feature: MA Experiment 20000071 PARAMETER Experiment Name: At_100uM_ABA_Mutants_cDNA_P Parameter: Plant Line Value: CS8104
  misc_feature: MA Experiment 20000071 PARAMETER Experiment Name: At_100uM_ABA_Mutants_cDNA_P Parameter: Timepoint (hr) Value: 6
  misc_feature: MA Experiment 20000071 PARAMETER Experiment Name: At_100uM_ABA_Mutants_cDNA_P Parameter: Tissue Value: Aerial
  misc_feature: MA Experiment 20000071 PARAMETER Experiment Name: At_100uM_ABA_Mutants_cDNA_P Parameter: Treatment Value: 100uM ABA vs. No Treatment
  misc_feature: MA Experiment ID: 20000072 Result: Down-regulated in Transcription
  misc_feature: MA Experiment 20000072 PARAMETER Experiment Name: At_100uM_ABA_Mutants_cDNA_P Parameter: Plant Line Value: CS8105
  misc_feature: MA Experiment 20000072 PARAMETER Experiment Name: At_100uM_ABA_Mutants_cDNA_P Parameter: Timepoint (hr) Value: 6
  misc_feature: MA Experiment 20000072 PARAMETER Experiment Name: At_100uM_ABA_Mutants_cDNA_P Parameter: Tissue Value: Aerial
  misc_feature: MA Experiment 20000072 PARAMETER Experiment Name: At_100uM_ABA_Mutants_cDNA_P Parameter: Treatment Value: 100uM ABA vs. No Treatment
  misc_feature: MA Experiment ID: 20000086 Result: Down-regulated in Transcription
  misc_feature: MA Experiment 20000086 PARAMETER Experiment Name: At_100uM_ABA_Mutants_cDNA_P Parameter: Plant Line Value: CS22
  misc_feature: MA Experiment 20000086 PARAMETER Experiment Name: At_100uM_ABA_Mutants_cDNA_P Parameter: Timepoint (hr) Value: 6
  misc_feature: MA Experiment 20000086 PARAMETER Experiment Name: At_100uM_ABA_Mutants_cDNA_P Parameter: Tissue Value: Aerial
  misc_feature: MA Experiment 20000086 PARAMETER Experiment Name: At_100uM_ABA_Mutants_cDNA_P Parameter: Treatment Value: 100uM ABA vs. No Treatment
  misc_feature: MA Experiment ID: 20000087 Result: Down-regulated in Transcription
  misc_feature: MA Experiment 20000087 PARAMETER Experiment Name: At_100uM_ABA_Mutants_cDNA_P Parameter: Plant Line Value: WS
  misc_feature: MA Experiment 20000087 PARAMETER Experiment Name: At_100uM_ABA_Mutants_cDNA_P Parameter: Timepoint (hr) Value: 6
  misc_feature: MA Experiment 20000087 PARAMETER Experiment Name: At_100uM_ABA_Mutants_cDNA_P Parameter: Tissue Value: Aerial
  misc_feature: MA Experiment 20000087 PARAMETER Experiment Name: At_100uM_ABA_Mutants_cDNA_P Parameter: Treatment Value: 100uM ABA vs. No Treatment
  misc_feature: MA Experiment ID: 20000088 Result: Down-regulated in Transcription
  misc_feature: MA Experiment 20000088 PARAMETER Experiment Name: At_100uM_ABA_Mutants_cDNA_P Parameter: Plant Line Value: Landsberg
  misc_feature: MA Experiment 20000088 PARAMETER Experiment Name: At_100uM_ABA_Mutants_cDNA_P Parameter: Timepoint (hr) Value: 6
  misc_feature: MA Experiment 20000088 PARAMETER Experiment Name: At_100uM_ABA_Mutants_cDNA_P Parameter: Tissue Value: Aerial
  misc_feature: MA Experiment 20000088 PARAMETER Experiment Name: At_100uM_ABA_Mutants_cDNA_P Parameter: Treatment Value: 100uM ABA vs. No Treatment
  misc_feature: MA Experiment ID: 20000093 Result: Down-regulated in Transcription
  misc_feature: MA Experiment 20000093 PARAMETER Experiment Name: At_42deg_Heat_cDNA_P Parameter: Temperature (deg C) Value: 42 vs. 22
  misc_feature: MA Experiment 20000093 PARAMETER Experiment Name: At_42deg_Heat_cDNA_P Parameter: Timepoint (hr) Value: 0.5
  misc_feature: MA Experiment 20000093 PARAMETER Experiment Name: At_42deg_Heat_cDNA_P Parameter: Tissue Value: Aerial
  misc_feature: MA Experiment ID: 20000111 Result: Down-regulated in Transcription
  misc_feature: MA Experiment 20000111 PARAMETER Experiment Name: At_42deg_Heat_cDNA_P Parameter: Temperature (deg C) Value: 42 vs. 22
  misc_feature: MA Experiment 20000111 PARAMETER Experiment Name: At_42deg_Heat_cDNA_P Parameter: Timepoint (hr) Value: 6
  misc_feature: MA Experiment 20000111 PARAMETER Experiment Name: At_42deg_Heat_cDNA_P Parameter: Tissue Value: Aerial
  misc_feature: MA Experiment ID: 20000112 Result: Down-regulated in Transcription
  misc_feature: MA Experiment 20000112 PARAMETER Experiment Name: At_42deg_Heat_cDNA_P Parameter: Temperature (deg C) Value: 42 vs. 22
  misc_feature: MA Experiment 20000112 PARAMETER Experiment Name: At_42deg_Heat_cDNA_P Parameter: Timepoint (hr) Value: 2
  misc_feature: MA Experiment 20000112 PARAMETER Experiment Name: At_42deg_Heat_cDNA_P Parameter: Tissue Value: Aerial
  misc_feature: MA Experiment ID: 20000113 Result: Down-regulated in Transcription
  misc_feature: MA Experiment 20000113 PARAMETER Experiment Name: At_42deg_Heat_cDNA_P Parameter: Temperature (deg C) Value: 42 vs. 22
  misc_feature: MA Experiment 20000113 PARAMETER Experiment Name: At_42deg_Heat_cDNA_P Parameter: Timepoint (hr) Value: 8
  misc_feature: MA Experiment 20000113 PARAMETER Experiment Name: At_42deg_Heat_cDNA_P Parameter: Tissue Value: Aerial
  misc_feature: MA Experiment ID: 20000117 Result: Down-regulated in Transcription
  misc_feature: MA Experiment 20000117 PARAMETER Experiment Name: At_100uM_ABA_Mutants_cDNA_P Parameter: Plant Line Value: Columbia
  misc_feature: MA Experiment 20000117 PARAMETER Experiment Name: At_100uM_ABA_Mutants_cDNA_P Parameter: Timepoint (hr) Value: 6
  misc_feature: MA Experiment 20000117 PARAMETER Experiment Name: At_100uM_ABA_Mutants_cDNA_P Parameter: Tissue Value: Aerial
  misc_feature: MA Experiment 20000117 PARAMETER Experiment Name: At_100uM_ABA_Mutants_cDNA_P Parameter: Treatment Value: 100uM ABA vs. No Treatment
  misc_feature: MA Experiment ID: 20000166 Result: Down-regulated in Transcription
  misc_feature: MA Experiment 20000166 PARAMETER Experiment Name: At_100uM_ABA_P Parameter: Age (day) Value: 14
  misc_feature: MA Experiment 20000166 PARAMETER Experiment Name: At_100uM_ABA_P Parameter: Organism Value: A. thaliana
  misc_feature: MA Experiment 20000166 PARAMETER Experiment Name: At_100uM_ABA_P Parameter: Plant Line Value: WS
  misc_feature: MA Experiment 20000166 PARAMETER Experiment Name: At_100uM_ABA_P Parameter: Timepoint (hr) Value: 1
  misc_feature: MA Experiment 20000166 PARAMETER Experiment Name: At_100uM_ABA_P Parameter: Tissue Value: Aerial
  misc_feature: MA Experiment 20000166 PARAMETER Experiment Name: At_100uM_ABA_P Parameter: Treatment Value: 100uM ABA vs. No Treatment
  misc_feature: MA Experiment ID: 20000171 Result: Down-regulated in Transcription
  misc_feature: MA Experiment 20000171 PARAMETER Experiment Name: At_42deg_Heat_P Parameter: Age (day) Value: 14
  misc_feature: MA Experiment 20000171 PARAMETER Experiment Name: At_42deg_Heat_P Parameter: Organism Value: A. thaliana
  misc_feature: MA Experiment 20000171 PARAMETER Experiment Name: At_42deg_Heat_P Parameter: Plant Line Value: WS
  misc_feature: MA Experiment 20000171 PARAMETER Experiment Name: At_42deg_Heat_P Parameter: Temperature (deg C) Value: 42 vs. 22
  misc_feature: MA Experiment 20000171 PARAMETER Experiment Name: At_42deg_Heat_P Parameter: Timepoint (hr) Value: 1
  misc_feature: MA Experiment 20000171 PARAMETER Experiment Name: At_42deg_Heat_P Parameter: Tissue Value: Aerial
  misc_feature: MA Experiment ID: 20000173 Result: Down-regulated in Transcription
  misc_feature: MA Experiment 20000173 PARAMETER Experiment Name: At_42deg_Heat_P Parameter: Age (day) Value: 14
  misc_feature: MA Experiment 20000173 PARAMETER Experiment Name: At_42deg_Heat_P Parameter: Organism Value: A. thaliana
  misc_feature: MA Experiment 20000173 PARAMETER Experiment Name: At_42deg_Heat_P Parameter: Plant Line Value: WS
  misc_feature: MA Experiment 20000173 PARAMETER Experiment Name: At_42deg_Heat_P Parameter: Temperature (deg C) Value: 42 vs. 22
  misc_feature: MA Experiment 20000173 PARAMETER Experiment Name: At_42deg_Heat_P Parameter: Timepoint (hr) Value: 6
  misc_feature: MA Experiment 20000173 PARAMETER Experiment Name: At_42deg_Heat_P Parameter: Tissue Value: Aerial
  misc_feature: MA Experiment ID: 20000180 Result: Down-regulated in Transcription
  misc_feature: MA Experiment 20000180 PARAMETER Experiment Name: At_Germinating_Seeds_P Parameter: Age (hr) Value: 24 vs. 0
  misc_feature: MA Experiment 20000180 PARAMETER Experiment Name: At_Germinating_Seeds_P Parameter: Tissue Value: Germinating Seeds
  misc_feature: MA Experiment ID: 20000184 Result: Up-regulated in Transcription
  misc_feature: MA Experiment 20000184 PARAMETER Experiment Name: At_Shoots__P Parameter: Age (day) Value: 7
  misc_feature: MA Experiment 20000184 PARAMETER Experiment Name: At_Shoots__P Parameter: Tissue Value: Shoots vs. Whole Plant
  misc_feature: MA Experiment ID: 20000185 Result: Down-regulated in Transcription
  misc_feature: MA Experiment 20000185 PARAMETER Experiment Name: At_Roots__P Parameter: Age (day) Value: 7 vs. 21
  misc_feature: MA Experiment 20000185 PARAMETER Experiment Name: At_Roots__P Parameter: Organism Value: A. thaliana
  misc_feature: MA Experiment 20000185 PARAMETER Experiment Name: At_Roots__P Parameter: Tissue Value: Roots vs. Whole Plant
  misc_feature: MA Experiment ID: 20000214 Result: Up-regulated in Transcription
  misc_feature: MA Experiment 20000214 PARAMETER Experiment Name: At_4deg_Cold_P Parameter: Timepoint (hr) Value: 6
  misc_feature: MA Experiment ID: 20000234 Result: Down-regulated in Transcription
  misc_feature: MA Experiment 20000234 PARAMETER Experiment Name: At_Siliques_P Parameter: Age (day) Value: 21
  misc_feature: MA Experiment 20000234 PARAMETER Experiment Name: At_Siliques_P Parameter: Organism Value: A. thaliana
  misc_feature: MA Experiment 20000234 PARAMETER Experiment Name: At_Siliques_P Parameter: Plant Line Value: WS
  misc_feature: MA Experiment 20000234 PARAMETER Experiment Name: At_Siliques_P Parameter: Tissue Value: Less Than 5mm Siliques vs. Whole Plant
  misc_feature: MA Experiment ID: 20000264 Result: Down-regulated in Transcription
  misc_feature: MA Experiment 20000264 PARAMETER Experiment Name: At_Open_Flower_P Parameter: Age (day) Value: 21
  misc_feature: MA Experiment 20000264 PARAMETER Experiment Name: At_Open_Flower_P Parameter: Plant Line Value: WS
  misc_feature: MA Experiment 20000264 PARAMETER Experiment Name: At_Open_Flower_P Parameter: Tissue Value: Open Flower vs. Whole Plant
  misc_feature: MA Experiment ID: 20000267 Result: Down-regulated in Transcription
  misc_feature: MA Experiment 20000267 PARAMETER Experiment Name: At_Drought_P Parameter: Age (day) Value: 7
  misc_feature: MA Experiment 20000267 PARAMETER Experiment Name: At_Drought_P Parameter: Organism Value: A. thaliana
  misc_feature: MA Experiment 20000267 PARAMETER Experiment Name: At_Drought_P Parameter: Plant Line Value: WS
  misc_feature: MA Experiment 20000267 PARAMETER Experiment Name: At_Drought_P Parameter: Timepoint (hr) Value: 6
  misc_feature: MA Experiment 20000267 PARAMETER Experiment Name: At_Drought_P Parameter: Tissue Value: Whole Plant
  misc_feature: MA Experiment 20000267 PARAMETER Experiment Name: At_Drought_P Parameter: Treatment Value: Drought vs. No Drought
  misc_feature: MA Experiment ID: 20000288 Result: Down-regulated in Transcription
  misc_feature: MA Experiment 20000288 PARAMETER Experiment Name: At_Drought_P Parameter: Age (day) Value: 7
  misc_feature: MA Experiment 20000288 PARAMETER Experiment Name: At_Drought_P Parameter: Organism Value: A. thaliana
  misc_feature: MA Experiment 20000288 PARAMETER Experiment Name: At_Drought_P Parameter: Plant Line Value: WS
  misc_feature: MA Experiment 20000288 PARAMETER Experiment Name: At_Drought_P Parameter: Timepoint (hr) Value: 1
  misc_feature: MA Experiment 20000288 PARAMETER Experiment Name: At_Drought_P Parameter: Tissue Value: Whole Plant
  misc_feature: MA Experiment 20000288 PARAMETER Experiment Name: At_Drought_P Parameter: Treatment Value: Drought vs. No Drought
  misc_feature: MA Experiment ID: 20000436 Result: Down-regulated in Transcription
  misc_feature: MA Experiment 20000436 PARAMETER Experiment Name: At_Drought_P Parameter: Age (day) Value: 7
  misc_feature: MA Experiment 20000436 PARAMETER Experiment Name: At_Drought_P Parameter: Organism Value: A. thaliana
  misc_feature: MA Experiment 20000436 PARAMETER Experiment Name: At_Drought_P Parameter: Plant Line Value: WS
  misc_feature: MA Experiment 20000436 PARAMETER Experiment Name: At_Drought_P Parameter: Timepoint (hr) Value: 12
  misc_feature: MA Experiment 20000436 PARAMETER Experiment Name: At_Drought_P Parameter: Tissue Value: Whole Plant
  misc_feature: MA Experiment 20000436 PARAMETER Experiment Name: At_Drought_P Parameter: Treatment Value: Drought vs. No Drought
  misc_feature: MA Experiment ID: 20000437 Result: Down-regulated in Transcription
  misc_feature: MA Experiment 20000437 PARAMETER Experiment Name: At_Drought_P Parameter: Age (day) Value: 8
  misc_feature: MA Experiment 20000437 PARAMETER Experiment Name: At_Drought_P Parameter: Organism Value: A. thaliana
  misc_feature: MA Experiment 20000437 PARAMETER Experiment Name: At_Drought_P Parameter: Plant Line Value: WS
  misc_feature: MA Experiment 20000437 PARAMETER Experiment Name: At_Drought_P Parameter: Timepoint (hr) Value: 24
  misc_feature: MA Experiment 20000437 PARAMETER Experiment Name: At_Drought_P Parameter: Tissue Value: Whole Plant
  misc_feature: MA Experiment 20000437 PARAMETER Experiment Name: At_Drought_P Parameter: Treatment Value: Drought vs. No Drought
  misc_feature: MA Experiment ID: 20000438 Result: Up-regulated in Transcription
  misc_feature: MA Experiment 20000438 PARAMETER Experiment Name: At_Shoots__P Parameter: Age (day) Value: 14
  misc_feature: MA Experiment 20000438 PARAMETER Experiment Name: At_Shoots__P Parameter: Tissue Value: Shoots vs. Whole Plant
  misc_feature: MA Experiment ID: 20000439 Result: Down-regulated in Transcription
  misc_feature: MA Experiment 20000439 PARAMETER Experiment Name: At_Roots__P Parameter: Age (day) Value: 14 vs. 21
  misc_feature: MA Experiment 20000439 PARAMETER Experiment Name: At_Roots__P Parameter: Organism Value: A. thaliana
  misc_feature: MA Experiment 20000439 PARAMETER Experiment Name: At_Roots__P Parameter: Tissue Value: Roots vs. Whole Plant
  misc_feature: MA Experiment ID: 20000451 Result: Up-regulated in Transcription
  misc_feature: MA Experiment 20000451 PARAMETER Experiment Name: At_CS6879_Shoots-Roots_P Parameter: Age (day) Value: 14
  misc_feature: MA Experiment 20000451 PARAMETER Experiment Name: At_CS6879_Shoots-Roots_P Parameter: Organism Value: A. thaliana
  misc_feature: MA Experiment 20000451 PARAMETER Experiment Name: At_CS6879_Shoots-Roots_P Parameter: Plant Line Value: CS6879 vs. WS
  misc_feature: MA Experiment 20000451 PARAMETER Experiment Name: At_CS6879_Shoots-Roots_P Parameter: Tissue Value: Roots
  misc_feature: MA Experiment ID: 20000453 Result: Down-regulated in Transcription
  misc_feature: MA Experiment 20000453 PARAMETER Experiment Name: At_100uM_ABA_P Parameter: Age (day) Value: 15
  misc_feature: MA Experiment 20000453 PARAMETER Experiment Name: At_100uM_ABA_P Parameter: Organism Value: A. thaliana
  misc_feature: MA Experiment 20000453 PARAMETER Experiment Name: At_100uM_ABA_P Parameter: Plant Line Value: WS
  misc_feature: MA Experiment 20000453 PARAMETER Experiment Name: At_100uM_ABA_P Parameter: Timepoint (hr) Value: 24
  misc_feature: MA Experiment 20000453 PARAMETER Experiment Name: At_100uM_ABA_P Parameter: Tissue Value: Aerial
  misc_feature: MA Experiment 20000453 PARAMETER Experiment Name: At_100uM_ABA_P Parameter: Treatment Value: 100uM ABA vs. No Treatment
  misc_feature: MA Experiment ID: 20000455 Result: Down-regulated in Transcription
  misc_feature: MA Experiment 20000455 PARAMETER Experiment Name: At_100uM_ABA_P Parameter: Age (day) Value: 16
  misc_feature: MA Experiment 20000455 PARAMETER Experiment Name: At_100uM_ABA_P Parameter: Organism Value: A. thaliana
  misc_feature: MA Experiment 20000455 PARAMETER Experiment Name: At_100uM_ABA_P Parameter: Plant Line Value: WS
  misc_feature: MA Experiment 20000455 PARAMETER Experiment Name: At_100uM_ABA_P Parameter: Timepoint (hr) Value: 48
  misc_feature: MA Experiment 20000455 PARAMETER Experiment Name: At_100uM_ABA_P Parameter: Tissue Value: Aerial
  misc_feature: MA Experiment 20000455 PARAMETER Experiment Name: At_100uM_ABA_P Parameter: Treatment Value: 100uM ABA vs. No Treatment
  misc_feature: MA Experiment ID: 20000456 Result: Up-regulated in Transcription
  misc_feature: MA Experiment 20000456 PARAMETER Experiment Name: At_100uM_BA_P Parameter: Age (day) Value: 14
  misc_feature: MA Experiment 20000456 PARAMETER Experiment Name: At_100uM_BA_P Parameter: Organism Value: A. thaliana
  misc_feature: MA Experiment 20000456 PARAMETER Experiment Name: At_100uM_BA_P Parameter: Plant Line Value: WS
  misc_feature: MA Experiment 20000456 PARAMETER Experiment Name: At_100uM_BA_P Parameter: Timepoint (hr) Value: 6
  misc_feature: MA Experiment 20000456 PARAMETER Experiment Name: At_100uM_BA_P Parameter: Tissue Value: Aerial
  misc_feature: MA Experiment 20000456 PARAMETER Experiment Name: At_100uM_BA_P Parameter: Treatment Value: 100uM BA vs. No Treatment
  misc_feature: MA Experiment ID: 20000573 Result: Down-regulated in Transcription
  misc_feature: MA Experiment 20000573 PARAMETER Experiment Name: At_100uM_ABA_Mutants__P Parameter: Organism Value: A. thaliana
  misc_feature: MA Experiment 20000573 PARAMETER Experiment Name: At_100uM_ABA_Mutants__P Parameter: Plant Line Value: CS22 vs. Ler wt
  misc_feature: MA Experiment 20000573 PARAMETER Experiment Name: At_100uM_ABA_Mutants__P Parameter: Timepoint (hr) Value: N/A
  misc_feature: MA Experiment 20000573 PARAMETER Experiment Name: At_100uM_ABA_Mutants__P Parameter: Tissue Value: Whole Plant
  misc_feature: MA Experiment 20000573 PARAMETER Experiment Name: At_100uM_ABA_Mutants__P Parameter: Treatment Value: None
  misc_feature: MA Experiment ID: 20000574 Result: Down-regulated in Transcription
  misc_feature: MA Experiment 20000574 PARAMETER Experiment Name: At_100uM_ABA_Mutants__P Parameter: Organism Value: A. thaliana
  misc_feature: MA Experiment 20000574 PARAMETER Experiment Name: At_100uM_ABA_Mutants__P Parameter: Plant Line Value: CS23 vs. Ler wt
  misc_feature: MA Experiment 20000574 PARAMETER Experiment Name: At_100uM_ABA_Mutants__P Parameter: Timepoint (hr) Value: N/A
  misc_feature: MA Experiment 20000574 PARAMETER Experiment Name: At_100uM_ABA_Mutants__P Parameter: Tissue Value: Whole Plant
  misc_feature: MA Experiment 20000574 PARAMETER Experiment Name: At_100uM_ABA_Mutants__P Parameter: Treatment Value: None
  misc_feature: MA Experiment ID: 20001451 Result: Down-regulated in Transcription
  misc_feature: MA Experiment 20001451 PARAMETER Experiment Name: At_Far-red-induction_P Parameter: Age (day) Value: 7
  misc_feature: MA Experiment 20001451 PARAMETER Experiment Name: At_Far-red-induction_P Parameter: Light Value: Far-red vs. White
  misc_feature: MA Experiment 20001451 PARAMETER Experiment Name: At_Far-red-induction_P Parameter: Organism Value: A. thaliana
  misc_feature: MA Experiment 20001451 PARAMETER Experiment Name: At_Far-red-induction_P Parameter: Plant Line Value: Columbia
  misc_feature: MA Experiment 20001451 PARAMETER Experiment Name: At_Far-red-induction_P Parameter: Timepoint (hr) Value: 24
  misc_feature: MA Experiment 20001451 PARAMETER Experiment Name: At_Far-red-induction_P Parameter: Tissue Value: Whole Plant
  misc_feature: MA Experiment ID: 20001458 Result: Up-regulated in Transcription
  misc_feature: MA Experiment 20001458 PARAMETER Experiment Name: At_50mM_NH4NO3_L-to-H_P Parameter: Age (day) Value: Undefined
  misc_feature: MA Experiment 20001458 PARAMETER Experiment Name: At_50mM_NH4NO3_L-to-H_P Parameter: Organism Value: Undefined
  misc_feature: MA Experiment 20001458 PARAMETER Experiment Name: At_50mM_NH4NO3_L-to-H_P Parameter: Plant Line Value: Undefined
  misc_feature: MA Experiment 20001458 PARAMETER Experiment Name: At_50mM_NH4NO3_L-to-H_P Parameter: Timepoint (hr) Value: 2
  misc_feature: MA Experiment 20001458 PARAMETER Experiment Name: At_50mM_NH4NO3_L-to-H_P Parameter: Tissue Value: Siliques
  misc_feature: MA Experiment 20001458 PARAMETER Experiment Name: At_50mM_NH4NO3_L-to-H_P Parameter: Treatment Value: 50mM NH4NO3 vs. 100mM Manitol
  misc_feature: MA Experiment ID: 20001554 Result: Down-regulated in Transcription
  misc_feature: MA Experiment 20001554 PARAMETER Experiment Name: At_Drought_Soil_Dry_P Parameter: Age (day) Value: 21
  misc_feature: MA Experiment 20001554 PARAMETER Experiment Name: At_Drought_Soil_Dry_P Parameter: Organism Value: A. thaliana
  misc_feature: MA Experiment 20001554 PARAMETER Experiment Name: At_Drought_Soil_Dry_P Parameter: Plant Line Value: WS
  misc_feature: MA Experiment 20001554 PARAMETER Experiment Name: At_Drought_Soil_Dry_P Parameter: Post Timepoint (hr) Value: None
  misc_feature: MA Experiment 20001554 PARAMETER Experiment Name: At_Drought_Soil_Dry_P Parameter: Post-Treatment Value: None
  misc_feature: MA Experiment 20001554 PARAMETER Experiment Name: At_Drought_Soil_Dry_P Parameter: Timepoint (day) Value: 7
  misc_feature: MA Experiment 20001554 PARAMETER Experiment Name: At_Drought_Soil_Dry_P Parameter: Treatment Value: Drought vs. No Drought
  misc_feature: MA Experiment ID: 20001555 Result: Down-regulated in Transcription
  misc_feature: MA Experiment 20001555 PARAMETER Experiment Name: At_Drought_Soil_Dry_P Parameter: Age (day) Value: 24
  misc_feature: MA Experiment 20001555 PARAMETER Experiment Name: At_Drought_Soil_Dry_P Parameter: Organism Value: A. thaliana
  misc_feature: MA Experiment 20001555 PARAMETER Experiment Name: At_Drought_Soil_Dry_P Parameter: Plant Line Value: WS
  misc_feature: MA Experiment 20001555 PARAMETER Experiment Name: At_Drought_Soil_Dry_P Parameter: Post Timepoint (hr) Value: None
  misc_feature: MA Experiment 20001555 PARAMETER Experiment Name: At_Drought_Soil_Dry_P Parameter: Post-Treatment Value: None
  misc_feature: MA Experiment 20001555 PARAMETER Experiment Name: At_Drought_Soil_Dry_P Parameter: Timepoint (day) Value: 10
  misc_feature: MA Experiment 20001555 PARAMETER Experiment Name: At_Drought_Soil_Dry_P Parameter: Treatment Value: Drought vs. No Drought
  misc_feature: MA Experiment ID: 20001556 Result: Down-regulated in Transcription
  misc_feature: MA Experiment 20001556 PARAMETER Experiment Name: At_Drought_Soil_Dry_P Parameter: Age (day) Value: 26
  misc_feature: MA Experiment 20001556 PARAMETER Experiment Name: At_Drought_Soil_Dry_P Parameter: Organism Value: A. thaliana
  misc_feature: MA Experiment 20001556 PARAMETER Experiment Name: At_Drought_Soil_Dry_P Parameter: Plant Line Value: WS
  misc_feature: MA Experiment 20001556 PARAMETER Experiment Name: At_Drought_Soil_Dry_P Parameter: Post Timepoint (hr) Value: None
  misc_feature: MA Experiment 20001556 PARAMETER Experiment Name: At_Drought_Soil_Dry_P Parameter: Post-Treatment Value: None
  misc_feature: MA Experiment 20001556 PARAMETER Experiment Name: At_Drought_Soil_Dry_P Parameter: Timepoint (day) Value: 12
  misc_feature: MA Experiment 20001556 PARAMETER Experiment Name: At_Drought_Soil_Dry_P Parameter: Treatment Value: Drought vs. No Drought
  misc_feature: MA Experiment ID: 20001557 Result: Up-regulated in Transcription
  misc_feature: MA Experiment 20001557 PARAMETER Experiment Name: At_Drought_Soil_Dry_P Parameter: Age (day) Value: 27
  misc_feature: MA Experiment 20001557 PARAMETER Experiment Name: At_Drought_Soil_Dry_P Parameter: Organism Value: A. thaliana
  misc_feature: MA Experiment 20001557 PARAMETER Experiment Name: At_Drought_Soil_Dry_P Parameter: Plant Line Value: WS
  misc_feature: MA Experiment 20001557 PARAMETER Experiment Name: At_Drought_Soil_Dry_P Parameter: Post Timepoint (hr) Value: 3
  misc_feature: MA Experiment 20001557 PARAMETER Experiment Name: At_Drought_Soil_Dry_P Parameter: Post-Treatment Value: Re-Water vs. No Drought
  misc_feature: MA Experiment 20001557 PARAMETER Experiment Name: At_Drought_Soil_Dry_P Parameter: Timepoint (day) Value: 13
  misc_feature: MA Experiment 20001557 PARAMETER Experiment Name: At_Drought_Soil_Dry_P Parameter: Treatment Value: Drought vs. No Drought
  misc_feature: MA Experiment ID: 20001558 Result: Up-regulated in Transcription
  misc_feature: MA Experiment 20001558 PARAMETER Experiment Name: At_Drought_Soil_Dry_P Parameter: Age (day) Value: 27
  misc_feature: MA Experiment 20001558 PARAMETER Experiment Name: At_Drought_Soil_Dry_P Parameter: Organism Value: A. thaliana
  misc_feature: MA Experiment 20001558 PARAMETER Experiment Name: At_Drought_Soil_Dry_P Parameter: Plant Line Value: WS
  misc_feature: MA Experiment 20001558 PARAMETER Experiment Name: At_Drought_Soil_Dry_P Parameter: Post Timepoint (hr) Value: 6
  misc_feature: MA Experiment 20001558 PARAMETER Experiment Name: At_Drought_Soil_Dry_P Parameter: Post-Treatment Value: Re-Water vs. No Drought
  misc_feature: MA Experiment 20001558 PARAMETER Experiment Name: At_Drought_Soil_Dry_P Parameter: Timepoint (day) Value: 13
  misc_feature: MA Experiment 20001558 PARAMETER Experiment Name: At_Drought_Soil_Dry_P Parameter: Treatment Value: Drought vs. No Drought
  misc_feature: MA Experiment ID: 20001560 Result: Down-regulated in Transcription
  misc_feature: MA Experiment 20001560 PARAMETER Experiment Name: At_Drought_Soil_Dry_P Parameter: Age (day) Value: 28
  misc_feature: MA Experiment 20001560 PARAMETER Experiment Name: At_Drought_Soil_Dry_P Parameter: Organism Value: A. thaliana
  misc_feature: MA Experiment 20001560 PARAMETER Experiment Name: At_Drought_Soil_Dry_P Parameter: Plant Line Value: WS
  misc_feature: MA Experiment 20001560 PARAMETER Experiment Name: At_Drought_Soil_Dry_P Parameter: Post Timepoint (hr) Value: None
  misc_feature: MA Experiment 20001560 PARAMETER Experiment Name: At_Drought_Soil_Dry_P Parameter: Post-Treatment Value: None
  misc_feature: MA Experiment 20001560 PARAMETER Experiment Name: At_Drought_Soil_Dry_P Parameter: Timepoint (day) Value: 14
  misc_feature: MA Experiment 20001560 PARAMETER Experiment Name: At_Drought_Soil_Dry_P Parameter: Treatment Value: Drought vs. No Drought
  misc_feature: MA Experiment ID: 20001755 Result: Up-regulated in Transcription
  misc_feature: MA Experiment 20001755 PARAMETER Experiment Name: At_50mM_NH4NO3_L-to-H_P Parameter: Timepoint (hr) Value: 2
  misc_feature: MA Experiment 20001755 PARAMETER Experiment Name: At_50mM_NH4NO3_L-to-H_P Parameter: Tissue Value: Leaf
  misc_feature: MA Experiment 20001755 PARAMETER Experiment Name: At_50mM_NH4NO3_L-to-H_P Parameter: Treatment Value: 50mM NH4NO3 vs 100mM Mannitol
  misc_feature: MA Experiment ID: 20001757 Result: Up-regulated in Transcription
  misc_feature: MA Experiment 20001757 PARAMETER Experiment Name: At_50mM_NH4NO3_L-to-H_P Parameter: Timepoint (hr) Value: 6
  misc_feature: MA Experiment 20001757 PARAMETER Experiment Name: At_50mM_NH4NO3_L-to-H_P Parameter: Tissue Value: Leaf
  misc_feature: MA Experiment 20001757 PARAMETER Experiment Name: At_50mM_NH4NO3_L-to-H_P Parameter: Treatment Value: 50mM NH4NO3 vs 100mM Mannitol
  misc_feature: MA Experiment ID: 20001905 Result: Down-regulated in Transcription
  misc_feature: MA Experiment 20001905 PARAMETER Experiment Name: At_Drought_Reproduction_P Parameter: Age (day) Value: 40
  misc_feature: MA Experiment 20001905 PARAMETER Experiment Name: At_Drought_Reproduction_P Parameter: Organism Value: A. thaliana
  misc_feature: MA Experiment 20001905 PARAMETER Experiment Name: At_Drought_Reproduction_P Parameter: Plant Line Value: WS
  misc_feature: MA Experiment 20001905 PARAMETER Experiment Name: At_Drought_Reproduction_P Parameter: Timepoint (day) Value: 10
  misc_feature: MA Experiment 20001905 PARAMETER Experiment Name: At_Drought_Reproduction_P Parameter: Tissue Value: Rosettes
  misc_feature: MA Experiment 20001905 PARAMETER Experiment Name: At_Drought_Reproduction_P Parameter: Treatment Value: Drought vs. No Drought
aattctaaaccaaacaacagattctcataatcatctcttcttttttcctctttacgaaaagaagaaagatcaaaccttccaagtttacacaaaaagaaaaaagaacgatggctcttgtcaccttcttgtttattgctacccttggagcaatgacgtcacatgtcaatggttacgccggaggaggttgggtcaacgcacacgccacattctacggtggtggtgatgcttccggcacaatgggaggtgcttgtggatacggaaacctatatagccaaggctatggaaccaacacggcggcgctaagcacggctctattcaataatggtctaagttgtggtgcttgcttcgagataagatgtcaaaacgatggaaaatggtgtcttcctggctcaattgtcgtcacagccacaaacttttgccctcctaacaacgccttaccgaacaacgcaggaggttggtgtaaccctcctcagcagcattttgatctctctcagcccgtatttcaacgcatcgctcaatacagagccggcattgtccccgtcgcttaccgaagagtgccgtgcgtgagaagaggaggaataaggtttacgataaacggacactcttacttcaacctagttctgatcactaacgtcggaggagccggagatgttcactcagcgatggttaaaggttcaagaactggatggcaagcgatgtcaagaaactggggacagaactggcagagtaactcttaccttaacggacaatctctctcattcaaagttacaacaagcgatggccaaaccattgtctctaacaacgttgctaacgcaggctggtctttcggccagaccttcacaggtgcgcagctacgttaggaagagtgattcggtgaaaattcatctcattgatcgtgtggtattgacgtgttgtagtagaagcagttagagagaggggcatgatagtaatttggtcctttctttcaattgaggttaacctaaaaagaagtggtgcttcgagtgcttgattttgcacgaggccttgatgatgtcatcttttgggaaccttttcttatctttcttcatttttattggtaaggttttatgttatactgatgcagaggtggtattgagttgaagtaccacccgctagtagtagtagtagtctctcgtgtcatttgtatcccttctcgaagcgagagggagagttttagattttattaatctcgttaaagtcatttgtatgttgtaaatttttcaatttctacaagtaagaaatattggagatttgtttgttatatactttgtgtaataaattatattc

SEQ ID NO: 24990 - protein, 250 aa, Arabidopsis thaliana
  peptide (1)..(250): Ceres Seq. ID no. 12394694
  misc_feature (158)..(235): Pfam Name: Pollen allergen Pfam Description: Pollen allergen
  misc_feature (1)..(250): Homolog of NCBI NO: 21553381 NR Description: alpha-expansin 10 precursor (At-EXP10) (AtEx10)
  misc_feature (1)..(250): Homolog of NCBI NO: 10180019 NR Description: expansin 2 [Prunus avium]
  misc_feature (1)..(250): Homolog of NCBI NO: 29466641 NR Description: expansin [Prunus persica]
  misc_feature (1)..(250): Homolog of NCBI NO: 17484121 NR Description: alpha-expansin [Prunus cerasus]
  misc_feature (1)..(250): Homolog of NCBI NO: 29467507 NR Description: expansin [Pyrus communis]
  misc_feature (1)..(250): Homolog of NCBI NO: 15223347 NR Description: expansin, putative
  misc_feature (1)..(250): Homolog of NCBI NO: 38046730 NR Description: alpha-expansin 3 [Populus tremula x Populus
  misc_feature (19)..(250): Homolog of NCBI NO: 11281293 NR Description: expansin EXP1 [imported] - Arabidopsis thaliana
  misc_feature (1)..(250): Homolog of NCBI NO: 15222356 NR Description: expansin (At-EXP1)
  misc_feature (1)..(250): Homolog of NCBI NO: 30697882 NR Description: expansin, putative (EXP1) [Arabidopsis thaliana]
MALVTFLFIATLGAMTSHVNGYAGGGWVNAHATFYGGGDASGTMGGACGYGNLYSQGYGTNTAALSTALFNNGLSCGACFEIRCQNDGKWCLPGSIVVTATNFCPPNNALPNNAGGWCNPPQQHFDLSQPVFQRIAQYRAGIVPVAYRRVPCVRRGGIRFTINGHSYFNLVLITNVGGAGDVHSAMVKGSRTGWQAMSRNWGQNWQSNSYLNGQSLSFKVTTSDGQTIVSNNVANAGWSFGQTFTGAQLR

SEQ ID NO: 24991 - protein, 236 aa, Arabidopsis thaliana
  peptide (1)..(236): Ceres Seq. ID no. 12394695
  misc_feature (144)..(221): Pfam Name: Pollen allergen Pfam Description: Pollen allergen
  misc_feature (1)..(236): Homolog of NCBI NO: 21553381 NR Description: alpha-expansin 10 precursor (At-EXP10) (AtEx10)
  misc_feature (1)..(236): Homolog of NCBI NO: 10180019 NR Description: expansin 2 [Prunus avium]
  misc_feature (1)..(236): Homolog of NCBI NO: 29466641 NR Description: expansin [Prunus persica]
  misc_feature (1)..(236): Homolog of NCBI NO: 17484121 NR Description: alpha-expansin [Prunus cerasus]
  misc_feature (1)..(236): Homolog of NCBI NO: 29467507 NR Description: expansin [Pyrus communis]
  misc_feature (1)..(236): Homolog of NCBI NO: 15223347 NR Description: expansin, putative
  misc_feature (1)..(236): Homolog of NCBI NO: 38046730 NR Description: alpha-expansin 3 [Populus tremula x Populus
  misc_feature (5)..(236): Homolog of NCBI NO: 11281293 NR Description: expansin EXP1 [imported] - Arabidopsis thaliana
  misc_feature (1)..(236): Homolog of NCBI NO: 15222356 NR Description: expansin (At-EXP1)
  misc_feature (1)..(236): Homolog of NCBI NO: 30697882 NR Description: expansin, putative (EXP1) [Arabidopsis thaliana]
MTSHVNGYAGGGWVNAHATFYGGGDASGTMGGACGYGNLYSQGYGTNTAALSTALFNNGLSCGACFEIRCQNDGKWCLPGSIVVTATNFCPPNNALPNNAGGWCNPPQQHFDLSQPVFQRIAQYRAGIVPVAYRRVPCVRRGGIRFTINGHSYFNLVLITNVGGAGDVHSAMVKGSRTGWQAMSRNWGQNWQSNSYLNGQSLSFKVTTSDGQTIVSNNVANAGWSFGQTFTGAQLR

SEQ ID NO: 24992 - protein, 207 aa, Arabidopsis thaliana
  peptide (1)..(207): Ceres Seq. ID no. 12394696
  misc_feature (115)..(192): Pfam Name: Pollen allergen Pfam Description: Pollen allergen
  misc_feature (1)..(207): Homolog of NCBI NO: 21553381 NR Description: alpha-expansin 10 precursor (At-EXP10) (AtEx10)
  misc_feature (1)..(207): Homolog of NCBI NO: 10180019 NR Description: expansin 2 [Prunus avium]
  misc_feature (1)..(207): Homolog of NCBI NO: 29466641 NR Description: expansin [Prunus persica]
  misc_feature (1)..(207): Homolog of NCBI NO: 17484121 NR Description: alpha-expansin [Prunus cerasus]
  misc_feature (1)..(207): Homolog of NCBI NO: 29467507 NR Description: expansin [Pyrus communis]
  misc_feature (1)..(207): Homolog of NCBI NO: 15223347 NR Description: expansin, putative
  misc_feature (1)..(207): Homolog of NCBI NO: 38046730 NR Description: alpha-expansin 3 [Populus tremula x Populus
  misc_feature (1)..(207): Homolog of NCBI NO: 11281293 NR Description: expansin EXP1 [imported] - Arabidopsis thaliana
  misc_feature (1)..(207): Homolog of NCBI NO: 15222356 NR Description: expansin (At-EXP1)
  misc_feature (1)..(207): Homolog of NCBI NO: 30697882 NR Description: expansin, putative (EXP1) [Arabidopsis thaliana]
MGGACGYGNLYSQGYGTNTAALSTALFNNGLSCGACFEIRCQNDGKWCLPGSIVVTATNFCPPNNALPNNAGGWCNPPQQHFDLSQPVFQRIAQYRAGIVPVAYRRVPCVRRGGIRFTINGHSYFNLVLITNVGGAGDVHSAMVKGSRTGWQAMSRNWGQNWQSNSYLNGQSLSFKVTTSDGQTIVSNNVANAGWSFGQTFTGAQLR

SEQ ID NO: 24993 - DNA, 1209 bp, Arabidopsis thaliana
  misc_feature (1)..(1209): Ceres Seq. ID no. 12370368
  misc_feature: MA Experiment ID: 108434 Result: Down-regulated in Transcription
  misc_feature: MA Experiment 108434 PARAMETER Experiment Name: At_Root_Tips_cDNA_P Parameter: Tissue Value: Root Tips
  misc_feature: MA Experiment ID: 108462 Result: Up-regulated in Transcription
  misc_feature: MA Experiment 108462 PARAMETER Experiment Name: At_Germinating_Seeds_cDNA_P Parameter: Age (day) Value: 2 vs. 0
  misc_feature: MA Experiment 108462 PARAMETER Experiment Name: At_Germinating_Seeds_cDNA_P Parameter: Tissue Value: Germinating Seeds
  misc_feature: MA Experiment ID: 108463 Result: Up-regulated in Transcription
  misc_feature: MA Experiment 108463 PARAMETER Experiment Name: At_Germinating_Seeds_cDNA_P Parameter: Age (day) Value: 3 vs. 0
  misc_feature: MA Experiment 108463 PARAMETER Experiment Name: At_Germinating_Seeds_cDNA_P Parameter: Tissue Value: Germinating Seeds
  misc_feature: MA Experiment ID: 108464 Result: Up-regulated in Transcription
  misc_feature: MA Experiment 108464 PARAMETER Experiment Name: At_Germinating_Seeds_cDNA_P Parameter: Age (day) Value: 4 vs. 0
  misc_feature: MA Experiment 108464 PARAMETER Experiment Name: At_Germinating_Seeds_cDNA_P Parameter: Tissue Value: Germinating Seeds
  misc_feature: MA Experiment ID: 108488 Result: Down-regulated in Transcription
  misc_feature: MA Experiment ID: 108561 Result: Up-regulated in Transcription
  misc_feature: MA Experiment 108561 PARAMETER Experiment Name: At_100uM_ABA_cDNA_P Parameter: Timepoint (hr) Value: 6
  misc_feature: MA Experiment 108561 PARAMETER Experiment Name: At_100uM_ABA_cDNA_P Parameter: Tissue Value: Aerial
  misc_feature: MA Experiment 108561 PARAMETER Experiment Name: At_100uM_ABA_cDNA_P Parameter: Treatment Value: 100uM ABA vs. No Treatment
  misc_feature: MA Experiment ID: 108572 Result: Up-regulated in Transcription
  misc_feature: MA Experiment 108572 PARAMETER Experiment Name: At_Drought_cDNA_P Parameter: Timepoint (hr) Value: 1
  misc_feature: MA Experiment 108572 PARAMETER Experiment Name: At_Drought_cDNA_P Parameter: Tissue Value: Aerial
  misc_feature: MA Experiment 108572 PARAMETER Experiment Name: At_Drought_cDNA_P Parameter: Treatment Value: Drought vs. No Drought
  misc_feature: MA Experiment ID: 108573 Result: Up-regulated in Transcription
  misc_feature: MA Experiment 108573 PARAMETER Experiment Name: At_Drought_cDNA_P Parameter: Timepoint (hr) Value: 6
  misc_feature: MA Experiment 108573 PARAMETER Experiment Name: At_Drought_cDNA_P Parameter: Tissue Value: Aerial
  misc_feature: MA Experiment 108573 PARAMETER Experiment Name: At_Drought_cDNA_P Parameter: Treatment Value: Drought vs. No Drought
  misc_feature: MA Experiment ID: 108585 Result: Up-regulated in Transcription
  misc_feature: MA Experiment 108585 PARAMETER Experiment Name: At_5mM_NaNP_cDNA_P Parameter: Timepoint (hr) Value: 6
  misc_feature: MA Experiment 108585 PARAMETER Experiment Name: At_5mM_NaNP_cDNA_P Parameter: Tissue Value: Aerial
  misc_feature: MA Experiment 108585 PARAMETER Experiment Name: At_5mM_NaNP_cDNA_P Parameter: Treatment Value: null
  misc_feature: MA Experiment ID: 108594 Result: Down-regulated in Transcription
  misc_feature: MA Experiment 108594 PARAMETER Experiment Name: At_Ler-rhl_Root_cDNA_P Parameter: Plant Line Value: null
  misc_feature: MA Experiment ID: 108605 Result: Up-regulated in Transcription
  misc_feature: MA Experiment 108605 PARAMETER Experiment Name: At_100uM_ABA_cDNA_P Parameter: Timepoint (hr) Value: 6
  misc_feature: MA Experiment 108605 PARAMETER Experiment Name: At_100uM_ABA_cDNA_P Parameter: Tissue Value: Aerial
  misc_feature: MA Experiment 108605 PARAMETER Experiment Name: At_100uM_ABA_cDNA_P Parameter: Treatment Value: 100uM ABA vs. No Treatment
  misc_feature: MA Experiment ID: 108607 Result: Up-regulated in Transcription
  misc_feature: MA Experiment 108607 PARAMETER Experiment Name: At_100uM_ABA_cDNA_P Parameter: Timepoint (hr) Value: 4
  misc_feature: MA Experiment 108607 PARAMETER Experiment Name: At_100uM_ABA_cDNA_P Parameter: Tissue Value: Aerial
  misc_feature: MA Experiment 108607 PARAMETER Experiment Name: At_100uM_ABA_cDNA_P Parameter: Treatment Value: 100uM ABA vs. No Treatment
  misc_feature: MA Experiment ID: 108609 Result: Up-regulated in Transcription
  misc_feature: MA Experiment 108609 PARAMETER Experiment Name: At_100uM_ABA_cDNA_P Parameter: Timepoint (hr) Value: 24
  misc_feature: MA Experiment 108609 PARAMETER Experiment Name: At_100uM_ABA_cDNA_P Parameter: Tissue Value: Aerial
  misc_feature: MA Experiment 108609 PARAMETER Experiment Name: At_100uM_ABA_cDNA_P Parameter: Treatment Value: 100uM ABA vs. No Treatment
  misc_feature: MA Experiment ID: 108668 Result: Up-regulated in Transcription
  misc_feature: MA Experiment 108668 PARAMETER Experiment Name: At_2mM_SA_cDNA_P Parameter: Plant Line Value: WS
  misc_feature: MA Experiment 108668 PARAMETER Experiment Name: At_2mM_SA_cDNA_P Parameter: Timepoint (hr) Value: 6
  misc_feature: MA Experiment 108668 PARAMETER Experiment Name: At_2mM_SA_cDNA_P Parameter: Treatment Value: 2mM SA vs. No Treatment
  misc_feature: MA Experiment ID: 20000069 Result: Up-regulated in Transcription
  misc_feature: MA Experiment 20000069 PARAMETER Experiment Name: At_100uM_ABA_Mutants_cDNA_P Parameter: Plant Line Value: CS23
  misc_feature: MA Experiment 20000069 PARAMETER Experiment Name: At_100uM_ABA_Mutants_cDNA_P Parameter: Timepoint (hr) Value: 6
  misc_feature: MA Experiment 20000069 PARAMETER Experiment Name: At_100uM_ABA_Mutants_cDNA_P Parameter: Tissue Value: Aerial
  misc_feature: MA Experiment 20000069 PARAMETER Experiment Name: At_100uM_ABA_Mutants_cDNA_P Parameter: Treatment Value: 100uM ABA vs. No Treatment
  misc_feature: MA Experiment ID: 20000070 Result: Up-regulated in Transcription
  misc_feature: MA Experiment 20000070 PARAMETER Experiment Name: At_100uM_ABA_Mutants_cDNA_P Parameter: Plant Line Value: CS24
  misc_feature: MA Experiment 20000070 PARAMETER Experiment Name: At_100uM_ABA_Mutants_cDNA_P Parameter: Timepoint (hr) Value: 6
  misc_feature: MA Experiment 20000070 PARAMETER Experiment Name: At_100uM_ABA_Mutants_cDNA_P Parameter: Tissue Value: Aerial
  misc_feature: MA Experiment 20000070 PARAMETER Experiment Name: At_100uM_ABA_Mutants_cDNA_P Parameter: Treatment Value: 100uM ABA vs. No Treatment
  misc_feature: MA Experiment ID: 20000071 Result: Up-regulated in Transcription
  misc_feature: MA Experiment 20000071 PARAMETER Experiment Name: At_100uM_ABA_Mutants_cDNA_P Parameter: Plant Line Value: CS8104
  misc_feature: MA Experiment 20000071 PARAMETER Experiment Name: At_100uM_ABA_Mutants_cDNA_P Parameter: Timepoint (hr) Value: 6
  misc_feature: MA Experiment 20000071 PARAMETER Experiment Name: At_100uM_ABA_Mutants_cDNA_P Parameter: Tissue Value: Aerial
  misc_feature: MA Experiment 20000071 PARAMETER Experiment Name: At_100uM_ABA_Mutants_cDNA_P Parameter: Treatment Value: 100uM ABA vs. No Treatment
  misc_feature: MA Experiment ID: 20000072 Result: Up-regulated in Transcription
  misc_feature: MA Experiment 20000072 PARAMETER Experiment Name: At_100uM_ABA_Mutants_cDNA_P Parameter: Plant Line Value: CS8105
  misc_feature: MA Experiment 20000072 PARAMETER Experiment Name: At_100uM_ABA_Mutants_cDNA_P Parameter: Timepoint (hr) Value: 6
  misc_feature: MA Experiment 20000072 PARAMETER Experiment Name: At_100uM_ABA_Mutants_cDNA_P Parameter: Tissue Value: Aerial
  misc_feature: MA Experiment 20000072 PARAMETER Experiment Name: At_100uM_ABA_Mutants_cDNA_P Parameter: Treatment Value: 100uM ABA vs. No Treatment
  misc_feature: MA Experiment ID: 20000086 Result: Up-regulated in Transcription
  misc_feature: MA Experiment 20000086 PARAMETER Experiment Name: At_100uM_ABA_Mutants_cDNA_P Parameter: Plant Line Value: CS22
  misc_feature: MA Experiment 20000086 PARAMETER Experiment Name: At_100uM_ABA_Mutants_cDNA_P Parameter: Timepoint (hr) Value: 6
  misc_feature: MA Experiment 20000086 PARAMETER Experiment Name: At_100uM_ABA_Mutants_cDNA_P Parameter: Tissue Value: Aerial
  misc_feature: MA Experiment 20000086 PARAMETER Experiment Name: At_100uM_ABA_Mutants_cDNA_P Parameter: Treatment Value: 100uM ABA vs. No Treatment
  misc_feature: MA Experiment ID: 20000087 Result: Up-regulated in Transcription
  misc_feature: MA Experiment 20000087 PARAMETER Experiment Name: At_100uM_ABA_Mutants_cDNA_P Parameter: Plant Line Value: WS
  misc_feature: MA Experiment 20000087 PARAMETER Experiment Name: At_100uM_ABA_Mutants_cDNA_P Parameter: Timepoint (hr) Value: 6
  misc_feature: MA Experiment 20000087 PARAMETER Experiment Name: At_100uM_ABA_Mutants_cDNA_P Parameter: Tissue Value: Aerial
  misc_feature: MA Experiment 20000087 PARAMETER Experiment Name: At_100uM_ABA_Mutants_cDNA_P Parameter: Treatment Value: 100uM ABA vs. No Treatment
  misc_feature: MA Experiment ID: 20000088 Result: Up-regulated in Transcription
  misc_feature: MA Experiment 20000088 PARAMETER Experiment Name: At_100uM_ABA_Mutants_cDNA_P Parameter: Plant Line Value: Landsberg
  misc_feature: MA Experiment 20000088 PARAMETER Experiment Name: At_100uM_ABA_Mutants_cDNA_P Parameter: Timepoint (hr) Value: 6
  misc_feature: MA Experiment 20000088 PARAMETER Experiment Name: At_100uM_ABA_Mutants_cDNA_P Parameter: Tissue Value: Aerial
  misc_feature: MA Experiment 20000088 PARAMETER Experiment Name: At_100uM_ABA_Mutants_cDNA_P Parameter: Treatment Value: 100uM ABA vs. No Treatment
  misc_feature: MA Experiment ID: 20000117 Result: Up-regulated in Transcription
  misc_feature: MA Experiment 20000117 PARAMETER Experiment Name: At_100uM_ABA_Mutants_cDNA_P Parameter: Plant Line Value: Columbia
  misc_feature: MA Experiment 20000117 PARAMETER Experiment Name: At_100uM_ABA_Mutants_cDNA_P Parameter: Timepoint (hr) Value: 6
  misc_feature: MA Experiment 20000117 PARAMETER Experiment Name: At_100uM_ABA_Mutants_cDNA_P Parameter: Tissue Value: Aerial
  misc_feature: MA Experiment 20000117 PARAMETER Experiment Name: At_100uM_ABA_Mutants_cDNA_P Parameter: Treatment Value: 100uM ABA vs. No Treatment
  misc_feature: MA Experiment ID: 20000169 Result: Up-regulated in Transcription
  misc_feature: MA Experiment 20000169 PARAMETER Experiment Name: At_100uM_ABA_P Parameter: Age (day) Value: 14
  misc_feature: MA Experiment 20000169 PARAMETER Experiment Name: At_100uM_ABA_P Parameter: Organism Value: A. thaliana
  misc_feature: MA Experiment 20000169 PARAMETER Experiment Name: At_100uM_ABA_P Parameter: Plant Line Value: WS
  misc_feature: MA Experiment 20000169 PARAMETER Experiment Name: At_100uM_ABA_P Parameter: Timepoint (hr) Value: 6
  misc_feature: MA Experiment 20000169 PARAMETER Experiment Name: At_100uM_ABA_P Parameter: Tissue Value: Aerial
  misc_feature: MA Experiment 20000169 PARAMETER Experiment Name: At_100uM_ABA_P Parameter: Treatment Value: 100uM ABA vs. No Treatment
  misc_feature: MA Experiment ID: 20000436 Result: Up-regulated in Transcription
  misc_feature: MA Experiment 20000436 PARAMETER Experiment Name: At_Drought_P Parameter: Age (day) Value: 7
  misc_feature: MA Experiment 20000436 PARAMETER Experiment Name: At_Drought_P Parameter: Organism Value: A. thaliana
  misc_feature: MA Experiment 20000436 PARAMETER Experiment Name: At_Drought_P Parameter: Plant Line Value: WS
  misc_feature: MA Experiment 20000436 PARAMETER Experiment Name: At_Drought_P Parameter: Timepoint (hr) Value: 12
  misc_feature: MA Experiment 20000436 PARAMETER Experiment Name: At_Drought_P Parameter: Tissue Value: Whole Plant
  misc_feature: MA Experiment 20000436 PARAMETER Experiment Name: At_Drought_P Parameter: Treatment Value: Drought vs. No Drought
  misc_feature: MA Experiment ID: 20000437 Result: Up-regulated in Transcription
  misc_feature: MA Experiment 20000437 PARAMETER Experiment Name: At_Drought_P Parameter: Age (day) Value: 8
  misc_feature: MA Experiment 20000437 PARAMETER Experiment Name: At_Drought_P Parameter: Organism Value: A. thaliana
  misc_feature: MA Experiment 20000437 PARAMETER Experiment Name: At_Drought_P Parameter: Plant Line Value: WS
  misc_feature: MA Experiment 20000437 PARAMETER Experiment Name: At_Drought_P Parameter: Timepoint (hr) Value: 24
  misc_feature: MA Experiment 20000437 PARAMETER Experiment Name: At_Drought_P Parameter: Tissue Value: Whole Plant
  misc_feature: MA Experiment 20000437 PARAMETER Experiment Name: At_Drought_P Parameter: Treatment Value: Drought vs. No Drought
  misc_feature: MA Experiment ID: 20000439 Result: Up-regulated in Transcription
  misc_feature: MA Experiment 20000439 PARAMETER Experiment Name: At_Roots__P Parameter: Age (day) Value: 14 vs. 21
  misc_feature: MA Experiment 20000439 PARAMETER Experiment Name: At_Roots__P Parameter: Organism Value: A. thaliana
  misc_feature: MA Experiment 20000439 PARAMETER Experiment Name: At_Roots__P Parameter: Tissue Value: Roots vs. Whole Plant
  misc_feature: MA Experiment ID: 20000453 Result: Up-regulated in Transcription
  misc_feature: MA Experiment 20000453 PARAMETER Experiment Name: At_100uM_ABA_P Parameter: Age (day) Value: 15
  misc_feature: MA Experiment 20000453 PARAMETER Experiment Name: At_100uM_ABA_P Parameter: Organism Value: A. thaliana
  misc_feature: MA Experiment 20000453 PARAMETER Experiment Name: At_100uM_ABA_P Parameter: Plant Line Value: WS
  misc_feature: MA Experiment 20000453 PARAMETER Experiment Name: At_100uM_ABA_P Parameter: Timepoint (hr) Value: 24
  misc_feature: MA Experiment 20000453 PARAMETER Experiment Name: At_100uM_ABA_P Parameter: Tissue Value: Aerial
  misc_feature: MA Experiment 20000453 PARAMETER Experiment Name: At_100uM_ABA_P Parameter: Treatment Value: 100uM ABA vs. No Treatment
  misc_feature: MA Experiment ID: 20000794 Result: Up-regulated in Transcription
  misc_feature: MA Experiment 20000794 PARAMETER Experiment Name: At_Petals_P Parameter: Age (day) Value: 23-25 days
  misc_feature: MA Experiment 20000794 PARAMETER Experiment Name: At_Petals_P Parameter: Plant Line Value: WS
  misc_feature: MA Experiment 20000794 PARAMETER Experiment Name: At_Petals_P Parameter: Tissue Value: Petals vs. Whole plant
  misc_feature: MA Experiment ID: 20001248 Result: Down-regulated in Transcription
  misc_feature: MA Experiment 20001248 PARAMETER Experiment Name: At_Far-red-induction_P Parameter: Age (day) Value: 7
  misc_feature: MA Experiment 20001248 PARAMETER Experiment Name: At_Far-red-induction_P Parameter: Light Value: Far-red vs. White
  misc_feature: MA Experiment 20001248 PARAMETER Experiment Name: At_Far-red-induction_P Parameter: Organism Value: A. thaliana
  misc_feature: MA Experiment 20001248 PARAMETER Experiment Name: At_Far-red-induction_P Parameter: Plant Line Value: Columbia
  misc_feature: MA Experiment 20001248 PARAMETER Experiment Name: At_Far-red-induction_P Parameter: Timepoint (hr) Value: 4
  misc_feature: MA Experiment 20001248 PARAMETER Experiment Name: At_Far-red-induction_P Parameter: Tissue Value: Whole Plant
  misc_feature: MA Experiment ID: 20001554 Result: Up-regulated in Transcription
  misc_feature: MA Experiment 20001554 PARAMETER Experiment Name: At_Drought_Soil_Dry_P Parameter: Age (day) Value: 21
  misc_feature: MA Experiment 20001554 PARAMETER Experiment Name: At_Drought_Soil_Dry_P Parameter: Organism Value: A. thaliana
  misc_feature: MA Experiment 20001554 PARAMETER Experiment Name: At_Drought_Soil_Dry_P Parameter: Plant Line Value: WS
  misc_feature: MA Experiment 20001554 PARAMETER Experiment Name: At_Drought_Soil_Dry_P Parameter: Post Timepoint (hr) Value: None
  misc_feature: MA Experiment 20001554 PARAMETER Experiment Name: At_Drought_Soil_Dry_P Parameter: Post-Treatment Value: None
  misc_feature: MA Experiment 20001554 PARAMETER Experiment Name: At_Drought_Soil_Dry_P Parameter: Timepoint (day) Value: 7
  misc_feature: MA Experiment 20001554 PARAMETER Experiment Name: At_Drought_Soil_Dry_P Parameter: Treatment Value: Drought vs. No Drought
  misc_feature: MA Experiment ID: 20001559 Result: Up-regulated in Transcription
  misc_feature: MA Experiment 20001559 PARAMETER Experiment Name: At_Drought_Soil_Dry_P Parameter: Age (day) Value: 28
  misc_feature: MA Experiment 20001559 PARAMETER Experiment Name: At_Drought_Soil_Dry_P Parameter: Organism Value: A. thaliana
  misc_feature: MA Experiment 20001559 PARAMETER Experiment Name: At_Drought_Soil_Dry_P Parameter: Plant Line Value: WS
  misc_feature: MA Experiment 20001559 PARAMETER Experiment Name: At_Drought_Soil_Dry_P Parameter: Post Timepoint (hr) Value: 29
  misc_feature: MA Experiment 20001559 PARAMETER Experiment Name: At_Drought_Soil_Dry_P Parameter: Post-Treatment Value: Re-Water vs. No Drought
  misc_feature: MA Experiment 20001559 PARAMETER Experiment Name: At_Drought_Soil_Dry_P Parameter: Timepoint (day) Value: 14
  misc_feature: MA Experiment 20001559 PARAMETER Experiment Name: At_Drought_Soil_Dry_P Parameter: Treatment Value: Drought vs. No Drought
  misc_feature: MA Experiment ID: 20001757 Result: Down-regulated in Transcription
  misc_feature: MA Experiment 20001757 PARAMETER Experiment Name: At_50mM_NH4NO3_L-to-H_P Parameter: Timepoint (hr) Value: 6
  misc_feature: MA Experiment 20001757 PARAMETER Experiment Name: At_50mM_NH4NO3_L-to-H_P Parameter: Tissue Value: Leaf
  misc_feature: MA Experiment 20001757 PARAMETER Experiment Name: At_50mM_NH4NO3_L-to-H_P Parameter: Treatment Value: 50mM NH4NO3 vs 100mM Mannitol
  misc_feature: MA Experiment ID: 20001904 Result: Up-regulated in Transcription
  misc_feature: MA Experiment 20001904 PARAMETER Experiment Name: At_Drought_Reproduction_P Parameter: Age (day) Value: 37
  misc_feature: MA Experiment 20001904 PARAMETER Experiment Name: At_Drought_Reproduction_P Parameter: Organism Value: A. thaliana
  misc_feature: MA Experiment 20001904 PARAMETER Experiment Name: At_Drought_Reproduction_P Parameter: Plant Line Value: WS
  misc_feature: MA Experiment 20001904 PARAMETER Experiment Name: At_Drought_Reproduction_P Parameter: Timepoint (day) Value: 7
  misc_feature: MA Experiment 20001904 PARAMETER Experiment Name: At_Drought_Reproduction_P Parameter: Tissue Value: Rosettes
  misc_feature: MA Experiment 20001904 PARAMETER Experiment Name: At_Drought_Reproduction_P Parameter: Treatment Value: Drought vs. No Drought
atcatcgacaaaacataaatactaatggagcaccaccaccagcatcaccgtcaccaccaacgcgacgacggagaagacgatcgtcaatcctttggagtaccaccgccacacgtcgatgctccgccacaacctcatggtctttaccagtcacagcctcattttgatccttacgcgcctactcctcaagctccggcgccttaccgatcagaaactcaattcgaaccccacgcgcctccgccttaccgatcagagccttactttgaaactccggcaccaccgccttcatttggtcatgtgagtcatgttggtcaccaatcacccaacgaatcttacccaccggaacaccaccgttacggaggttatcaacagccgtctaattccttactggaaagtcatggagatcacagtggagtcacgcacgtggctcaccatagctcaaatcagccccaatcgtcttctggtgtctaccacaagcctgatgagaatcgtctacctgataatcttgctggactcgccggaagagcaacggtgaaggtgtattccaaggcggagcctaactataatttgacgatcagagatggtaaggttattctcgccccagcggatccatctgatgaagcacagcattggtacaaagacgagaagtatagtactaaagtgaaggacgcagacggtcatccttgttttgctcttgtaaacaaagctactggtgaagcaatgaagcattctgtgggagctactcatcccgtgcatctgattcgatatgtgcctgataagcttgacgagtcagtactatggacagagagcaaggattttggcgatggatatcgcacaataagaatggtaaacaatacgaggctaaacgtggatgcatatcatggtgacagcaaatctggtggtgtacgtgatggcacgactatcgtcctctgggactggaacaaaggcgacaaccagctctggaagatctttcctttctgaaaattggcgtctggagtggtaaaaagttcctttgtgtgtgctgtatgaataagaaagaaacaaaactcagatttattcattgtttgtgtcttgtaaagacttgagtttgtgctgttggcatctgtaatctatcttacttgtattccaagtatgtttttacagatacattacatacactgtctatatgtgtatacttttttcctaatctattttgagatctttctttttccc

SEQ ID NO: 24994 - protein, 317 aa, Arabidopsis thaliana
  peptide (1)..(317): Ceres Seq. ID no. 12370369
  misc_feature (269)..(317): Pfam Name: QXW lectin repeat Pfam Description: QXW lectin repeat
  misc_feature (168)..(317): Homolog of NCBI NO: 34394517 NR Description: r40g2 protein [Oryza sativa (japonica
  misc_feature (168)..(317): Homolog of NCBI NO: 34902150 NR Description: Putative r40c1 protein - rice
  misc_feature (129)..(317): Homolog of NCBI NO: 34902150 NR Description: Putative r40c1 protein - rice
  misc_feature (129)..(317): Homolog of NCBI NO: 7489571 NR Description: r40c1 protein - rice
  misc_feature (170)..(317): Homolog of NCBI NO: 34394517 NR Description: r40g2 protein [Oryza sativa (japonica
  misc_feature (170)..(317): Homolog of NCBI NO: 7489572 NR Description: r40g2 protein - rice (fragment)
  misc_feature (163)..(317): Homolog of NCBI NO: 7489573 NR Description: r40g3 protein - rice
  misc_feature (82)..(317): Homolog of NCBI NO: 34894060 NR Description: putative r40c1 protein [Oryza sativa (japonica
  misc_feature (1)..(317): Homolog of NCBI NO: 18404934 NR Description: expressed protein
  misc_feature (1)..(317): Homolog of NCBI NO: 25408635 NR Description: hypothetical protein At2g39050 [imported] -
MEHHHQHHRHHQRDDGEDDRQSFGVPPPHVDAPPQPHGLYQSQPHFDPYAPTPQAPAPYRSETQFEPHAPPPYRSEPYFETPAPPPSFGHVSHVGHQSPNESYPPEHHRYGGYQQPSNSLLESHGDHSGVTHVAHHSSNQPQSSSGVYHKPDENRLPDNLAGLAGRATVKVYSKAEPNYNLTIRDGKVILAPADPSDEAQHWYKDEKYSTKVKDADGHPCFALVNKATGEAMKHSVGATHPVHLIRYVPDKLDESVLWTESKDFGDGYRTIRMVNNTRLNVDAYHGDSKSGGVRDGTTIVLWDWNKGDNQLWKIFPF

SEQ ID NO: 24995 - DNA, 850 bp, Arabidopsis thaliana
  misc_feature (1)..(850): Ceres Seq. ID no. 12335821
  misc_feature: MA Experiment ID: 108488 Result: Down-regulated in Transcription
  misc_feature: MA Experiment ID: 108668 Result: Up-regulated in Transcription
  misc_feature: MA Experiment 108668 PARAMETER Experiment Name: At_2mM_SA_cDNA_P Parameter: Plant Line Value: WS
  misc_feature: MA Experiment 108668 PARAMETER Experiment Name: At_2mM_SA_cDNA_P Parameter: Timepoint (hr) Value: 6
  misc_feature: MA Experiment 108668 PARAMETER Experiment Name: At_2mM_SA_cDNA_P Parameter: Treatment Value: 2mM SA vs. No Treatment
  misc_feature: MA Experiment ID: 20000090 Result: Up-regulated in Transcription
  misc_feature: MA Experiment ID: 20000182 Result: Up-regulated in Transcription
  misc_feature: MA Experiment 20000182 PARAMETER Experiment Name: At_2mM_SA_P Parameter: Age (day) Value: 14
  misc_feature: MA Experiment 20000182 PARAMETER Experiment Name: At_2mM_SA_P Parameter: Organism Value: A. thaliana
  misc_feature: MA Experiment 20000182 PARAMETER Experiment Name: At_2mM_SA_P Parameter: Plant Line Value: WS
  misc_feature: MA Experiment 20000182 PARAMETER Experiment Name: At_2mM_SA_P Parameter: Timepoint (hr) Value: 6
  misc_feature: MA Experiment 20000182 PARAMETER Experiment Name: At_2mM_SA_P Parameter: Tissue Value: Aerial
  misc_feature: MA Experiment 20000182 PARAMETER Experiment Name: At_2mM_SA_P Parameter: Treatment Value: 2mM SA vs. No Treatment
  misc_feature: MA Experiment ID: 20000224 Result: Down-regulated in Transcription
  misc_feature: MA Experiment ID: 20001451 Result: Up-regulated in Transcription
  misc_feature: MA Experiment 20001451 PARAMETER Experiment Name: At_Far-red-induction_P Parameter: Age (day) Value: 7
  misc_feature: MA Experiment 20001451 PARAMETER Experiment Name: At_Far-red-induction_P Parameter: Light Value: Far-red vs. White
  misc_feature: MA Experiment 20001451 PARAMETER Experiment Name: At_Far-red-induction_P Parameter: Organism Value: A. thaliana
  misc_feature: MA Experiment 20001451 PARAMETER Experiment Name: At_Far-red-induction_P Parameter: Plant Line Value: Columbia
  misc_feature: MA Experiment 20001451 PARAMETER Experiment Name: At_Far-red-induction_P Parameter: Timepoint (hr) Value: 24
  misc_feature: MA Experiment 20001451 PARAMETER Experiment Name: At_Far-red-induction_P Parameter: Tissue Value: Whole Plant
accgattcattagaaatccatccctctcactgtcaaaacccgagaagcagaaaaaagcaaaaaacagatttcgaagtttcgacgcctctctattcttcgatctctttcatatttgaatcgttcaccttcttgccgatcttcggagtatattacaaggttcttaacggatctctaaatcttctgatttaagaagatgcttcctctatcgctgtttaaaactgctcaagggcatcctatgctcgtggagcttaagaatggagagacatacaatgggcatttggtgaattgtgatacttggatgaacatccatctgcgtgaagtcatatgtacatcaaaggacggagatagattttggaggatgccggaatgttatatccgtggtaacacaatcaagtaccttcgagttccggatgaggtgattgataaagtacaggaggagaagacacgcacagatagaaaaccaccaggtgttggacgtggaagaggacgtggtgtggatgatggaggagccagaggcagaggcagaggaacttcaatggggaagatgggtggcaacagaggagcaggtcgcggccgtggttgatgcaacaagttttaaagactcgctgccaaatctgctaacttcccattgtggagaaaaccaaaagttacataagaagttggtctgttgttggttttctattaagtatgtaagggatagggagtgtgttttcgattctccttgtgatcttttcgaaaaatgaaatttgtcttttgcctttttgtggtatatgtgaaattccaattgttttcatttgcgcttaaaaatgaatctttcaggtcttgaatttatataattgttagagaattt

SEQ ID NO: 24996 - protein, 129 aa, Arabidopsis thaliana
  peptide (1)..(129): Ceres Seq. ID no. 12335822
  misc_feature (5)..(71): Pfam Name: LSM domain Pfam Description: LSM domain
  misc_feature (1)..(128): Homolog of NCBI NO: 27668769 NR Description: similar to U6 snRNA-associated Sm-like protein
  misc_feature (1)..(128): Homolog of NCBI NO: 7657317 NR Description: U6 snRNA-associated SM-like protein 4 [Mus
  misc_feature (1)..(129): Homolog of NCBI NO: 37589787 NR Description: Unknown (protein for MGC:73057) [Danio rerio]
  misc_feature (1)..(129): Homolog of NCBI NO: 12230329 NR Description: Probable U6 snRNA-associated Sm-like protein LSm4
  misc_feature (1)..(129): Homolog of NCBI NO: 12230258 NR Description: Probable U6 snRNA-associated Sm-like protein LSm4
  misc_feature (1)..(129): Homolog of NCBI NO: 34902916 NR Description: unnamed protein product [Oryza sativa (japonica
  misc_feature (1)..(129): Homolog of NCBI NO: 12230291 NR Description: Probable U6 snRNA-associated Sm-like protein LSm4
  misc_feature (1)..(129): Homolog of NCBI NO: 21593495 NR Description: glycine rich protein-like [Arabidopsis thaliana]
  misc_feature (1)..(129): Homolog of NCBI NO: 15241028 NR Description: glycine rich protein - like
  misc_feature (1)..(129): Homolog of NCBI NO: 20260282 NR Description: unknown protein [Arabidopsis thaliana]
MLPLSLFKTAQGHPMLVELKNGETYNGHLVNCDTWMNIHLREVICTSKDGDRFWRMPECYIRGNTIKYLRVPDEVIDKVQEEKTRTDRKPPGVGRGRGRGVDDGGARGRGRGTSMGKMGGNRGAGRGRG

SEQ ID NO: 24997 - protein, 115 aa, Arabidopsis thaliana
  peptide (1)..(115): Ceres Seq. ID no. 12335823
  misc_feature (1)..(57): Pfam Name: LSM domain Pfam Description: LSM domain
  misc_feature (1)..(114): Homolog of NCBI NO: 27668769 NR Description: similar to U6 snRNA-associated Sm-like protein
  misc_feature (1)..(114): Homolog of NCBI NO: 7657317 NR Description: U6 snRNA-associated SM-like protein 4 [Mus
  misc_feature (1)..(115): Homolog of NCBI NO: 37589787 NR Description: Unknown (protein for MGC:73057) [Danio rerio]
  misc_feature (1)..(115): Homolog of NCBI NO: 12230329 NR Description: Probable U6 snRNA-associated Sm-like protein LSm4
  misc_feature (1)..(115): Homolog of NCBI NO: 12230258 NR Description: Probable U6 snRNA-associated Sm-like protein LSm4
  misc_feature (1)..(115): Homolog of NCBI NO: 34902916 NR Description: unnamed protein product [Oryza sativa (japonica
  misc_feature (1)..(115): Homolog of NCBI NO: 12230291 NR Description: Probable U6 snRNA-associated Sm-like protein LSm4
  misc_feature (1)..(115): Homolog of NCBI NO: 21593495 NR Description: glycine rich protein-like [Arabidopsis thaliana]
  misc_feature (1)..(115): Homolog of NCBI NO: 15241028 NR Description: glycine rich protein - like
  misc_feature (1)..(115): Homolog of NCBI NO: 20260282 NR Description: unknown protein [Arabidopsis thaliana]
MLVELKNGETYNGHLVNCDTWMNIHLREVICTSKDGDRFWRMPECYIRGNTIKYLRVPDEVIDKVQEEKTRTDRKPPGVGRGRGRGVDDGGARGRGRGTSMGKMGGNRGAGRGRG

SEQ ID NO: 24998 - protein, 94 aa, Arabidopsis thaliana
  peptide (1)..(94): Ceres Seq. ID no. 12335824
  misc_feature (1)..(94): Homolog of NCBI NO: 12230258 NR Description: Probable U6 snRNA-associated Sm-like protein LSm4
  misc_feature (1)..(94): Homolog of NCBI NO: 34902916 NR Description: unnamed protein product [Oryza sativa (japonica
  misc_feature (1)..(94): Homolog of NCBI NO: 12230291 NR Description: Probable U6 snRNA-associated Sm-like protein LSm4
  misc_feature (1)..(94): Homolog of NCBI NO: 21593495 NR Description: glycine rich protein-like [Arabidopsis thaliana]
  misc_feature (1)..(94): Homolog of NCBI NO: 15241028 NR Description: glycine rich protein - like
  misc_feature (1)..(94): Homolog of NCBI NO: 20260282 NR Description: unknown protein [Arabidopsis thaliana]
  misc_feature (1)..(93): Homolog of NCBI NO: 27668769 NR Description: similar to U6 snRNA-associated Sm-like protein
  misc_feature (1)..(93): Homolog of NCBI NO: 7657317 NR Description: U6 snRNA-associated SM-like protein 4 [Mus
  misc_feature (1)..(94): Homolog of NCBI NO: 37589787 NR Description: Unknown (protein for MGC:73057) [Danio rerio]
  misc_feature (1)..(94): Homolog of NCBI NO: 12230329 NR Description: Probable U6 snRNA-associated Sm-like protein LSm4
MNIHLREVICTSKDGDRFWRMPECYIRGNTIKYLRVPDEVIDKVQEEKTRTDRKPPGVGRGRGRGVDDGGARGRGRGTSMGKMGGNRGAGRGRG

SEQ ID NO: 24999 - DNA, 1750 bp, Arabidopsis thaliana
  misc_feature (1)..(1750): Ceres Seq. ID no. 12348561
  misc_feature: MA Experiment ID: 108462 Result: Down-regulated in Transcription
  misc_feature: MA Experiment 108462 PARAMETER Experiment Name: At_Germinating_Seeds_cDNA_P Parameter: Age (day) Value: 2 vs. 0
  misc_feature: MA Experiment 108462 PARAMETER Experiment Name: At_Germinating_Seeds_cDNA_P Parameter: Tissue Value: Germinating Seeds
  misc_feature: MA Experiment ID: 108463 Result: Down-regulated in Transcription
  misc_feature: MA Experiment 108463 PARAMETER Experiment Name: At_Germinating_Seeds_cDNA_P Parameter: Age (day) Value: 3 vs. 0
  misc_feature: MA Experiment 108463 PARAMETER Experiment Name: At_Germinating_Seeds_cDNA_P Parameter: Tissue Value: Germinating Seeds
  misc_feature: MA Experiment ID: 108464 Result: Down-regulated in Transcription
  misc_feature: MA Experiment 108464 PARAMETER Experiment Name: At_Germinating_Seeds_cDNA_P Parameter: Age (day) Value: 4 vs. 0
  misc_feature: MA Experiment 108464 PARAMETER Experiment Name: At_Germinating_Seeds_cDNA_P Parameter: Tissue Value: Germinating Seeds
  misc_feature: MA Experiment ID: 108573 Result: Up-regulated in Transcription
  misc_feature: MA Experiment 108573 PARAMETER Experiment Name: At_Drought_cDNA_P Parameter: Timepoint (hr) Value: 6
  misc_feature: MA Experiment 108573 PARAMETER Experiment Name: At_Drought_cDNA_P Parameter: Tissue Value: Aerial
  misc_feature: MA Experiment 108573 PARAMETER Experiment Name: At_Drought_cDNA_P Parameter: Treatment Value: Drought vs. No Drought
  misc_feature: MA Experiment ID: 20000173 Result: Down-regulated in Transcription
  misc_feature: MA Experiment 20000173 PARAMETER Experiment Name: At_42deg_Heat_P Parameter: Age (day) Value: 14
  misc_feature: MA Experiment 20000173 PARAMETER Experiment Name: At_42deg_Heat_P Parameter: Organism Value: A. thaliana
  misc_feature: MA Experiment 20000173 PARAMETER Experiment Name: At_42deg_Heat_P Parameter: Plant Line Value: WS
  misc_feature: MA Experiment 20000173 PARAMETER Experiment Name: At_42deg_Heat_P Parameter: Temperature (deg C) Value: 42 vs. 22
  misc_feature: MA Experiment 20000173 PARAMETER Experiment Name: At_42deg_Heat_P Parameter: Timepoint (hr) Value: 6
  misc_feature: MA Experiment 20000173 PARAMETER Experiment Name: At_42deg_Heat_P Parameter: Tissue Value: Aerial
  misc_feature: MA Experiment ID: 20000179 Result: Down-regulated in Transcription
  misc_feature: MA Experiment 20000179 PARAMETER Experiment Name: At_Germinating_Seeds_P Parameter: Age (hr) Value: 6 vs. 0
  misc_feature: MA Experiment 20000179 PARAMETER Experiment Name: At_Germinating_Seeds_P Parameter: Tissue Value: Germinating Seeds
  misc_feature: MA Experiment ID: 20000180 Result: Down-regulated in Transcription
  misc_feature: MA Experiment 20000180 PARAMETER Experiment Name: At_Germinating_Seeds_P Parameter: Age (hr) Value: 24 vs. 0
  misc_feature: MA Experiment 20000180 PARAMETER Experiment Name: At_Germinating_Seeds_P Parameter: Tissue Value: Germinating Seeds
  misc_feature: MA Experiment ID: 20000184 Result: Down-regulated in Transcription
  misc_feature: MA Experiment 20000184 PARAMETER Experiment Name: At_Shoots__P Parameter: Age (day) Value: 7
  misc_feature: MA Experiment 20000184 PARAMETER Experiment Name: At_Shoots__P Parameter: Tissue Value: Shoots vs. Whole Plant
  misc_feature: MA Experiment ID: 20000224 Result: Up-regulated in Transcription
  misc_feature: MA Experiment ID: 20000227 Result: Up-regulated in Transcription
  misc_feature: MA Experiment 20000227 PARAMETER Experiment Name: At_Root-Tips-vs-Tops_P Parameter: Tissue Value: Root Tips vs. Root Tops
  misc_feature: MA Experiment ID: 20000437 Result: Up-regulated in Transcription
  misc_feature: MA Experiment 20000437 PARAMETER Experiment Name: At_Drought_P Parameter: Age (day) Value: 8
  misc_feature: MA Experiment 20000437 PARAMETER Experiment Name: At_Drought_P Parameter: Organism Value: A. thaliana
  misc_feature: MA Experiment 20000437 PARAMETER Experiment Name: At_Drought_P Parameter: Plant Line Value: WS
  misc_feature: MA Experiment 20000437 PARAMETER Experiment Name: At_Drought_P Parameter: Timepoint (hr) Value: 24
  misc_feature: MA Experiment 20000437 PARAMETER Experiment Name: At_Drought_P Parameter: Tissue Value: Whole Plant
  misc_feature: MA Experiment 20000437 PARAMETER Experiment Name: At_Drought_P Parameter: Treatment Value: Drought vs. No Drought
  misc_feature: MA Experiment ID: 20000794 Result: Up-regulated in Transcription
  misc_feature: MA Experiment 20000794 PARAMETER Experiment Name: At_Petals_P Parameter: Age (day) Value: 23-25 days
  misc_feature: MA Experiment 20000794 PARAMETER Experiment Name: At_Petals_P Parameter: Plant Line Value: WS
  misc_feature: MA Experiment 20000794 PARAMETER Experiment Name: At_Petals_P Parameter: Tissue Value: Petals vs. Whole plant
  misc_feature: MA Experiment ID: 20001911 Result: Up-regulated in Transcription
  misc_feature: MA Experiment 20001911 PARAMETER Experiment Name: At_Drought_Reproduction_P Parameter: Age (day) Value: 40
  misc_feature: MA Experiment 20001911 PARAMETER Experiment Name: At_Drought_Reproduction_P Parameter: Organism Value: A. thaliana
  misc_feature: MA Experiment 20001911 PARAMETER Experiment Name: At_Drought_Reproduction_P Parameter: Plant Line Value: WS
  misc_feature: MA Experiment 20001911 PARAMETER Experiment Name: At_Drought_Reproduction_P Parameter: Timepoint (day) Value: 10
  misc_feature: MA Experiment 20001911 PARAMETER Experiment Name: At_Drought_Reproduction_P Parameter: Tissue Value: Flowers
  misc_feature: MA Experiment 20001911 PARAMETER Experiment Name: At_Drought_Reproduction_P Parameter: Treatment Value: Drought vs. No Drought
attcagcttgctcgcaacgaaacatattttttggaaaaaaaaaacaaaggaaatcgccatggaagacgttaaccagttgttcgatgctgctttcgagttcgcacactatcccggcgctcaaaacgaaacttccgttaaggaattcctcgatcgcttccctcttcctgttatcttcaatgctttgcaaaccgatccggatataccaggatttgaaaacacgttggtgacttgcttggagaggttgtttaagactaagtatggcgcttcacttattcctcagtatatgcctgttctgcaagttggtctcaaggcagattctgcagttgtgaaatctctggcttgcaaaactgttctgtgtctcttggaggattgcgatacaaacgacgtttcttctgttcagctagttgttaacaatggcatataccctcttctacttgactatatcattaacagcgatgatgaagttgcaaatgctgcaagtgagacaattaagagcctagctcgctttccagatgcaatgtccgtaattttcccttctgaaaccaacgatcctacacatcttcgtaaccttgctgcaaggtgttcatcactggcacgagtccgggttttgtcgttgatagtgaagcttttttcgatttctcgacttgtagcttcagaagttaagaaatcggggattcttgatttactggaggcagaaatgaagggtacaaaagacactcttgtgatcttaaatgttctggaactctactatgagttaatggaagtggagcacagttcagagttcgtgccacaaacatcacttattcagctgttgtgttctatcatcagtggtacatcgacgggaccctatgaaaagttaagagcaatgatgataagtggcagactactctcaaaggaaaatatctacaaagtcgtggaagaagctagtgtgaaggcgttaatttcagctattgatgggagtctggagtcagttgagatgaatgatactgatgcacaggaagctgccattgatgcacttggtcagatgggatcaacaacgaagggagcggatcttgtcctttcaacttcacctccagctgcaagacatgttgtagcttctgcctttgatcgtaatgcacatggaaaacagttggctgcactgcatgcactggcaaacatcgcaggtgaaacacgacctaagagcaacagaatagttgatggaaaagctgaagaaagccttagatgtttgatatacgacgctgcagcacagagcacaaaactaaccccatccggtttattcctctcagttcttcaacaaagctcagagattcgtcttgcgggttatcgaacgttaacagcattagtggctcggccatggtgcctggtggaaatcttggccaaagaagagataataaacatagttacggatgcaaccactgaaactgcaaaaatagcaatggaagcaaggtataactgctgcaaagcaattcacgaagcgttcttgtgtggtaactttgttgatgaccctcgtcgtctaaaaaccggtgacaagttgcaagaagctgttcgaagtggaccatatatgtcgaagaagcacagaggcgcacgaccagaagtaatgacaggcgaaggattttaaagacaactaaagaaaaaaagttaaaacttctttgttaaccaaagttttttatatcttctctggctgttcgataagtaaactttagttctttctataaacaacgaaggctaggagtaaacgttttggcggttg

SEQ ID NO: 25000 - protein, 538 aa, Arabidopsis thaliana
  peptide (1)..(538): Ceres Seq. ID no. 12348562
  misc_feature (71)..(523): Homolog of NCBI NO: 4826952 NR Description: proteasome 26S non-ATPase subunit 5
  misc_feature (71)..(523): Homolog of NCBI NO: 505106 NR Description: KIAA0072 [Homo sapiens]
  misc_feature (310)..(538): Homolog of NCBI NO: 11994507 NR Description: gene_id:F4B12.9~unknown protein [Arabidopsis
  misc_feature (20)..(308): Homolog of NCBI NO: 11994507 NR Description: gene_id:F4B12.9~unknown protein [Arabidopsis
  misc_feature (20)..(538): Homolog of NCBI NO: 18400660 NR Description: expressed protein
  misc_feature (20)..(538): Homolog of NCBI NO: 21593496 NR Description: unknown [Arabidopsis thaliana]
FSLLATKHIFWKKKTKEIAMEDVNQLFDAAFEFAHYPGAQNETSVKEFLDRFPLPVIFNALQTDPDIPGFENTLVTCLERLFKTKYGASLIPQYMPVLQVGLKADSAVVKSLACKTVLCLLEDCDTNDVSSVQLVVNNGIYPLLLDYIINSDDEVANAASETIKSLARFPDAMSVIFPSETNDPTHLRNLAARCSSLARVRVLSLIVKLFSISRLVASEVKKSGILDLLEAEMKGTKDTLVILNVLELYYELMEVEHSSEFVPQTSLIQLLCSIISGTSTGPYEKLRAMMISGRLLSKENIYKVVEEASVKALISAIDGSLESVEMNDTDAQEAAIDALGQMGSTTKGADLVLSTSPPAARHVVASAFDRNAHGKQLAALHALANIAGETRPKSNRIVDGKAEESLRCLIYDAAAQSTKLTPSGLFLSVLQQSSEIRLAGYRTLTALVARPWCLVEILAKEEIINIVTDATTETAKIAMEARYNCCKAIHEAFLCGNFVDDPRRLKTGDKLQEAVRSGPYMSKKHRGARPEVMTGEGF

SEQ ID NO: 25001 - protein, 519 aa, Arabidopsis thaliana
  peptide (1)..(519): Ceres Seq. ID no. 12348563
  misc_feature (52)..(504): Homolog of NCBI NO: 4826952 NR Description: proteasome 26S non-ATPase subunit 5
  misc_feature (52)..(504): Homolog of NCBI NO: 505106 NR Description: KIAA0072 [Homo sapiens]
  misc_feature (291)..(519): Homolog of NCBI NO: 11994507 NR Description: gene_id:F4B12.9~unknown protein [Arabidopsis
  misc_feature (1)..(289): Homolog of NCBI NO: 11994507 NR Description: gene_id:F4B12.9~unknown protein [Arabidopsis
  misc_feature (1)..(519): Homolog of NCBI NO: 18400660 NR Description: expressed protein
  misc_feature (1)..(519): Homolog of NCBI NO: 21593496 NR Description: unknown [Arabidopsis thaliana]
MEDVNQLFDAAFEFAHYPGAQNETSVKEFLDRFPLPVIFNALQTDPDIPGFENTLVTCLERLFKTKYGASLIPQYMPVLQVGLKADSAVVKSLACKTVLCLLEDCDTNDVSSVQLVVNNGIYPLLLDYIINSDDEVANAASETIKSLARFPDAMSVIFPSETNDPTHLRNLAARCSSLARVRVLSLIVKLFSISRLVASEVKKSGILDLLEAEMKGTKDTLVILNVLELYYELMEVEHSSEFVPQTSLIQLLCSIISGTSTGPYEKLRAMMISGRLLSKENIYKVVEEASVKALISAIDGSLESVEMNDTDAQEAAIDALGQMGSTTKGADLVLSTSPPAARHVVASAFDRNAHGKQLAALHALANIAGETRPKSNRIVDGKAEESLRCLIYDAAAQSTKLTPSGLFLSVLQQSSEIRLAGYRTLTALVARPWCLVEILAKEEIINIVTDATTETAKIAMEARYNCCKAIHEAFLCGNFVDDPRRLKTGDKLQEAVRSGPYMSKKHRGARPEVMTGEGF

SEQ ID NO: 25002 - protein, 444 aa, Arabidopsis thaliana
  peptide (1)..(444): Ceres Seq. ID no. 12348564
  misc_feature (1)..(429): Homolog of NCBI NO: 4826952 NR Description: proteasome 26S non-ATPase subunit 5
  misc_feature (1)..(429): Homolog of NCBI NO: 505106 NR Description: KIAA0072 [Homo sapiens]
  misc_feature (216)..(444): Homolog of NCBI NO: 11994507 NR Description: gene_id:F4B12.9~unknown protein [Arabidopsis
  misc_feature (1)..(214): Homolog of NCBI NO: 11994507 NR Description: gene_id:F4B12.9~unknown protein [Arabidopsis
  misc_feature (1)..(444): Homolog of NCBI NO: 18400660 NR Description: expressed protein
  misc_feature (1)..(444): Homolog of NCBI NO: 21593496 NR Description: unknown [Arabidopsis thaliana]
MPVLQVGLKADSAVVKSLACKTVLCLLEDCDTNDVSSVQLVVNNGIYPLLLDYIINSDDEVANAASETIKSLARFPDAMSVIFPSETNDPTHLRNLAARCSSLARVRVLSLIVKLFSISRLVASEVKKSGILDLLEAEMKGTKDTLVILNVLELYYELMEVEHSSEFVPQTSLIQLLCSIISGTSTGPYEKLRAMMISGRLLSKENIYKVVEEASVKALISAIDGSLESVEMNDTDAQEAAIDALGQMGSTTKGADLVLSTSPPAARHVVASAFDRNAHGKQLAALHALANIAGETRPKSNRIVDGKAEESLRCLIYDAAAQSTKLTPSGLFLSVLQQSSEIRLAGYRTLTALVARPWCLVEILAKEEIINIVTDATTETAKIAMEARYNCCKAIHEAFLCGNFVDDPRRLKTGDKLQEAVRSGPYMSKKHRGARPEVMTGEGF

SEQ ID NO: 25003 - DNA, 1625 bp, Arabidopsis thaliana
  misc_feature (1)..(1625): Ceres Seq. ID no. 12673062
  misc_feature: MA Experiment ID: 108433 Result: Up-regulated in Transcription
  misc_feature: MA Experiment 108433 PARAMETER Experiment Name: At_rhl_Mutant2_cDNA_P Parameter: Age (day) Value: 7
  misc_feature: MA Experiment 108433 PARAMETER Experiment Name: At_rhl_Mutant2_cDNA_P Parameter: Organism Value: A. thaliana
  misc_feature: MA Experiment 108433 PARAMETER Experiment Name: At_rhl_Mutant2_cDNA_P Parameter: Plant Line Value: rhl Mutant vs. wt landsburg
  misc_feature: MA Experiment 108433 PARAMETER Experiment Name: At_rhl_Mutant2_cDNA_P Parameter: Tissue Value: Roots
  misc_feature: MA Experiment ID: 108461 Result: Up-regulated in Transcription
  misc_feature: MA Experiment 108461 PARAMETER Experiment Name: At_Germinating_Seeds_cDNA_P Parameter: Age (day) Value: 1 vs. 0
  misc_feature: MA Experiment 108461 PARAMETER Experiment Name: At_Germinating_Seeds_cDNA_P Parameter: Tissue Value: Germinating Seeds
  misc_feature: MA Experiment ID: 108462 Result: Up-regulated in Transcription
  misc_feature: MA Experiment 108462 PARAMETER Experiment Name: At_Germinating_Seeds_cDNA_P Parameter: Age (day) Value: 2 vs. 0
  misc_feature: MA Experiment 108462 PARAMETER Experiment Name: At_Germinating_Seeds_cDNA_P Parameter: Tissue Value: Germinating Seeds
  misc_feature: MA Experiment ID: 108463 Result: Up-regulated in Transcription
  misc_feature: MA Experiment 108463 PARAMETER Experiment Name: At_Germinating_Seeds_cDNA_P Parameter: Age (day) Value: 3 vs. 0
  misc_feature: MA Experiment 108463 PARAMETER Experiment Name: At_Germinating_Seeds_cDNA_P Parameter: Tissue Value: Germinating Seeds
  misc_feature: MA Experiment ID: 108464 Result: Up-regulated in Transcription
  misc_feature: MA Experiment 108464 PARAMETER Experiment Name: At_Germinating_Seeds_cDNA_P Parameter: Age (day) Value: 4 vs. 0
  misc_feature: MA Experiment 108464 PARAMETER Experiment Name: At_Germinating_Seeds_cDNA_P Parameter: Tissue Value: Germinating Seeds
  misc_feature: MA Experiment ID: 108501 Result: Up-regulated in Transcription
  misc_feature: MA Experiment 108501 PARAMETER Experiment Name: At_ap2_floral_buds_cDNA_P Parameter: Plant Line Value: ap2 (Ler.)
  misc_feature: MA Experiment 108501 PARAMETER Experiment Name: At_ap2_floral_buds_cDNA_P Parameter: Tissue Value: Closed Flower
  misc_feature: MA Experiment ID: 108561 Result: Up-regulated in Transcription
  misc_feature: MA Experiment 108561 PARAMETER Experiment Name: At_100uM_ABA_cDNA_P Parameter: Timepoint (hr) Value: 6
  misc_feature: MA Experiment 108561 PARAMETER Experiment Name: At_100uM_ABA_cDNA_P Parameter: Tissue Value: Aerial
  misc_feature: MA Experiment 108561 PARAMETER Experiment Name: At_100uM_ABA_cDNA_P Parameter: Treatment Value: 100uM ABA vs. No Treatment
  misc_feature: MA Experiment ID: 108569 Result: Up-regulated in Transcription
  misc_feature: MA Experiment 108569 PARAMETER Experiment Name: At_0.001%_MeJA__cDNA_P Parameter: Timepoint (hr) Value: 6
  misc_feature: MA Experiment 108569 PARAMETER Experiment Name: At_0.001%_MeJA__cDNA_P Parameter: Tissue Value: Aerial
  misc_feature: MA Experiment 108569 PARAMETER Experiment Name: At_0.001%_MeJA__cDNA_P Parameter: Treatment Value: 0.001% MeJA vs. No Treatment
  misc_feature: MA Experiment ID: 108573 Result: Up-regulated in Transcription
  misc_feature: MA Experiment 108573 PARAMETER Experiment Name: At_Drought_cDNA_P Parameter: Timepoint (hr) Value: 6
  misc_feature: MA Experiment 108573 PARAMETER Experiment Name: At_Drought_cDNA_P Parameter: Tissue Value: Aerial
  misc_feature: MA Experiment 108573 PARAMETER Experiment Name: At_Drought_cDNA_P Parameter: Treatment Value: Drought vs. No Drought
  misc_feature: MA Experiment ID: 108605 Result: Up-regulated in Transcription
  misc_feature: MA Experiment 108605 PARAMETER Experiment Name: At_100uM_ABA_cDNA_P Parameter: Timepoint (hr) Value: 6
  misc_feature: MA Experiment 108605 PARAMETER Experiment Name: At_100uM_ABA_cDNA_P Parameter: Tissue Value: Aerial
  misc_feature: MA Experiment 108605 PARAMETER Experiment Name: At_100uM_ABA_cDNA_P Parameter: Treatment Value: 100uM ABA vs. No Treatment
  misc_feature: MA Experiment ID: 108668 Result: Down-regulated in Transcription
  misc_feature: MA Experiment 108668 PARAMETER Experiment Name: At_2mM_SA_cDNA_P Parameter: Plant Line Value: WS
  misc_feature: MA Experiment 108668 PARAMETER Experiment Name: At_2mM_SA_cDNA_P Parameter: Timepoint (hr) Value: 6
  misc_feature: MA Experiment 108668 PARAMETER Experiment Name: At_2mM_SA_cDNA_P Parameter: Treatment Value: 2mM SA vs. No Treatment
  misc_feature: MA Experiment ID: 20000071 Result: Up-regulated in Transcription
  misc_feature: MA Experiment 20000071 PARAMETER Experiment Name: At_100uM_ABA_Mutants_cDNA_P Parameter: Plant Line Value: CS8104
  misc_feature: MA Experiment 20000071 PARAMETER Experiment Name: At_100uM_ABA_Mutants_cDNA_P Parameter: Timepoint (hr) Value: 6
  misc_feature: MA Experiment 20000071 PARAMETER Experiment Name: At_100uM_ABA_Mutants_cDNA_P Parameter: Tissue Value: Aerial
  misc_feature: MA Experiment 20000071 PARAMETER Experiment Name: At_100uM_ABA_Mutants_cDNA_P Parameter: Treatment Value: 100uM ABA vs. No Treatment
  misc_feature: MA Experiment ID: 20000087 Result: Down-regulated in Transcription
  misc_feature: MA Experiment 20000087 PARAMETER Experiment Name: At_100uM_ABA_Mutants_cDNA_P Parameter: Plant Line Value: WS
  misc_feature: MA Experiment 20000087 PARAMETER Experiment Name: At_100uM_ABA_Mutants_cDNA_P Parameter: Timepoint (hr) Value: 6
  misc_feature: MA Experiment 20000087 PARAMETER Experiment Name: At_100uM_ABA_Mutants_cDNA_P Parameter: Tissue Value: Aerial
  misc_feature: MA Experiment 20000087 PARAMETER Experiment Name: At_100uM_ABA_Mutants_cDNA_P Parameter: Treatment Value: 100uM ABA vs. No Treatment
  misc_feature: MA Experiment ID: 20000111 Result: Down-regulated in Transcription
  misc_feature: MA Experiment 20000111 PARAMETER Experiment Name: At_42deg_Heat_cDNA_P Parameter: Temperature (deg C) Value: 42 vs. 22
  misc_feature: MA Experiment 20000111 PARAMETER Experiment Name: At_42deg_Heat_cDNA_P Parameter: Timepoint (hr) Value: 6
  misc_feature: MA Experiment 20000111 PARAMETER Experiment Name: At_42deg_Heat_cDNA_P Parameter: Tissue Value: Aerial
  misc_feature: MA Experiment ID: 20000113 Result: Down-regulated in Transcription
  misc_feature: MA Experiment 20000113 PARAMETER Experiment Name: At_42deg_Heat_cDNA_P Parameter: Temperature (deg C) Value: 42 vs. 22
  misc_feature: MA Experiment 20000113 PARAMETER Experiment Name: At_42deg_Heat_cDNA_P Parameter: Timepoint (hr) Value: 8
  misc_feature: MA Experiment 20000113 PARAMETER Experiment Name: At_42deg_Heat_cDNA_P Parameter: Tissue Value: Aerial
  misc_feature: MA Experiment ID: 20000169 Result: Up-regulated in Transcription
  misc_feature: MA Experiment 20000169 PARAMETER Experiment Name: At_100uM_ABA_P Parameter: Age (day) Value: 14
  misc_feature: MA Experiment 20000169 PARAMETER Experiment Name: At_100uM_ABA_P Parameter: Organism Value: A. thaliana
  misc_feature: MA Experiment 20000169 PARAMETER Experiment Name: At_100uM_ABA_P Parameter: Plant Line Value: WS
  misc_feature: MA Experiment 20000169 PARAMETER Experiment Name: At_100uM_ABA_P Parameter: Timepoint (hr) Value: 6
  misc_feature: MA Experiment 20000169 PARAMETER Experiment Name: At_100uM_ABA_P Parameter: Tissue Value: Aerial
  misc_feature: MA Experiment 20000169 PARAMETER Experiment Name: At_100uM_ABA_P Parameter: Treatment Value: 100uM ABA vs. No Treatment
  misc_feature: MA Experiment ID: 20000173 Result: Down-regulated in Transcription
  misc_feature: MA Experiment 20000173 PARAMETER Experiment Name: At_42deg_Heat_P Parameter: Age (day) Value: 14
  misc_feature: MA Experiment 20000173 PARAMETER Experiment Name: At_42deg_Heat_P Parameter: Organism Value: A. thaliana
  misc_feature: MA Experiment 20000173 PARAMETER Experiment Name: At_42deg_Heat_P Parameter: Plant Line Value: WS
  misc_feature: MA Experiment 20000173 PARAMETER Experiment Name: At_42deg_Heat_P Parameter: Temperature (deg C) Value: 42 vs. 22
  misc_feature: MA Experiment 20000173 PARAMETER Experiment Name: At_42deg_Heat_P Parameter: Timepoint (hr) Value: 6
  misc_feature: MA Experiment 20000173 PARAMETER Experiment Name: At_42deg_Heat_P Parameter: Tissue Value: Aerial
  misc_feature: MA Experiment ID: 20000179 Result: Up-regulated in Transcription
  misc_feature: MA Experiment 20000179 PARAMETER Experiment Name: At_Germinating_Seeds_P Parameter: Age (hr) Value: 6 vs. 0
  misc_feature: MA Experiment 20000179 PARAMETER Experiment Name: At_Germinating_Seeds_P Parameter: Tissue Value: Germinating Seeds
  misc_feature: MA Experiment ID: 20000180 Result: Up-regulated in Transcription
  misc_feature: MA Experiment 20000180 PARAMETER Experiment Name: At_Germinating_Seeds_P Parameter: Age (hr) Value: 24 vs. 0
  misc_feature: MA Experiment 20000180 PARAMETER Experiment Name: At_Germinating_Seeds_P Parameter: Tissue Value: Germinating Seeds
  misc_feature: MA Experiment ID: 20000184 Result: Down-regulated in Transcription
  misc_feature: MA Experiment 20000184 PARAMETER Experiment Name: At_Shoots__P Parameter: Age (day) Value: 7
  misc_feature: MA Experiment 20000184 PARAMETER Experiment Name: At_Shoots__P Parameter: Tissue Value: Shoots vs. Whole Plant
  misc_feature: MA Experiment ID: 20000227 Result: Up-regulated in Transcription
  misc_feature: MA Experiment 20000227 PARAMETER Experiment Name: At_Root-Tips-vs-Tops_P Parameter: Tissue Value: Root Tips vs. Root Tops
  misc_feature: MA Experiment ID: 20000234 Result: Up-regulated in Transcription
  misc_feature: MA Experiment 20000234 PARAMETER Experiment Name: At_Siliques_P Parameter: Age (day) Value: 21
  misc_feature: MA Experiment 20000234 PARAMETER Experiment Name: At_Siliques_P Parameter: Organism Value: A. thaliana
  misc_feature: MA Experiment 20000234 PARAMETER Experiment Name: At_Siliques_P Parameter: Plant Line Value: WS
  misc_feature: MA Experiment 20000234 PARAMETER Experiment Name: At_Siliques_P Parameter: Tissue Value: Less Than 5mm Siliques vs. Whole Plant
  misc_feature: MA Experiment ID: 20000235 Result: Up-regulated in Transcription
  misc_feature: MA Experiment 20000235 PARAMETER Experiment Name: At_Siliques_P Parameter: Age (day) Value: 21
  misc_feature: MA Experiment 20000235 PARAMETER Experiment Name: At_Siliques_P Parameter: Organism Value: A. thaliana
  misc_feature: MA Experiment 20000235 PARAMETER Experiment Name: At_Siliques_P Parameter: Plant Line Value: WS
  misc_feature: MA Experiment 20000235 PARAMETER Experiment Name: At_Siliques_P Parameter: Tissue Value: 5-10mm Siliques vs. Whole Plant
  misc_feature: MA Experiment ID: 20000264 Result: Up-regulated in Transcription
  misc_feature: MA Experiment 20000264 PARAMETER Experiment Name: At_Open_Flower_P Parameter: Age (day) Value: 21
  misc_feature: MA Experiment 20000264 PARAMETER Experiment Name: At_Open_Flower_P Parameter: Plant Line Value: WS
  misc_feature: MA Experiment 20000264 PARAMETER Experiment Name: At_Open_Flower_P Parameter: Tissue Value: Open Flower vs. Whole Plant
  misc_feature: MA Experiment ID: 20000265 Result: Up-regulated in Transcription
  misc_feature: MA Experiment 20000265 PARAMETER Experiment Name: At_Open_Flower_P Parameter: Age (day) Value: 21
  misc_feature: MA Experiment 20000265 PARAMETER Experiment Name: At_Open_Flower_P Parameter: Plant Line Value: WS
  misc_feature: MA Experiment 20000265 PARAMETER Experiment Name: At_Open_Flower_P Parameter: Tissue Value: Closed Flower vs. Whole Plant
  misc_feature: MA Experiment ID: 20000286 Result: Up-regulated in Transcription
  misc_feature: MA Experiment 20000286 PARAMETER Experiment Name: At_Open_Flower_P Parameter: Age (day) Value: 21
  misc_feature: MA Experiment 20000286 PARAMETER Experiment Name: At_Open_Flower_P Parameter: Plant Line Value: WS
  misc_feature: MA Experiment 20000286 PARAMETER Experiment Name: At_Open_Flower_P Parameter: Tissue Value: Half Open vs. Whole Plant
  misc_feature: MA Experiment ID: 20000451 Result: Down-regulated in Transcription
  misc_feature: MA Experiment 20000451 PARAMETER Experiment Name: At_CS6879_Shoots-Roots_P Parameter: Age (day) Value: 14
  misc_feature: MA Experiment 20000451 PARAMETER Experiment Name: At_CS6879_Shoots-Roots_P Parameter: Organism Value: A. thaliana
  misc_feature: MA Experiment 20000451 PARAMETER Experiment Name: At_CS6879_Shoots-Roots_P Parameter: Plant Line Value: CS6879 vs. WS
  misc_feature: MA Experiment 20000451 PARAMETER Experiment Name: At_CS6879_Shoots-Roots_P Parameter: Tissue Value: Roots
  misc_feature: MA Experiment ID: 20000453 Result: Up-regulated in Transcription
  misc_feature: MA Experiment 20000453 PARAMETER Experiment Name: At_100uM_ABA_P Parameter: Age (day) Value: 15
  misc_feature: MA Experiment 20000453 PARAMETER Experiment Name: At_100uM_ABA_P Parameter: Organism Value: A. thaliana
  misc_feature: MA Experiment 20000453 PARAMETER Experiment Name: At_100uM_ABA_P Parameter: Plant Line Value: WS
  misc_feature: MA Experiment 20000453 PARAMETER Experiment Name: At_100uM_ABA_P Parameter: Timepoint (hr) Value: 24
  misc_feature: MA Experiment 20000453 PARAMETER Experiment Name: At_100uM_ABA_P Parameter: Tissue Value: Aerial
  misc_feature: MA Experiment 20000453 PARAMETER Experiment Name: At_100uM_ABA_P Parameter: Treatment Value: 100uM ABA vs. No Treatment
  misc_feature: MA Experiment ID: 20000794 Result: Up-regulated in Transcription
  misc_feature: MA Experiment 20000794 PARAMETER Experiment Name: At_Petals_P Parameter: Age (day) Value: 23-25 days
  misc_feature: MA Experiment 20000794 PARAMETER Experiment Name: At_Petals_P Parameter: Plant Line Value: WS
  misc_feature: MA Experiment 20000794 PARAMETER Experiment Name: At_Petals_P Parameter: Tissue Value: Petals vs. Whole plant
  misc_feature: MA Experiment ID: 20001248 Result: Down-regulated in Transcription
  misc_feature: MA Experiment 20001248 PARAMETER Experiment Name: At_Far-red-induction_P Parameter: Age (day) Value: 7
  misc_feature: MA Experiment 20001248 PARAMETER Experiment Name: At_Far-red-induction_P Parameter: Light Value: Far-red vs. White
  misc_feature: MA Experiment 20001248 PARAMETER Experiment Name: At_Far-red-induction_P Parameter: Organism Value: A. thaliana
  misc_feature: MA Experiment 20001248 PARAMETER Experiment Name: At_Far-red-induction_P Parameter: Plant Line Value: Columbia
  misc_feature: MA Experiment 20001248 PARAMETER Experiment Name: At_Far-red-induction_P Parameter: Timepoint (hr) Value: 4
  misc_feature: MA Experiment 20001248 PARAMETER Experiment Name: At_Far-red-induction_P Parameter: Tissue Value: Whole Plant
  misc_feature: MA Experiment ID: 20001554 Result: Up-regulated in Transcription
  misc_feature: MA Experiment 20001554 PARAMETER Experiment Name: At_Drought_Soil_Dry_P Parameter: Age (day) Value: 21
  misc_feature: MA Experiment 20001554 PARAMETER Experiment Name: At_Drought_Soil_Dry_P Parameter: Organism Value: A. thaliana
  misc_feature: MA Experiment 20001554 PARAMETER Experiment Name: At_Drought_Soil_Dry_P Parameter: Plant Line Value: WS
  misc_feature: MA Experiment 20001554 PARAMETER Experiment Name: At_Drought_Soil_Dry_P Parameter: Post Timepoint (hr) Value: None
  misc_feature: MA Experiment 20001554 PARAMETER Experiment Name: At_Drought_Soil_Dry_P Parameter: Post-Treatment Value: None
  misc_feature: MA Experiment 20001554 PARAMETER Experiment Name: At_Drought_Soil_Dry_P Parameter: Timepoint (day) Value: 7
  misc_feature: MA Experiment 20001554 PARAMETER Experiment Name: At_Drought_Soil_Dry_P Parameter: Treatment Value: Drought vs. No Drought
  misc_feature: MA Experiment ID: 20001555 Result: Up-regulated in Transcription
  misc_feature: MA Experiment 20001555 PARAMETER Experiment Name: At_Drought_Soil_Dry_P Parameter: Age (day) Value: 24
  misc_feature: MA Experiment 20001555 PARAMETER Experiment Name: At_Drought_Soil_Dry_P Parameter: Organism Value: A. thaliana
  misc_feature: MA Experiment 20001555 PARAMETER Experiment Name: At_Drought_Soil_Dry_P Parameter: Plant Line Value: WS
  misc_feature: MA Experiment 20001555 PARAMETER Experiment Name: At_Drought_Soil_Dry_P Parameter: Post Timepoint (hr) Value: None
  misc_feature: MA Experiment 20001555 PARAMETER Experiment Name: At_Drought_Soil_Dry_P Parameter: Post-Treatment Value: None
  misc_feature: MA Experiment 20001555 PARAMETER Experiment Name: At_Drought_Soil_Dry_P Parameter: Timepoint (day) Value: 10
  misc_feature: MA Experiment 20001555 PARAMETER Experiment Name: At_Drought_Soil_Dry_P Parameter: Treatment Value: Drought vs. No Drought
  misc_feature: MA Experiment ID: 20001557 Result: Down-regulated in Transcription
  misc_feature: MA Experiment 20001557 PARAMETER Experiment Name: At_Drought_Soil_Dry_P Parameter: Age (day) Value: 27
  misc_feature: MA Experiment 20001557 PARAMETER Experiment Name: At_Drought_Soil_Dry_P Parameter: Organism Value: A. thaliana
  misc_feature: MA Experiment 20001557 PARAMETER Experiment Name: At_Drought_Soil_Dry_P Parameter: Plant Line Value: WS
  misc_feature: MA Experiment 20001557 PARAMETER Experiment Name: At_Drought_Soil_Dry_P Parameter: Post Timepoint (hr) Value: 3
  misc_feature: MA Experiment 20001557 PARAMETER Experiment Name: At_Drought_Soil_Dry_P Parameter: Post-Treatment Value: Re-Water vs. No Drought
  misc_feature: MA Experiment 20001557 PARAMETER Experiment Name: At_Drought_Soil_Dry_P Parameter: Timepoint (day) Value: 13
  misc_feature: MA Experiment 20001557 PARAMETER Experiment Name: At_Drought_Soil_Dry_P Parameter: Treatment Value: Drought vs. No Drought
aatctttagaaactaagagagaatggaattaacactaaaattgctggttctgcttctgtttatcttaaatcatcatgttggttctggctctatcgtcaagtttcttcccggttttgaaggccctcttcctttcgaacttgaaaccgggtacattggtattggtgaggaagaggaagtgcaattgttctattatttcatcaaatctgagagaaatccaaaagaagaccctcttcttctctggttaagtggaggacctggatgttcttctatcactggccttcttttccagaatggacctttggctttgaagtccgaggtttacaatggaagtgttccttctttggtctctactacatattcgtggactaagacggcgaacataatattcttggatcaacctgttggagctggcttctcctactcaagagctccacttattgatacacctactgacacaggagaagttaagaggattcatgagtttctccaaaagtggctaagcaagcatccacagttttcttccaaccatttttatgctggcggagattcttattccggtatgattgttccggccctcgttcaagaaatctcgaaaggaaattatatatgttgcaaccctcctataaatctaaagggttatgtactcgggaacccgataacgcacgaagacgacccaaactatcgcattccattttctcatggaatggcactaatttcagatgaactatacgagtcaattagggaagcctgcaaaggaaattatttcaatgtggatccacgaaacacaaaatgtttgaaacttgtcgaggaatttcataagtgtaccgacaaactaaatgaattccatatactatcaccagattgcgacacggcatctcctgattgctatttatatccattttatctcattagcttttgggccaatgacgagagcgtccgcgatgctcttcatgttaataagaggagtattggaaaatgggagcgatgtaactatctgagtaaaccatacaacaaagacatcaagagcagcgtaccataccatatgaataacagtgttagtggctaccgatctctcatctacagtggtgatcatgatttggtggttcctttccttgcaacacaagcctggataaaatctctaaattactctatcattgatgaatggagaccttggatgattagagatcaaatcactggatacacgagaacttattccaataagatgacatttgctactgtcaaaggaagtgggcacacagcggagaataaaccacaagagagttttatcatgtttcgaaggtggattaatggccaacctttgtaaaaattacaattatgaattatctactatgtgagctatttgttcctgaggaggtttagaactctaccactagttcgacatgctatagttaccaataaatgaggtcttatttgggtctagggagactacaggccaaagacttggaacttcttggtttattgttatatgttgttaggtaacatttttgtgttattcatagattttaccttttggtacttttatcttctcacagattatattgttctgtgttgtgctgttattttttacaattaaacttagatttttaataaattcttttttgtct

SEQ ID NO: 25004 - protein, 433 aa, Arabidopsis thaliana
  peptide (1)..(433): Ceres Seq. ID no. 12673063
  misc_feature (29)..(430): Pfam Name: Serine carboxypeptidase Pfam Description: Serine carboxypeptidase
  misc_feature (5)..(281): Homolog of NCBI NO: 37361927 NR Description: 1-O-sinapoylglucose:choline sinapoyltransferase
  misc_feature (4)..(433): Homolog of NCBI NO: 8777303 NR Description: serine carboxypeptidase [Arabidopsis thaliana]
  misc_feature (4)..(433): Homolog of NCBI NO: 15228300 NR Description: putative glucose acyltransferase; protein id:
  misc_feature (3)..(433): Homolog of NCBI NO: 18400137 NR Description: putative serine carboxypeptidase I; protein id:
  misc_feature (4)..(433): Homolog of NCBI NO: 15219433 NR Description: putative serine carboxypeptidase; protein id:
  misc_feature (4)..(433): Homolog of NCBI NO: 15219429 NR Description: putative serine carboxypeptidase; protein id:
  misc_feature (1)..(433): Homolog of NCBI NO: 15227772 NR Description: putative serine carboxypeptidase I
  misc_feature (1)..(433): Homolog of NCBI NO: 15227773 NR Description: putative serine carboxypeptidase I; protein id:
  misc_feature (1)..(433): Homolog of NCBI NO: 15227765 NR Description: putative serine carboxypeptidase I; protein id:
  misc_feature (1)..(433): Homolog of NCBI NO: 15227769 NR Description: putative serine carboxypeptidase II
MELTLKLLVLLLFILNHHVGSGSIVKFLPGFEGPLPFELETGYIGIGEEEEVQLFYYFIKSERNPKEDPLLLWLSGGPGCSSITGLLFQNGPLALKSEVYNGSVPSLVSTTYSWTKTANIIFLDQPVGAGFSYSRAPLIDTPTDTGEVKRIHEFLQKWLSKHPQFSSNHFYAGGDSYSGMIVPALVQEISKGNYICCNPPINLKGYVLGNPITHEDDPNYRIPFSHGMALISDELYESIREACKGNYFNVDPRNTKCLKLVEEFHKCTDKLNEFHILSPDCDTASPDCYLYPFYLISFWANDESVRDALHVNKRSIGKWERCNYLSKPYNKDIKSSVPYHMNNSVSGYRSLIYSGDHDLVVPFLATQAWIKSLNYSIIDEWRPWMIRDQITGYTRTYSNKMTFATVKGSGHTAENKPQESFIMFRRWINGQPL

SEQ ID NO: 25005 - protein, 254 aa, Arabidopsis thaliana
  peptide (1)..(254): Ceres Seq. ID no. 12673064
  misc_feature (1)..(251): Pfam Name: Serine carboxypeptidase Pfam Description: Serine carboxypeptidase
  misc_feature (1)..(102): Homolog of NCBI NO: 37361927 NR Description: 1-O-sinapoylglucose:choline sinapoyltransferase
  misc_feature (1)..(254): Homolog of NCBI NO: 8777303 NR Description: serine carboxypeptidase [Arabidopsis thaliana]
  misc_feature (1)..(254): Homolog of NCBI NO: 15228300 NR Description: putative glucose acyltransferase; protein id:
  misc_feature (1)..(254): Homolog of NCBI NO: 18400137 NR Description: putative serine carboxypeptidase I; protein id:
  misc_feature (1)..(254): Homolog of NCBI NO: 15219433 NR Description: putative serine carboxypeptidase; protein id:
  misc_feature (1)..(254): Homolog of NCBI NO: 15219429 NR Description: putative serine carboxypeptidase; protein id:
  misc_feature (1)..(254): Homolog of NCBI NO: 15227772 NR Description: putative serine carboxypeptidase I
  misc_feature (1)..(254): Homolog of NCBI NO: 15227773 NR Description: putative serine carboxypeptidase I; protein id:
  misc_feature (1)..(254): Homolog of NCBI NO: 15227765 NR Description: putative serine carboxypeptidase I; protein id:
  misc_feature (1)..(254): Homolog of NCBI NO: 15227769 NR Description: putative serine carboxypeptidase II
MIVPALVQEISKGNYICCNPPINLKGYVLGNPITHEDDPNYRIPFSHGMALISDELYESIREACKGNYFNVDPRNTKCLKLVEEFHKCTDKLNEFHILSPDCDTASPDCYLYPFYLISFWANDESVRDALHVNKRSIGKWERCNYLSKPYNKDIKSSVPYHMNNSVSGYRSLIYSGDHDLVVPFLATQAWIKSLNYSIIDEWRPWMIRDQITGYTRTYSNKMTFATVKGSGHTAENKPQESFIMFRRWINGQPL

SEQ ID NO: 25006 - DNA, 1267 bp, Arabidopsis thaliana
  misc_feature (1)..(1267): Ceres Seq. ID no. 4936105
  misc_feature: MA Experiment ID: 108461 Result: Up-regulated in Transcription
  misc_feature: MA Experiment 108461 PARAMETER Experiment Name: At_Germinating_Seeds_cDNA_P Parameter: Age (day) Value: 1 vs. 0
  misc_feature: MA Experiment 108461 PARAMETER Experiment Name: At_Germinating_Seeds_cDNA_P Parameter: Tissue Value: Germinating Seeds
  misc_feature: MA Experiment ID: 108488 Result: Down-regulated in Transcription
  misc_feature: MA Experiment ID: 20000072 Result: Up-regulated in Transcription
  misc_feature: MA Experiment 20000072 PARAMETER Experiment Name: At_100uM_ABA_Mutants_cDNA_P Parameter: Plant Line Value: CS8105
  misc_feature: MA Experiment 20000072 PARAMETER Experiment Name: At_100uM_ABA_Mutants_cDNA_P Parameter: Timepoint (hr) Value: 6
  misc_feature: MA Experiment 20000072 PARAMETER Experiment Name: At_100uM_ABA_Mutants_cDNA_P Parameter: Tissue Value: Aerial
  misc_feature: MA Experiment 20000072 PARAMETER Experiment Name: At_100uM_ABA_Mutants_cDNA_P Parameter: Treatment Value: 100uM ABA vs. No Treatment
  misc_feature: MA Experiment ID: 20000086 Result: Up-regulated in Transcription
  misc_feature: MA Experiment 20000086 PARAMETER Experiment Name: At_100uM_ABA_Mutants_cDNA_P Parameter: Plant Line Value: CS22
  misc_feature: MA Experiment 20000086 PARAMETER Experiment Name: At_100uM_ABA_Mutants_cDNA_P Parameter: Timepoint (hr) Value: 6
  misc_feature: MA Experiment 20000086 PARAMETER Experiment Name: At_100uM_ABA_Mutants_cDNA_P Parameter: Tissue Value: Aerial
  misc_feature: MA Experiment 20000086 PARAMETER Experiment Name: At_100uM_ABA_Mutants_cDNA_P Parameter: Treatment Value: 100uM ABA vs. No Treatment
  misc_feature: MA Experiment ID: 20000087 Result: Up-regulated in Transcription
  misc_feature: MA Experiment 20000087 PARAMETER Experiment Name: At_100uM_ABA_Mutants_cDNA_P Parameter: Plant Line Value: WS
  misc_feature: MA Experiment 20000087 PARAMETER Experiment Name: At_100uM_ABA_Mutants_cDNA_P Parameter: Timepoint (hr) Value: 6
  misc_feature: MA Experiment 20000087 PARAMETER Experiment Name: At_100uM_ABA_Mutants_cDNA_P Parameter: Tissue Value: Aerial
  misc_feature: MA Experiment 20000087 PARAMETER Experiment Name: At_100uM_ABA_Mutants_cDNA_P Parameter: Treatment Value: 100uM ABA vs. No Treatment
  misc_feature: MA Experiment ID: 20000180 Result: Up-regulated in Transcription
  misc_feature: MA Experiment 20000180 PARAMETER Experiment Name: At_Germinating_Seeds_P Parameter: Age (hr) Value: 24 vs. 0
  misc_feature: MA Experiment 20000180 PARAMETER Experiment Name: At_Germinating_Seeds_P Parameter: Tissue Value: Germinating Seeds
  misc_feature: MA Experiment ID: 20000227 Result: Up-regulated in Transcription
  misc_feature: MA Experiment 20000227 PARAMETER Experiment Name: At_Root-Tips-vs-Tops_P Parameter: Tissue Value: Root Tips vs. Root Tops
  misc_feature: MA Experiment ID: 20001757 Result: Down-regulated in Transcription
  misc_feature: MA Experiment 20001757 PARAMETER Experiment Name: At_50mM_NH4NO3_L-to-H_P Parameter: Timepoint (hr) Value: 6
  misc_feature: MA Experiment 20001757 PARAMETER Experiment Name: At_50mM_NH4NO3_L-to-H_P Parameter: Tissue Value: Leaf
  misc_feature: MA Experiment 20001757 PARAMETER Experiment Name: At_50mM_NH4NO3_L-to-H_P Parameter: Treatment Value: 50mM NH4NO3 vs 100mM Mannitol
  misc_feature: Pfam Name: IU_nuc_hydro Pfam Description: Inosine-uridine preferring nucleoside hydrolase
attccaaaagttttttctgttgtgtgtaaaaagcccggatttagagagagatttagttttttttttttttccggcacttgggtccttcaaagtctccgccttctgccgtgttgaagttcgatggcgataggagaccgcaagaagattatcatcgatactgatcctggaatcgatgatgcaatggcgatattcgtagctttaaattcacctgaagttgatgtcattggcctcactactatctttggaaacgtgtataccactctcgccactcgaaacgccttgcatttgttggaggttgcgggtaggaccgatattccggtggctgaaggaacacataaaaccttcttgaacgatacgaagcttcgaatagctgactttgttcatggaaaagatgggcttggcaaccaaaacttccctccacctaaaggaaaaccaattgaaaagtctggacctgagtttttagttgaacaagcaaagctttgccctggtgaaatcacggttgttgctttgggaccactaacaaatctcgcgttggctgttcagcttgatccagagttttcgaaaaatgtcggacaaattgttcttcttggtggagcatttgcagtaaacggaaatgtaaatccagcttcggaagctaatatttttggcgatcccgaagctgcagatattgtgttcacatgtggggccgatataattgctgtgggaatcaatgtgacccatcaagttattatgacagctgatgacaaggacaaactagcatcatcgaaggggaaattagctcaatatctctgtaaaatccttgatgtgtactatgattatcatctcacggcttacgaaatcaaaggtgtgtaccttcatgatcctgcgacgatccttgcggctttccttccttctctattcacttatacagaaggagttgctagagtgcagacaagtggtatcactaggggactcactttactgtacaacaatcttaagaggtttgaggaagcgaacgagtggtcagacaaaccaacggtaaaagtggcagtgacggttgatgctcctgcagtcgtgaagctcataatggataggcttatggagtcttaaaccatcttgggtcgttaattagttatctctttctctttgatgtttcactattgcgagccatttctcttgttaaaaataaggctcctcttgctgcattatttatttattgtttaatctttattaaaacgaatattattatgttaccaattaccaataataaagttaagatttttcctcc

SEQ ID NO: 25007 - protein, 322 aa, Arabidopsis thaliana
  peptide (1)..(322): Ceres Seq. ID no. 4936106
  misc_feature: Pfam Name: IU_nuc_hydro Pfam Description: Inosine-uridine preferring nucleoside hydrolase
  misc_feature (8)..(314): Homolog of NCBI NO: 22984963 NR Description: hypothetical protein [Burkholderia fungorum]
  misc_feature (4)..(315): Homolog of NCBI NO: 17935486 NR Description: inosine-uridine preferring nucleoside hydrolase
  misc_feature (4)..(315): Homolog of NCBI NO: 15888904 NR Description: AGR_C_2923p [Agrobacterium tumefaciens]
  misc_feature (240)..(288): Homolog of NCBI NO: 25321061 NR Description: hypothetical protein At2g36310 [imported] -
  misc_feature (21)..(244): Homolog of NCBI NO: 25321061 NR Description: hypothetical protein At2g36310 [imported] -
  misc_feature (3)..(321): Homolog of NCBI NO: 18404099 NR Description: expressed protein
  misc_feature (6)..(319): Homolog of NCBI NO: 30089728 NR Description: putative inosine-uridine preferring nucleoside
  misc_feature (206)..(322): Homolog of NCBI NO: 25321071 NR Description: hypothetical protein [imported] - Arabidopsis
  misc_feature (1)..(205): Homolog of NCBI NO: 25321071 NR Description: hypothetical protein [imported] - Arabidopsis
  misc_feature (1)..(322): Homolog of NCBI NO: 18390550 NR Description: expressed protein
MAIGDRKKIIIDTDPGIDDAMAIFVALNSPEVDVIGLTTIFGNVYTTLATRNALHLLEVAGRTDIPVAEGTHKTFLNDTKLRIADFVHGKDGLGNQNFPPPKGKPIEKSGPEFLVEQAKLCPGEITVVALGPLTNLALAVQLDPEFSKNVGQIVLLGGAFAVNGNVNPASEANIFGDPEAADIVFTCGADIIAVGINVTHQVIMTADDKDKLASSKGKLAQYLCKILDVYYDYHLTAYEIKGVYLHDPATILAAFLPSLFTYTEGVARVQTSGITRGLTLLYNNLKRFEEANEWSDKPTVKVAVTVDAPAVVKLIMDRLMES

SEQ ID NO: 25008 - protein, 302 aa, Arabidopsis thaliana
  peptide (1)..(302): Ceres Seq. ID no. 4936107
  misc_feature: Pfam Name: IU_nuc_hydro Pfam Description: Inosine-uridine preferring nucleoside hydrolase
  misc_feature (1)..(294): Homolog of NCBI NO: 22984963 NR Description: hypothetical protein [Burkholderia fungorum]
  misc_feature (1)..(295): Homolog of NCBI NO: 17935486 NR Description: inosine-uridine preferring nucleoside hydrolase
  misc_feature (1)..(295): Homolog of NCBI NO: 15888904 NR Description: AGR_C_2923p [Agrobacterium tumefaciens]
  misc_feature (220)..(268): Homolog of NCBI NO: 25321061 NR Description: hypothetical protein At2g36310 [imported] -
  misc_feature (1)..(224): Homolog of NCBI NO: 25321061 NR Description: hypothetical protein At2g36310 [imported] -
  misc_feature (1)..(301): Homolog of NCBI NO: 18404099 NR Description: expressed protein
  misc_feature (1)..(299): Homolog of NCBI NO: 30089728 NR Description: putative inosine-uridine preferring nucleoside
  misc_feature (186)..(302): Homolog of NCBI NO: 25321071 NR Description: hypothetical protein [imported] - Arabidopsis
  misc_feature (1)..(185): Homolog of NCBI NO: 25321071 NR Description: hypothetical protein [imported] - Arabidopsis
  misc_feature (1)..(302): Homolog of NCBI NO: 18390550 NR Description: expressed protein
MAIFVALNSPEVDVIGLTTIFGNVYTTLATRNALHLLEVAGRTDIPVAEGTHKTFLNDTKLRIADFVHGKDGLGNQNFPPPKGKPIEKSGPEFLVEQAKLCPGEITVVALGPLTNLALAVQLDPEFSKNVGQIVLLGGAFAVNGNVNPASEANIFGDPEAADIVFTCGADIIAVGINVTHQVIMTADDKDKLASSKGKLAQYLCKILDVYYDYHLTAYEIKGVYLHDPATILAAFLPSLFTYTEGVARVQTSGITRGLTLLYNNLKRFEEANEWSDKPTVKVAVTVDAPAVVKLIMDRLMES

SEQ ID NO: 25009 - DNA, 1565 bp, Arabidopsis thaliana
  misc_feature (1)..(1565): Ceres Seq. ID no. 13487823
  misc_feature: MA Experiment ID: 108462 Result: Down-regulated in Transcription
  misc_feature: MA Experiment 108462 PARAMETER Experiment Name: At_Germinating_Seeds_cDNA_P Parameter: Age (day) Value: 2 vs. 0
  misc_feature: MA Experiment 108462 PARAMETER Experiment Name: At_Germinating_Seeds_cDNA_P Parameter: Tissue Value: Germinating Seeds
  misc_feature: MA Experiment ID: 108463 Result: Down-regulated in Transcription
  misc_feature: MA Experiment 108463 PARAMETER Experiment Name: At_Germinating_Seeds_cDNA_P Parameter: Age (day) Value: 3 vs. 0
  misc_feature: MA Experiment 108463 PARAMETER Experiment Name: At_Germinating_Seeds_cDNA_P Parameter: Tissue Value: Germinating Seeds
  misc_feature: MA Experiment ID: 108464 Result: Down-regulated in Transcription
  misc_feature: MA Experiment 108464 PARAMETER Experiment Name: At_Germinating_Seeds_cDNA_P Parameter: Age (day) Value: 4 vs. 0
  misc_feature: MA Experiment 108464 PARAMETER Experiment Name: At_Germinating_Seeds_cDNA_P Parameter: Tissue Value: Germinating Seeds
  misc_feature: MA Experiment ID: 108474 Result: Down-regulated in Transcription
  misc_feature: MA Experiment 108474 PARAMETER Experiment Name: At_Drought_Flowers_cDNA_P Parameter: Timepoint (hr) Value: null
  misc_feature: MA Experiment 108474 PARAMETER Experiment Name: At_Drought_Flowers_cDNA_P Parameter: Treatment Value: Drought vs. No Drought
  misc_feature: MA Experiment ID: 20000171 Result: Up-regulated in Transcription
  misc_feature: MA Experiment 20000171 PARAMETER Experiment Name: At_42deg_Heat_P Parameter: Age (day) Value: 14
  misc_feature: MA Experiment 20000171 PARAMETER Experiment Name: At_42deg_Heat_P Parameter: Organism Value: A. thaliana
  misc_feature: MA Experiment 20000171 PARAMETER Experiment Name: At_42deg_Heat_P Parameter: Plant Line Value: WS
  misc_feature: MA Experiment 20000171 PARAMETER Experiment Name: At_42deg_Heat_P Parameter: Temperature (deg C) Value: 42 vs. 22
  misc_feature: MA Experiment 20000171 PARAMETER Experiment Name: At_42deg_Heat_P Parameter: Timepoint (hr) Value: 1
  misc_feature: MA Experiment 20000171 PARAMETER Experiment Name: At_42deg_Heat_P Parameter: Tissue Value: Aerial
  misc_feature: MA Experiment ID: 20000173 Result: Up-regulated in Transcription
  misc_feature: MA Experiment 20000173 PARAMETER Experiment Name: At_42deg_Heat_P Parameter: Age (day) Value: 14
  misc_feature: MA Experiment 20000173 PARAMETER Experiment Name: At_42deg_Heat_P Parameter: Organism Value: A. thaliana
  misc_feature: MA Experiment 20000173 PARAMETER Experiment Name: At_42deg_Heat_P Parameter: Plant Line Value: WS
  misc_feature: MA Experiment 20000173 PARAMETER Experiment Name: At_42deg_Heat_P Parameter: Temperature (deg C) Value: 42 vs. 22
  misc_feature: MA Experiment 20000173 PARAMETER Experiment Name: At_42deg_Heat_P Parameter: Timepoint (hr) Value: 6
  misc_feature: MA Experiment 20000173 PARAMETER Experiment Name: At_42deg_Heat_P Parameter: Tissue Value: Aerial
  misc_feature: MA Experiment ID: 20000180 Result: Down-regulated in Transcription
  misc_feature: MA Experiment 20000180 PARAMETER Experiment Name: At_Germinating_Seeds_P Parameter: Age (hr) Value: 24 vs. 0
  misc_feature: MA Experiment 20000180 PARAMETER Experiment Name: At_Germinating_Seeds_P Parameter: Tissue Value: Germinating Seeds
  misc_feature: MA Experiment ID: 20001556 Result: Up-regulated in Transcription
  misc_feature: MA Experiment 20001556 PARAMETER Experiment Name: At_Drought_Soil_Dry_P Parameter: Age (day) Value: 26
  misc_feature: MA Experiment 20001556 PARAMETER Experiment Name: At_Drought_Soil_Dry_P Parameter: Organism Value: A. thaliana
  misc_feature: MA Experiment 20001556 PARAMETER Experiment Name: At_Drought_Soil_Dry_P Parameter: Plant Line Value: WS
  misc_feature: MA Experiment 20001556 PARAMETER Experiment Name: At_Drought_Soil_Dry_P Parameter: Post Timepoint (hr) Value: None
  misc_feature: MA Experiment 20001556 PARAMETER Experiment Name: At_Drought_Soil_Dry_P Parameter: Post-Treatment Value: None
  misc_feature: MA Experiment 20001556 PARAMETER Experiment Name: At_Drought_Soil_Dry_P Parameter: Timepoint (day) Value: 12
  misc_feature: MA Experiment 20001556 PARAMETER Experiment Name: At_Drought_Soil_Dry_P Parameter: Treatment Value: Drought vs. No Drought
  misc_feature: MA Experiment ID: 20001558 Result: Up-regulated in Transcription
  misc_feature: MA Experiment 20001558 PARAMETER Experiment Name: At_Drought_Soil_Dry_P Parameter: Age (day) Value: 27
  misc_feature: MA Experiment 20001558 PARAMETER Experiment Name: At_Drought_Soil_Dry_P Parameter: Organism Value: A. thaliana
  misc_feature: MA Experiment 20001558 PARAMETER Experiment Name: At_Drought_Soil_Dry_P Parameter: Plant Line Value: WS
  misc_feature: MA Experiment 20001558 PARAMETER Experiment Name: At_Drought_Soil_Dry_P Parameter: Post Timepoint (hr) Value: 6
  misc_feature: MA Experiment 20001558 PARAMETER Experiment Name: At_Drought_Soil_Dry_P Parameter: Post-Treatment Value: Re-Water vs. No Drought
  misc_feature: MA Experiment 20001558 PARAMETER Experiment Name: At_Drought_Soil_Dry_P Parameter: Timepoint (day) Value: 13
  misc_feature: MA Experiment 20001558 PARAMETER Experiment Name: At_Drought_Soil_Dry_P Parameter: Treatment Value: Drought vs. No Drought
  misc_feature: MA Experiment ID: 20001904 Result: Up-regulated in Transcription
  misc_feature: MA Experiment 20001904 PARAMETER Experiment Name: At_Drought_Reproduction_P Parameter: Age (day) Value: 37
  misc_feature: MA Experiment 20001904 PARAMETER Experiment Name: At_Drought_Reproduction_P Parameter: Organism Value: A. thaliana
  misc_feature: MA Experiment 20001904 PARAMETER Experiment Name: At_Drought_Reproduction_P Parameter: Plant Line Value: WS
  misc_feature: MA Experiment 20001904 PARAMETER Experiment Name: At_Drought_Reproduction_P Parameter: Timepoint (day) Value: 7
  misc_feature: MA Experiment 20001904 PARAMETER Experiment Name: At_Drought_Reproduction_P Parameter: Tissue Value: Rosettes
  misc_feature: MA Experiment 20001904 PARAMETER Experiment Name: At_Drought_Reproduction_P Parameter: Treatment Value: Drought vs. No Drought
  misc_feature: MA Experiment ID: 20001906 Result: Up-regulated in Transcription
  misc_feature: MA Experiment 20001906 PARAMETER Experiment Name: At_Drought_Reproduction_P Parameter: Age (day) Value: 35
  misc_feature: MA Experiment 20001906 PARAMETER Experiment Name: At_Drought_Reproduction_P Parameter: Organism Value: A. thaliana
  misc_feature: MA Experiment 20001906 PARAMETER Experiment Name: At_Drought_Reproduction_P Parameter: Plant Line Value: WS
  misc_feature: MA Experiment 20001906 PARAMETER Experiment Name: At_Drought_Reproduction_P Parameter: Timepoint (day) Value: 5
  misc_feature: MA Experiment 20001906 PARAMETER Experiment Name: At_Drought_Reproduction_P Parameter: Tissue Value: Siliques
  misc_feature: MA Experiment 20001906 PARAMETER Experiment Name: At_Drought_Reproduction_P Parameter: Treatment Value: Drought vs. No Drought
ataaatgggtgtatatatacatctttggctataaatataaggtcgaaccaaaataaaatatagatttggggaaactaataaatgatatagagaatccacctctctcccttatttttttttcttggtttcttgacctattattattgattagtaatagtgagagaggcatattttggagatacacataaacacataaattggaagaataaaataaaagagagtgagagatggctaaatcagatatgttgccgttcttggcgatggtgttggtgcaaatcggctacgcaggcatgaacattacgtcgaagatggctatggaggccggtatgaagccactcatcctggtcgcttatcgtcagatatttgccactatcgccacttttccggtcgcattttttctcgaacggaagacaagaccgaagatcacacttaggattcttgtccaagtcttcttctgctccattactggtgcgactggaaaccaagtgctatatttcgtaggacttcagaattcatctccgaccattgcttgtgccttaactaatctcttaccagcggtcactttcctcctcgccgcaatattcagacaagaaaccgtggggatcaagaaggcatcaggacaagccaaagtgatagggacgctagtatgtgtgatcggagccatggttctctccttctaccatggtcacaccatcggcattggagaatccaagatccattgggcctacgctgaaaacatcacgaaacatggttccagttctggccattctaatttcttcttgggaccttttcttattatggctgctgccgtttcttgggccgcttggttcattatccagacgaagatgagtgaaacatttgcagcaccgtacacgagcacactactaatgtgtttgatgggaagtatccaatgtggagccattgctttgatctccgatcatacaatctctgattggtctctcagctctcctctccgcttcatatccgccctttatgccggagtggtggcgtctgcgttagctttctgcctaatgtcatgggctatgcagaggaaaggtcctctgtacgtctctgttttcagccctttacttctcgtagttgtcgccattttcagctgggctcttcttgaagagaaactctacaccggcacgtttatgggatcagcacttgtggttattggtctctatggcgtattgtgggggaaagacagagaggtgagtgagaaggaagaagaaagggagaaggtgaaacaacaaaaccataaagtcaagagtgaaagtaatgaagatattgaatcgagattaccggtagcaagtagtggaaatggttccacaaggtctacatcgccttaaaatggtgattgcttcttcatcatatataagtatgagctatggaagaacctttttgggatttcttgttatctaagttactgcaactaaattggattttcggagtgtttaattttgtatcccattttgaggctaatgatggagtgttgatttgtgtgttcatcctatggacaacaaatatcacctgtttgatctctatatatattcagtattctt

SEQ ID NO: 25010 - protein, 374 aa, Arabidopsis thaliana
  peptide (1)..(374): Ceres Seq. ID no. 13487824
  misc_feature (195)..(324): Pfam Name: Integral membrane protein DUF6 Pfam Description: Integral membrane protein DUF6
  misc_feature (8)..(334): Homolog of NCBI NO: 34908998 NR Description: nodulin-like protein [Oryza sativa (japonica
  misc_feature (8)..(332): Homolog of NCBI NO: 2598575 NR Description: MtN21 [Medicago truncatula]
  misc_feature (8)..(347): Homolog of NCBI NO: 38345836 NR Description: OSJNBa0070M12.19 [Oryza sativa (japonica
  misc_feature (8)..(372): Homolog of NCBI NO: 15240683 NR Description: nodulin MtN21 family protein [Arabidopsis
  misc_feature (5)..(335): Homolog of NCBI NO: 34894456 NR Description: putative MtN21 [Oryza sativa (japonica
  misc_feature (4)..(367): Homolog of NCBI NO: 28932732 NR Description: putative nodulin protein [Gossypium hirsutum]
  misc_feature (4)..(370): Homolog of NCBI NO: 28932880 NR Description: nodulin-like protein [Gossypium hirsutum]
  misc_feature (1)..(374): Homolog of NCBI NO: 25402543 NR Description: hypothetical protein [imported] - Arabidopsis
  misc_feature (12)..(374): Homolog of NCBI NO: 21593499 NR Description: putative nodulin protein, N21 [Arabidopsis
  misc_feature (1)..(374): Homolog of NCBI NO: 15217505 NR Description: nodulin N21 family protein [Arabidopsis thaliana]
MAKSDMLPFLAMVLVQIGYAGMNITSKMAMEAGMKPLILVAYRQIFATIATFPVAFFLERKTRPKITLRILVQVFFCSITGATGNQVLYFVGLQNSSPTIACALTNLLPAVTFLLAAIFRQETVGIKKASGQAKVIGTLVCVIGAMVLSFYHGHTIGIGESKIHWAYAENITKHGSSSGHSNFFLGPFLIMAAAVSWAAWFIIQTKMSETFAAPYTSTLLMCLMGSIQCGAIALISDHTISDWSLSSPLRFISALYAGVVASALAFCLMSWAMQRKGPLYVSVFSPLLLVVVAIFSWALLEEKLYTGTFMGSALVVIGLYGVLWGKDREVSEKEEEREKVKQQNHKVKSESNEDIESRLPVASSGNGSTRSTSP

SEQ ID NO: 25011 - protein, 369 aa, Arabidopsis thaliana
  peptide (1)..(369): Ceres Seq. ID no. 13487825
  misc_feature (190)..(319): Pfam Name: Integral membrane protein DUF6 Pfam Description: Integral membrane protein DUF6
  misc_feature (3)..(367): Homolog of NCBI NO: 15240683 NR Description: nodulin MtN21 family protein [Arabidopsis
  misc_feature (1)..(330): Homolog of NCBI NO: 34894456 NR Description: putative MtN21 [Oryza sativa (japonica
  misc_feature (1)..(362): Homolog of NCBI NO: 28932732 NR Description: putative nodulin protein [Gossypium hirsutum]
  misc_feature (1)..(365): Homolog of NCBI NO: 28932880 NR Description: nodulin-like protein [Gossypium hirsutum]
  misc_feature (3)..(327): Homolog of NCBI NO: 2598575 NR Description: MtN21 [Medicago truncatula]
  misc_feature (3)..(342): Homolog of NCBI NO: 38345836 NR Description: OSJNBa0070M12.19 [Oryza sativa (japonica
  misc_feature (3)..(329): Homolog of NCBI NO: 34908998 NR Description: nodulin-like protein [Oryza sativa (japonica
  misc_feature (1)..(369): Homolog of NCBI NO: 25402543 NR Description: hypothetical protein [imported] - Arabidopsis
  misc_feature (7)..(369): Homolog of NCBI NO: 21593499 NR Description: putative nodulin protein, N21 [Arabidopsis
  misc_feature (1)..(369): Homolog of NCBI NO: 15217505 NR Description: nodulin N21 family protein [Arabidopsis thaliana]
MLPFLAMVLVQIGYAGMNITSKMAMEAGMKPLILVAYRQIFATIATFPVAFFLERKTRPKITLRILVQVFFCSITGATGNQVLYFVGLQNSSPTIACALTNLLPAVTFLLAAIFRQETVGIKKASGQAKVIGTLVCVIGAMVLSFYHGHTIGIGESKIHWAYAENITKHGSSSGHSNFFLGPFLIMAAAVSWAAWFIIQTKMSETFAAPYTSTLLMCLMGSIQCGAIALISDHTISDWSLSSPLRFISALYAGVVASALAFCLMSWAMQRKGPLYVSVFSPLLLVVVAIFSWALLEEKLYTGTFMGSALVVIGLYGVLWGKDREVSEKEEEREKVKQQNHKVKSESNEDIESRLPVASSGNGSTRSTSP

SEQ ID NO: 25012 - protein, 363 aa, Arabidopsis thaliana
  peptide (1)..(363): Ceres Seq. ID no. 13487826
  misc_feature (184)..(313): Pfam Name: Integral membrane protein DUF6 Pfam Description: Integral membrane protein DUF6
  misc_feature (1)..(323): Homolog of NCBI NO: 34908998 NR Description: nodulin-like protein [Oryza sativa (japonica
  misc_feature (1)..(321): Homolog of NCBI NO: 2598575 NR Description: MtN21 [Medicago truncatula]
  misc_feature (1)..(336): Homolog of NCBI NO: 38345836 NR Description: OSJNBa0070M12.19 [Oryza sativa (japonica
  misc_feature (1)..(361): Homolog of NCBI NO: 15240683 NR Description: nodulin MtN21 family protein [Arabidopsis
  misc_feature (1)..(324): Homolog of NCBI NO: 34894456 NR Description: putative MtN21 [Oryza sativa (japonica
  misc_feature (1)..(356): Homolog of NCBI NO: 28932732 NR Description: putative nodulin protein [Gossypium hirsutum]
  misc_feature (1)..(359): Homolog of NCBI NO: 28932880 NR Description: nodulin-like protein [Gossypium hirsutum]
  misc_feature (1)..(363): Homolog of NCBI NO: 25402543 NR Description: hypothetical protein [imported] - Arabidopsis
  misc_feature (1)..(363): Homolog of NCBI NO: 21593499 NR Description: putative nodulin protein, N21 [Arabidopsis
  misc_feature (1)..(363): Homolog of NCBI NO: 15217505 NR Description: nodulin N21 family protein [Arabidopsis thaliana]
MVLVQIGYAGMNITSKMAMEAGMKPLILVAYRQIFATIATFPVAFFLERKTRPKITLRILVQVFFCSITGATGNQVLYFVGLQNSSPTIACALTNLLPAVTFLLAAIFRQETVGIKKASGQAKVIGTLVCVIGAMVLSFYHGHTIGIGESKIHWAYAENITKHGSSSGHSNFFLGPFLIMAAAVSWAAWFIIQTKMSETFAAPYTSTLLMCLMGSIQCGAIALISDHTISDWSLSSPLRFISALYAGVVASALAFCLMSWAMQRKGPLYVSVFSPLLLVVVAIFSWALLEEKLYTGTFMGSALVVIGLYGVLWGKDREVSEKEEEREKVKQQNHKVKSESNEDIESRLPVASSGNGSTRSTSP

SEQ ID NO: 25013 - DNA, 1491 bp, Arabidopsis thaliana
  misc_feature (1)..(1491): Ceres Seq. ID no. 12395997
  misc_feature: MA Experiment ID: 108434 Result: Down-regulated in Transcription
  misc_feature: MA Experiment 108434 PARAMETER Experiment Name: At_Root_Tips_cDNA_P Parameter: Tissue Value: Root Tips
  misc_feature: MA Experiment ID: 108461 Result: Up-regulated in Transcription
  misc_feature: MA Experiment 108461 PARAMETER Experiment Name: At_Germinating_Seeds_cDNA_P Parameter: Age (day) Value: 1 vs. 0
  misc_feature: MA Experiment 108461 PARAMETER Experiment Name: At_Germinating_Seeds_cDNA_P Parameter: Tissue Value: Germinating Seeds
  misc_feature: MA Experiment ID: 108462 Result: Up-regulated in Transcription
  misc_feature: MA Experiment 108462 PARAMETER Experiment Name: At_Germinating_Seeds_cDNA_P Parameter: Age (day) Value: 2 vs. 0
  misc_feature: MA Experiment 108462 PARAMETER Experiment Name: At_Germinating_Seeds_cDNA_P Parameter: Tissue Value: Germinating Seeds
  misc_feature: MA Experiment ID: 108463 Result: Up-regulated in Transcription
  misc_feature: MA Experiment 108463 PARAMETER Experiment Name: At_Germinating_Seeds_cDNA_P Parameter: Age (day) Value: 3 vs. 0
  misc_feature: MA Experiment 108463 PARAMETER Experiment Name: At_Germinating_Seeds_cDNA_P Parameter: Tissue Value: Germinating Seeds
  misc_feature: MA Experiment ID: 108464 Result: Up-regulated in Transcription
  misc_feature: MA Experiment 108464 PARAMETER Experiment Name: At_Germinating_Seeds_cDNA_P Parameter: Age (day) Value: 4 vs. 0
  misc_feature: MA Experiment 108464 PARAMETER Experiment Name: At_Germinating_Seeds_cDNA_P Parameter: Tissue Value: Germinating Seeds
  misc_feature: MA Experiment ID: 108577 Result: Down-regulated in Transcription
  misc_feature: MA Experiment 108577 PARAMETER Experiment Name: At_42deg_Heat_cDNA_P Parameter: Temperature (deg C) Value: 42 vs. 22
  misc_feature: MA Experiment 108577 PARAMETER Experiment Name: At_42deg_Heat_cDNA_P Parameter: Timepoint (hr) Value: 6
  misc_feature: MA Experiment 108577 PARAMETER Experiment Name: At_42deg_Heat_cDNA_P Parameter: Tissue Value: Aerial
  misc_feature: MA Experiment ID: 20000180 Result: Up-regulated in Transcription
  misc_feature: MA Experiment 20000180 PARAMETER Experiment Name: At_Germinating_Seeds_P Parameter: Age (hr) Value: 24 vs. 0
  misc_feature: MA Experiment 20000180 PARAMETER Experiment Name: At_Germinating_Seeds_P Parameter: Tissue Value: Germinating Seeds
  misc_feature: MA Experiment ID: 20000184 Result: Down-regulated in Transcription
  misc_feature: MA Experiment 20000184 PARAMETER Experiment Name: At_Shoots__P Parameter: Age (day) Value: 7
  misc_feature: MA Experiment 20000184 PARAMETER Experiment Name: At_Shoots__P Parameter: Tissue Value: Shoots vs. Whole Plant
  misc_feature: MA Experiment ID: 20001557 Result: Down-regulated in Transcription
  misc_feature: MA Experiment 20001557 PARAMETER Experiment Name: At_Drought_Soil_Dry_P Parameter: Age (day) Value: 27
  misc_feature: MA Experiment 20001557 PARAMETER Experiment Name: At_Drought_Soil_Dry_P Parameter: Organism Value: A. thaliana
  misc_feature: MA Experiment 20001557 PARAMETER Experiment Name: At_Drought_Soil_Dry_P Parameter: Plant Line Value: WS
  misc_feature: MA Experiment 20001557 PARAMETER Experiment Name: At_Drought_Soil_Dry_P Parameter: Post Timepoint (hr) Value: 3
  misc_feature: MA Experiment 20001557 PARAMETER Experiment Name: At_Drought_Soil_Dry_P Parameter: Post-Treatment Value: Re-Water vs. No Drought
  misc_feature: MA Experiment 20001557 PARAMETER Experiment Name: At_Drought_Soil_Dry_P Parameter: Timepoint (day) Value: 13
  misc_feature: MA Experiment 20001557 PARAMETER Experiment Name: At_Drought_Soil_Dry_P Parameter: Treatment Value: Drought vs. No Drought
atgaatgatcgatgtgatctccaagtccaacgtctcctttctatttaccgtgttccttcctttgaagtcattcttcaattcatcgctccattgttcttcagatttcaattttgctgggaaattttagagtaggcgactcctttgatcgccttatttcatttcgaaagttgagattttggatacgaccctcttgatctgacaccggaatgttggttagttaaatggagagaaaaagaacaaaggacagtgaaccaggaccagtccctctgcttgtaccggttgatagatttgggtttctgaaacaggaacatggcagttctcctcaacgtttcaccaagactaaatcatctattaattatgagaaggaggagaagagagtgacaaaatggaggaagatgattggaactgggggtagtgattggaagcattacgttaggagaaaacctcatgttgtcaagaggcggattcgaaaagggatccctgattgcttaaggggtctcgtttggcaattgatctctggaagtcgagaccttttgcttatgaatcccggtgtttatgtgcaactggtgatttatgagacgtcggcatcagaactcgatatcattcgggatatatctcgtactttcccgtcacatgttttcttccagaagagacatggaccaggccaaagatcattatacaatgttctaaaagcatactctgtctatgacagagatgtcggatatgttcagggaatgggtttcatagccggtttgttgcttctttatatgagcgaagaagatgcattctggttattagttgcattactcaaaggagctgtccactccccaatagaaggattgtatcaggcagggcttcctcttgtacagcaatatctgttacagtttgatcagttggtaagagagctaatgcccaaactaggagaacatttcactcaagaaatgatcaatccgagtatgtatgcaagtcaatggttcataaccgtcttttcgtattcacttcctttccattcagcgctacgaatttgggatgtgtttctagctgagggtgttaaaatcgtgttcaaagtcggtttagcattattgaagcattgccatgatgatttgttgaaattgccatttgaggaactcatgcatgctctgaggaatttccctgaagatgccatggatcctgatactttgcttccattggcttattccattaaggtatcaaagcgtttggaagaaatgaaacaggattgtgacaaggccgttgctaaaccgactcaaacggccaaatcggttcgacaatagagtttgatattcttgaaccgaatcaaaccggaaagtggattctcgaagattcttctcattatttgtgcaaattttatctttctctctttttttacaactcgtgtgaaaacaatagaagaattacttttgtaaaaatatatttcgactcaacaactttagattcttctttctttttggtaatgaaaagtcaaatttgagc

SEQ ID NO: 25014 - protein, 356 aa, Arabidopsis thaliana
  peptide (1)..(356): Ceres Seq. ID no. 12395998
  misc_feature (82)..(298): Pfam Name: TBC domain Pfam Description: TBC domain
  misc_feature (120)..(333): Homolog of NCBI NO: 23487611 NR Description: plant adhesion molecule 1-related [Plasmodium
  misc_feature (8)..(335): Homolog of NCBI NO: 38648805 NR Description: DKFZP434P1750 protein [Homo sapiens]
  misc_feature (8)..(335): Homolog of NCBI NO: 21361485 NR Description: DKFZP434P1750 protein [Homo sapiens]
  misc_feature (8)..(335): Homolog of NCBI NO: 34860145 NR Description: similar to DKFZP434P1750 protein [Rattus
  misc_feature (1)..(296): Homolog of NCBI NO: 6957709 NR Description: putative plant adhesion molecule [Arabidopsis
  misc_feature (296)..(349): Homolog of NCBI NO: 30678579 NR Description: plant adhesion molecule -related [Arabidopsis
  misc_feature (1)..(296): Homolog of NCBI NO: 30678579 NR Description: plant adhesion molecule -related [Arabidopsis
  misc_feature (1)..(349): Homolog of NCBI NO: 18396196 NR Description: putative plant adhesion molecule
  misc_feature (59)..(356): Homolog of NCBI NO: 22531279 NR Description: plant adhesion molecule PAM1 [Arabidopsis
  misc_feature (1)..(356): Homolog of NCBI NO: 15237222 NR Description: plant adhesion molecule 1 (PAM1)
MERKRTKDSEPGPVPLLVPVDRFGFLKQEHGSSPQRFTKTKSSINYEKEEKRVTKWRKMIGTGGSDWKHYVRRKPHVVKRRIRKGIPDCLRGLVWQLISGSRDLLLMNPGVYVQLVIYETSASELDIIRDISRTFPSHVFFQKRHGPGQRSLYNVLKAYSVYDRDVGYVQGMGFIAGLLLLYMSEEDAFWLLVALLKGAVHSPIEGLYQAGLPLVQQYLLQFDQLVRELMPKLGEHFTQEMINPSMYASQWFITVFSYSLPFHSALRIWDVFLAEGVKIVFKVGLALLKHCHDDLLKLPFEELMHALRNFPEDAMDPDTLLPLAYSIKVSKRLEEMKQDCDKAVAKPTQTAKSVRQ

SEQ ID NO: 25015 - protein, 298 aa, Arabidopsis thaliana
  peptide (1)..(298): Ceres Seq. ID no. 12395999
  misc_feature (24)..(240): Pfam Name: TBC domain Pfam Description: TBC domain
  misc_feature (62)..(275): Homolog of NCBI NO: 23487611 NR Description: plant adhesion molecule 1-related [Plasmodium
  misc_feature (1)..(277): Homolog of NCBI NO: 38648805 NR Description: DKFZP434P1750 protein [Homo sapiens]
  misc_feature (1)..(277): Homolog of NCBI NO: 21361485 NR Description: DKFZP434P1750 protein [Homo sapiens]
  misc_feature (1)..(277): Homolog of NCBI NO: 34860145 NR Description: similar to DKFZP434P1750 protein [Rattus
  misc_feature (1)..(238): Homolog of NCBI NO: 6957709 NR Description: putative plant adhesion molecule [Arabidopsis
  misc_feature (238)..(291): Homolog of NCBI NO: 30678579 NR Description: plant adhesion molecule -related [Arabidopsis
  misc_feature (1)..(238): Homolog of NCBI NO: 30678579 NR Description: plant adhesion molecule -related [Arabidopsis
  misc_feature (1)..(291): Homolog of NCBI NO: 18396196 NR Description: putative plant adhesion molecule
  misc_feature (1)..(298): Homolog of NCBI NO: 22531279 NR Description: plant adhesion molecule PAM1 [Arabidopsis
  misc_feature (1)..(298): Homolog of NCBI NO: 15237222 NR Description: plant adhesion molecule 1 (PAM1)
MIGTGGSDWKHYVRRKPHVVKRRIRKGIPDCLRGLVWQLISGSRDLLLMNPGVYVQLVIYETSASELDIIRDISRTFPSHVFFQKRHGPGQRSLYNVLKAYSVYDRDVGYVQGMGFIAGLLLLYMSEEDAFWLLVALLKGAVHSPIEGLYQAGLPLVQQYLLQFDQLVRELMPKLGEHFTQEMINPSMYASQWFITVFSYSLPFHSALRIWDVFLAEGVKIVFKVGLALLKHCHDDLLKLPFEELMHALRNFPEDAMDPDTLLPLAYSIKVSKRLEEMKQDCDKAVAKPTQTAKSVRQ

SEQ ID NO: 25016 - protein, 250 aa, Arabidopsis thaliana
  peptide (1)..(250): Ceres Seq. ID no. 12396000
  misc_feature (1)..(192): Pfam Name: TBC domain Pfam Description: TBC domain
  misc_feature (14)..(227): Homolog of NCBI NO: 23487611 NR Description: plant adhesion molecule 1-related [Plasmodium
  misc_feature (1)..(229): Homolog of NCBI NO: 38648805 NR Description: DKFZP434P1750 protein [Homo sapiens]
  misc_feature (1)..(229): Homolog of NCBI NO: 21361485 NR Description: DKFZP434P1750 protein [Homo sapiens]
  misc_feature (1)..(229): Homolog of NCBI NO: 34860145 NR Description: similar to DKFZP434P1750 protein [Rattus
  misc_feature (1)..(190): Homolog of NCBI NO: 6957709 NR Description: putative plant adhesion molecule [Arabidopsis
  misc_feature (190)..(243): Homolog of NCBI NO: 30678579 NR Description: plant adhesion molecule -related [Arabidopsis
  misc_feature (1)..(190): Homolog of NCBI NO: 30678579 NR Description: plant adhesion molecule -related [Arabidopsis
  misc_feature (1)..(243): Homolog of NCBI NO: 18396196 NR Description: putative plant adhesion molecule
  misc_feature (1)..(250): Homolog of NCBI NO: 22531279 NR Description: plant adhesion molecule PAM1 [Arabidopsis
  misc_feature (1)..(250): Homolog of NCBI NO: 15237222 NR Description: plant adhesion molecule 1 (PAM1)
MNPGVYVQLVIYETSASELDIIRDISRTFPSHVFFQKRHGPGQRSLYNVLKAYSVYDRDVGYVQGMGFIAGLLLLYMSEEDAFWLLVALLKGAVHSPIEGLYQAGLPLVQQYLLQFDQLVRELMPKLGEHFTQEMINPSMYASQWFITVFSYSLPFHSALRIWDVFLAEGVKIVFKVGLALLKHCHDDLLKLPFEELMHALRNFPEDAMDPDTLLPLAYSIKVSKRLEEMKQDCDKAVAKPTQTAKSVRQ

SEQ ID NO: 25017 - DNA, 875 bp, Arabidopsis thaliana
  misc_feature (1)..(875): Ceres Seq. ID no. 13575759
  misc_feature: MA Experiment ID: 20000184 Result: Up-regulated in Transcription
  misc_feature: MA Experiment 20000184 PARAMETER Experiment Name: At_Shoots__P Parameter: Age (day) Value: 7
  misc_feature: MA Experiment 20000184 PARAMETER Experiment Name: At_Shoots__P Parameter: Tissue Value: Shoots vs. Whole Plant
  misc_feature: MA Experiment ID: 20000439 Result: Down-regulated in Transcription
  misc_feature: MA Experiment 20000439 PARAMETER Experiment Name: At_Roots__P Parameter: Age (day) Value: 14 vs. 21
  misc_feature: MA Experiment 20000439 PARAMETER Experiment Name: At_Roots__P Parameter: Organism Value: A. thaliana
  misc_feature: MA Experiment 20000439 PARAMETER Experiment Name: At_Roots__P Parameter: Tissue Value: Roots vs. Whole Plant
  misc_feature: MA Experiment ID: 20000441 Result: Up-regulated in Transcription
  misc_feature: MA Experiment 20000441 PARAMETER Experiment Name: At_1uM_BR-BRZ__P Parameter: Tissue Value: Shoot Apices
  misc_feature: MA Experiment 20000441 PARAMETER Experiment Name: At_1uM_BR-BRZ__P Parameter: Treatment Value: 1uM BR vs. No Treatment
  misc_feature: MA Experiment ID: 20000451 Result: Up-regulated in Transcription
  misc_feature: MA Experiment 20000451 PARAMETER Experiment Name: At_CS6879_Shoots-Roots_P Parameter: Age (day) Value: 14
  misc_feature: MA Experiment 20000451 PARAMETER Experiment Name: At_CS6879_Shoots-Roots_P Parameter: Organism Value: A. thaliana
  misc_feature: MA Experiment 20000451 PARAMETER Experiment Name: At_CS6879_Shoots-Roots_P Parameter: Plant Line Value: CS6879 vs. WS
  misc_feature: MA Experiment 20000451 PARAMETER Experiment Name: At_CS6879_Shoots-Roots_P Parameter: Tissue Value: Roots
  misc_feature: MA Experiment ID: 20001451 Result: Up-regulated in Transcription
  misc_feature: MA Experiment 20001451 PARAMETER Experiment Name: At_Far-red-induction_P Parameter: Age (day) Value: 7
  misc_feature: MA Experiment 20001451 PARAMETER Experiment Name: At_Far-red-induction_P Parameter: Light Value: Far-red vs. White
  misc_feature: MA Experiment 20001451 PARAMETER Experiment Name: At_Far-red-induction_P Parameter: Organism Value: A. thaliana
  misc_feature: MA Experiment 20001451 PARAMETER Experiment Name: At_Far-red-induction_P Parameter: Plant Line Value: Columbia
  misc_feature: MA Experiment 20001451 PARAMETER Experiment Name: At_Far-red-induction_P Parameter: Timepoint (hr) Value: 24
  misc_feature: MA Experiment 20001451 PARAMETER Experiment Name: At_Far-red-induction_P Parameter: Tissue Value: Whole Plant
  misc_feature: MA Experiment ID: 20001555 Result: Down-regulated in Transcription
  misc_feature: MA Experiment 20001555 PARAMETER Experiment Name: At_Drought_Soil_Dry_P Parameter: Age (day) Value: 24
  misc_feature: MA Experiment 20001555 PARAMETER Experiment Name: At_Drought_Soil_Dry_P Parameter: Organism Value: A. thaliana
  misc_feature: MA Experiment 20001555 PARAMETER Experiment Name: At_Drought_Soil_Dry_P Parameter: Plant Line Value: WS
  misc_feature: MA Experiment 20001555 PARAMETER Experiment Name: At_Drought_Soil_Dry_P Parameter: Post Timepoint (hr) Value: None
  misc_feature: MA Experiment 20001555 PARAMETER Experiment Name: At_Drought_Soil_Dry_P Parameter: Post-Treatment Value: None
  misc_feature: MA Experiment 20001555 PARAMETER Experiment Name: At_Drought_Soil_Dry_P Parameter: Timepoint (day) Value: 10
  misc_feature: MA Experiment 20001555 PARAMETER Experiment Name: At_Drought_Soil_Dry_P Parameter: Treatment Value: Drought vs. No Drought
  misc_feature: MA Experiment ID: 20001556 Result: Down-regulated in Transcription
  misc_feature: MA Experiment 20001556 PARAMETER Experiment Name: At_Drought_Soil_Dry_P Parameter: Age (day) Value: 26
  misc_feature: MA Experiment 20001556 PARAMETER Experiment Name: At_Drought_Soil_Dry_P Parameter: Organism Value: A. thaliana
  misc_feature: MA Experiment 20001556 PARAMETER Experiment Name: At_Drought_Soil_Dry_P Parameter: Plant Line Value: WS
  misc_feature: MA Experiment 20001556 PARAMETER Experiment Name: At_Drought_Soil_Dry_P Parameter: Post Timepoint (hr) Value: None
  misc_feature: MA Experiment 20001556 PARAMETER Experiment Name: At_Drought_Soil_Dry_P Parameter: Post-Treatment Value: None
  misc_feature: MA Experiment 20001556 PARAMETER Experiment Name: At_Drought_Soil_Dry_P Parameter: Timepoint (day) Value: 12
  misc_feature: MA Experiment 20001556 PARAMETER Experiment Name: At_Drought_Soil_Dry_P Parameter: Treatment Value: Drought vs. No Drought
  misc_feature: MA Experiment ID: 20001559 Result: Down-regulated in Transcription
  misc_feature: MA Experiment 20001559 PARAMETER Experiment Name: At_Drought_Soil_Dry_P Parameter: Age (day) Value: 28
  misc_feature: MA Experiment 20001559 PARAMETER Experiment Name: At_Drought_Soil_Dry_P Parameter: Organism Value: A. thaliana
  misc_feature: MA Experiment 20001559 PARAMETER Experiment Name: At_Drought_Soil_Dry_P Parameter: Plant Line Value: WS
  misc_feature: MA Experiment 20001559 PARAMETER Experiment Name: At_Drought_Soil_Dry_P Parameter: Post Timepoint (hr) Value: 29
  misc_feature: MA Experiment 20001559 PARAMETER Experiment Name: At_Drought_Soil_Dry_P Parameter: Post-Treatment Value: Re-Water vs. No Drought
  misc_feature: MA Experiment 20001559 PARAMETER Experiment Name: At_Drought_Soil_Dry_P Parameter: Timepoint (day) Value: 14
  misc_feature: MA Experiment 20001559 PARAMETER Experiment Name: At_Drought_Soil_Dry_P Parameter: Treatment Value: Drought vs. No Drought
  misc_feature: MA Experiment ID: 20001560 Result: Down-regulated in Transcription
  misc_feature: MA Experiment 20001560 PARAMETER Experiment Name: At_Drought_Soil_Dry_P Parameter: Age (day) Value: 28
  misc_feature: MA Experiment 20001560 PARAMETER Experiment Name: At_Drought_Soil_Dry_P Parameter: Organism Value: A. thaliana
  misc_feature: MA Experiment 20001560 PARAMETER Experiment Name: At_Drought_Soil_Dry_P Parameter: Plant Line Value: WS
  misc_feature: MA Experiment 20001560 PARAMETER Experiment Name: At_Drought_Soil_Dry_P Parameter: Post Timepoint (hr) Value: None
  misc_feature: MA Experiment 20001560 PARAMETER Experiment Name: At_Drought_Soil_Dry_P Parameter: Post-Treatment Value: None
  misc_feature: MA Experiment 20001560 PARAMETER Experiment Name: At_Drought_Soil_Dry_P Parameter: Timepoint (day) Value: 14
  misc_feature: MA Experiment 20001560 PARAMETER Experiment Name: At_Drought_Soil_Dry_P Parameter: Treatment Value: Drought vs. No Drought
aaaataccaagcaaccaatttcttgcaattttcctctcctcccaaccaaaacacaagagccaagaacaaagaaaccatggatcatgatcacatgcatggaatgcctcgaccatcatcatcatcatcatcatcaccatcatccatgatgaacaatggatccatgaacgaaggaggaggacatcaccacatgaagatgatgatgcacatgaccttcttttggggcaagaacacggaggttctcttctccggttggcccggaacaagctccggcatgtatgctctttgtcttatctttgtcttctttctcgccgtcctcaccgaatggcttgctcattcctctctcctccgtggctccaccggagattcggctaatcgtgccgccgggttaatccaaaccgccgtgtataccctccgtatcggcctcgcctatctagtcatgctcgccgtcatgtcgtttaacgccggtgtgtttctcgtcgctctggccggtcatgccgttggtttcatgttgttcggaagccaaactttccggaatacctccgatgaccggaaaactaactatgttcctccctcaggttgtgcttgttgatgataatatcaatgctttatatatatgtatggattgatccatgcttgtgattcaaattaaagatctagggtttgtagttttcttggttattttatggattgttcttgaggttcatgtgtgtgtgaatgtgaggaggaggaatatttgatattttctatcgtttgcttaattttttttgcttttgttttattctgctggctaatggtgaaagctgagtatacaatttactacttttgggctccaatttgtttttttttttctctcagaatttcatatataatttctt

SEQ ID NO: 25018 - protein, 195 aa, Arabidopsis thaliana
  peptide (1)..(195): Ceres Seq. ID no. 13575760
  misc_feature (67)..(183): Pfam Name: Ctr copper transporter family Pfam Description: Ctr copper transporter family
  misc_feature (67)..(183): Pfam Name: Ctr copper transporter family Pfam Description: Ctr copper transporter family
  misc_feature (62)..(178): Homolog of NCBI NO: 18496856 NR Description: COPT4 [Arabidopsis thaliana]
  misc_feature (62)..(178): Homolog of NCBI NO: 30687312 NR Description: COPT4 protein [Arabidopsis thaliana]
  misc_feature (58)..(171): Homolog of NCBI NO: 34909916 NR Description: P0665A11.18 [Oryza sativa (japonica
  misc_feature (60)..(185): Homolog of NCBI NO: 18496854 NR Description: copper transporter-like protein COPT3
  misc_feature (31)..(185): Homolog of NCBI NO: 21592951 NR Description: copper transport protein-like [Arabidopsis
  misc_feature (62)..(178): Homolog of NCBI NO: 18496856 NR Description: COPT4 [Arabidopsis thaliana]
  misc_feature (58)..(171): Homolog of NCBI NO: 34909916 NR Description: P0665A11.18 [Oryza sativa (japonica
  misc_feature (31)..(185): Homolog of NCBI NO: 21592951 NR Description: copper transport protein-like [Arabidopsis
  misc_feature (26)..(195): Homolog of NCBI NO: 15237802 NR Description: copper transport protein [Arabidopsis thaliana]
  misc_feature (26)..(195): Homolog of NCBI NO: 11288418 NR Description: copper transport protein [imported] - Arabidopsis
  misc_feature (26)..(195): Homolog of NCBI NO: 15232677 NR Description: copper transport protein - like protein
  misc_feature (43)..(184): Homolog of NCBI NO: 30683324 NR Description: copper transport protein -related protein
  misc_feature (31)..(185): Homolog of NCBI NO: 15237804 NR Description: copper transport protein - like [Arabidopsis
  misc_feature (60)..(185): Homolog of NCBI NO: 18496854 NR Description: copper transporter-like protein COPT3
  misc_feature (62)..(178): Homolog of NCBI NO: 30687312 NR Description: COPT4 protein [Arabidopsis thaliana]
  misc_feature (31)..(185): Homolog of NCBI NO: 15237804 NR Description: copper transport protein - like [Arabidopsis
  misc_feature (43)..(184): Homolog of NCBI NO: 30683324 NR Description: copper transport protein -related protein
  misc_feature (26)..(195): Homolog of NCBI NO: 15232677 NR Description: copper transport protein - like protein
  misc_feature (26)..(195): Homolog of NCBI NO: 11288418 NR Description: copper transport protein [imported] - Arabidopsis
  misc_feature (26)..(195): Homolog of NCBI NO: 15237802 NR Description: copper transport protein [Arabidopsis thaliana]
KYQATNFLQFSSPPNQNTRAKNKETMDHDHMHGMPRPSSSSSSSPSSMMNNGSMNEGGGHHHMKMMMHMTFFWGKNTEVLFSGWPGTSSGMYALCLIFVFFLAVLTEWLAHSSLLRGSTGDSANRAAGLIQTAVYTLRIGLAYLVMLAVMSFNAGVFLVALAGHAVGFMLFGSQTFRNTSDDRKTNYVPPSGCAC

SEQ ID NO: 25019 - protein, 170 aa, Arabidopsis thaliana
  peptide (1)..(170): Ceres Seq. ID no. 13575761
  misc_feature (42)..(158): Pfam Name: Ctr copper transporter family Pfam Description: Ctr copper transporter family
  misc_feature (42)..(158): Pfam Name: Ctr copper transporter family Pfam Description: Ctr copper transporter family
  misc_feature (37)..(153): Homolog of NCBI NO: 18496856 NR Description: COPT4 [Arabidopsis thaliana]
  misc_feature (37)..(153): Homolog of NCBI NO: 30687312 NR Description: COPT4 protein [Arabidopsis thaliana]
  misc_feature (33)..(146): Homolog of NCBI NO: 34909916 NR Description: P0665A11.18 [Oryza sativa (japonica
  misc_feature (35)..(160): Homolog of NCBI NO: 18496854 NR Description: copper transporter-like protein COPT3
  misc_feature (6)..(160): Homolog of NCBI NO: 21592951 NR Description: copper transport protein-like [Arabidopsis
  misc_feature (37)..(153): Homolog of NCBI NO: 18496856 NR Description: COPT4 [Arabidopsis thaliana]
  misc_feature (33)..(146): Homolog of NCBI NO: 34909916 NR Description: P0665A11.18 [Oryza sativa (japonica
  misc_feature (6)..(160): Homolog of NCBI NO: 21592951 NR Description: copper transport protein-like [Arabidopsis
  misc_feature (1)..(170): Homolog of NCBI NO: 15237802 NR Description: copper transport protein [Arabidopsis thaliana]
  misc_feature (1)..(170): Homolog of NCBI NO: 11288418 NR Description: copper transport protein [imported] - Arabidopsis
  misc_feature (1)..(170): Homolog of NCBI NO: 15232677 NR Description: copper transport protein - like protein
  misc_feature (18)..(159): Homolog of NCBI NO: 30683324 NR Description: copper transport protein -related protein
  misc_feature (6)..(160): Homolog of NCBI NO: 15237804 NR Description: copper transport protein - like [Arabidopsis
  misc_feature (35)..(160): Homolog of NCBI NO: 18496854 NR Description: copper transporter-like protein COPT3
  misc_feature (37)..(153): Homolog of NCBI NO: 30687312 NR Description: COPT4 protein [Arabidopsis thaliana]
  misc_feature (6)..(160): Homolog of NCBI NO: 15237804 NR Description: copper transport protein - like [Arabidopsis
  misc_feature (18)..(159): Homolog of NCBI NO: 30683324 NR Description: copper transport protein -related protein
  misc_feature (1)..(170): Homolog of NCBI NO: 15232677 NR Description: copper transport protein - like protein
  misc_feature (1)..(170): Homolog of NCBI NO: 11288418 NR Description: copper transport protein [imported] - Arabidopsis
  misc_feature (1)..(170): Homolog of NCBI NO: 15237802 NR Description: copper transport protein [Arabidopsis thaliana]
MDHDHMHGMPRPSSSSSSSPSSMMNNGSMNEGGGHHHMKMMMHMTFFWGKNTEVLFSGWPGTSSGMYALCLIFVFFLAVLTEWLAHSSLLRGSTGDSANRAAGLIQTAVYTLRIGLAYLVMLAVMSFNAGVFLVALAGHAVGFMLFGSQTFRNTSDDRKTNYVPPSGCAC

SEQ ID NO: 25020 - protein, 165 aa, Arabidopsis thaliana
  peptide (1)..(165): Ceres Seq. ID no. 13575762
  misc_feature (37)..(153): Pfam Name: Ctr copper transporter family Pfam Description: Ctr copper transporter family
  misc_feature (37)..(153): Pfam Name: Ctr copper transporter family Pfam Description: Ctr copper transporter family
  misc_feature (32)..(148): Homolog of NCBI NO: 18496856 NR Description: COPT4 [Arabidopsis thaliana]
  misc_feature (32)..(148): Homolog of NCBI NO: 30687312 NR Description: COPT4 protein [Arabidopsis thaliana]
  misc_feature (28)..(141): Homolog of NCBI NO: 34909916 NR Description: P0665A11.18 [Oryza sativa (japonica
  misc_feature (30)..(155): Homolog of NCBI NO: 18496854 NR Description: copper transporter-like protein COPT3
  misc_feature (1)..(155): Homolog of NCBI NO: 21592951 NR Description: copper transport protein-like [Arabidopsis
  misc_feature (32)..(148): Homolog of NCBI NO: 18496856 NR Description: COPT4 [Arabidopsis thaliana]
  misc_feature (28)..(141): Homolog of NCBI NO: 34909916 NR Description: P0665A11.18 [Oryza sativa (japonica
  misc_feature (1)..(155): Homolog of NCBI NO: 21592951 NR Description: copper transport protein-like [Arabidopsis
  misc_feature (1)..(165): Homolog of NCBI NO: 15237802 NR Description: copper transport protein [Arabidopsis thaliana]
  misc_feature (1)..(165): Homolog of NCBI NO: 11288418 NR Description: copper transport protein [imported] - Arabidopsis
  misc_feature (1)..(165): Homolog of NCBI NO: 15232677 NR Description: copper transport protein - like protein
  misc_feature (13)..(154): Homolog of NCBI NO: 30683324 NR Description: copper transport protein -related protein
  misc_feature (1)..(155): Homolog of NCBI NO: 15237804 NR Description: copper transport protein - like [Arabidopsis
  misc_feature (30)..(155): Homolog of NCBI NO: 18496854 NR Description: copper transporter-like protein COPT3
  misc_feature (32)..(148): Homolog of NCBI NO: 30687312 NR Description: COPT4 protein [Arabidopsis thaliana]
  misc_feature (1)..(155): Homolog of NCBI NO: 15237804 NR Description: copper transport protein - like [Arabidopsis
  misc_feature (13)..(154): Homolog of NCBI NO: 30683324 NR Description: copper transport protein -related protein
  misc_feature (1)..(165): Homolog of NCBI NO: 15232677 NR Description: copper transport protein - like protein
  misc_feature (1)..(165): Homolog of NCBI NO: 11288418 NR Description: copper transport protein [imported] - Arabidopsis
  misc_feature (1)..(165): Homolog of NCBI NO: 15237802 NR Description: copper transport protein [Arabidopsis thaliana]
MHGMPRPSSSSSSSPSSMMNNGSMNEGGGHHHMKMMMHMTFFWGKNTEVLFSGWPGTSSGMYALCLIFVFFLAVLTEWLAHSSLLRGSTGDSANRAAGLIQTAVYTLRIGLAYLVMLAVMSFNAGVFLVALAGHAVGFMLFGSQTFRNTSDDRKTNYVPPSGCAC

SEQ ID NO: 25021 - DNA, 1226 bp, Arabidopsis thaliana
  misc_feature (1)..(1226): Ceres Seq. ID no. 13499986
  misc_feature: MA Experiment ID: 108433 Result: Down-regulated in Transcription
  misc_feature: MA Experiment 108433 PARAMETER Experiment Name: At_rhl_Mutant2_cDNA_P Parameter: Age (day) Value: 7
  misc_feature: MA Experiment 108433 PARAMETER Experiment Name: At_rhl_Mutant2_cDNA_P Parameter: Organism Value: A. thaliana
  misc_feature: MA Experiment 108433 PARAMETER Experiment Name: At_rhl_Mutant2_cDNA_P Parameter: Plant Line Value: rhl Mutant vs. wt landsburg
  misc_feature: MA Experiment 108433 PARAMETER Experiment Name: At_rhl_Mutant2_cDNA_P Parameter: Tissue Value: Roots
  misc_feature: MA Experiment ID: 108434 Result: Up-regulated in Transcription
  misc_feature: MA Experiment 108434 PARAMETER Experiment Name: At_Root_Tips_cDNA_P Parameter: Tissue Value: Root Tips
  misc_feature: MA Experiment ID: 108461 Result: Up-regulated in Transcription
  misc_feature: MA Experiment 108461 PARAMETER Experiment Name: At_Germinating_Seeds_cDNA_P Parameter: Age (day) Value: 1 vs. 0
  misc_feature: MA Experiment 108461 PARAMETER Experiment Name: At_Germinating_Seeds_cDNA_P Parameter: Tissue Value: Germinating Seeds
  misc_feature: MA Experiment ID: 108462 Result: Up-regulated in Transcription
  misc_feature: MA Experiment 108462 PARAMETER Experiment Name: At_Germinating_Seeds_cDNA_P Parameter: Age (day) Value: 2 vs. 0
  misc_feature: MA Experiment 108462 PARAMETER Experiment Name: At_Germinating_Seeds_cDNA_P Parameter: Tissue Value: Germinating Seeds
  misc_feature: MA Experiment ID: 108501 Result: Up-regulated in Transcription
  misc_feature: MA Experiment 108501 PARAMETER Experiment Name: At_ap2_floral_buds_cDNA_P Parameter: Plant Line Value: ap2 (Ler.)
  misc_feature: MA Experiment 108501 PARAMETER Experiment Name: At_ap2_floral_buds_cDNA_P Parameter: Tissue Value: Closed Flower
  misc_feature: MA Experiment ID: 108561 Result: Down-regulated in Transcription
  misc_feature: MA Experiment 108561 PARAMETER Experiment Name: At_100uM_ABA_cDNA_P Parameter: Timepoint (hr) Value: 6
  misc_feature: MA Experiment 108561 PARAMETER Experiment Name: At_100uM_ABA_cDNA_P Parameter: Tissue Value: Aerial
  misc_feature: MA Experiment 108561 PARAMETER Experiment Name: At_100uM_ABA_cDNA_P Parameter: Treatment Value: 100uM ABA vs. No Treatment
  misc_feature: MA Experiment ID: 108573 Result: Down-regulated in Transcription
  misc_feature: MA Experiment 108573 PARAMETER Experiment Name: At_Drought_cDNA_P Parameter: Timepoint (hr) Value: 6
  misc_feature: MA Experiment 108573 PARAMETER Experiment Name: At_Drought_cDNA_P Parameter: Tissue Value: Aerial
  misc_feature: MA Experiment 108573 PARAMETER Experiment Name: At_Drought_cDNA_P Parameter: Treatment Value: Drought vs. No Drought
  misc_feature: MA Experiment ID: 20000030 Result: Up-regulated in Transcription
  misc_feature: MA Experiment 20000030 PARAMETER Experiment Name: At_CS6630_Roots_cDNA_P Parameter: Plant Line Value: CS6630 vs. WS
  misc_feature: MA Experiment 20000030 PARAMETER Experiment Name: At_CS6630_Roots_cDNA_P Parameter: Tissue Value: Roots
  misc_feature: MA Experiment ID: 20000111 Result: Down-regulated in Transcription
  misc_feature: MA Experiment 20000111 PARAMETER Experiment Name: At_42deg_Heat_cDNA_P Parameter: Temperature (deg C) Value: 42 vs. 22
  misc_feature: MA Experiment 20000111 PARAMETER Experiment Name: At_42deg_Heat_cDNA_P Parameter: Timepoint (hr) Value: 6
  misc_feature: MA Experiment 20000111 PARAMETER Experiment Name: At_42deg_Heat_cDNA_P Parameter: Tissue Value: Aerial
  misc_feature: MA Experiment ID: 20000179 Result: Up-regulated in Transcription
  misc_feature: MA Experiment 20000179 PARAMETER Experiment Name: At_Germinating_Seeds_P Parameter: Age (hr) Value: 6 vs. 0
  misc_feature: MA Experiment 20000179 PARAMETER Experiment Name: At_Germinating_Seeds_P Parameter: Tissue Value: Germinating Seeds
  misc_feature: MA Experiment ID: 20000180 Result: Up-regulated in Transcription
  misc_feature: MA Experiment 20000180 PARAMETER Experiment Name: At_Germinating_Seeds_P Parameter: Age (hr) Value: 24 vs. 0
  misc_feature: MA Experiment 20000180 PARAMETER Experiment Name: At_Germinating_Seeds_P Parameter: Tissue Value: Germinating Seeds
  misc_feature: MA Experiment ID: 20000227 Result: Up-regulated in Transcription
  misc_feature: MA Experiment 20000227 PARAMETER Experiment Name: At_Root-Tips-vs-Tops_P Parameter: Tissue Value: Root Tips vs. Root Tops
  misc_feature: MA Experiment ID: 20000234 Result: Up-regulated in Transcription
  misc_feature: MA Experiment 20000234 PARAMETER Experiment Name: At_Siliques_P Parameter: Age (day) Value: 21
  misc_feature: MA Experiment 20000234 PARAMETER Experiment Name: At_Siliques_P Parameter: Organism Value: A. thaliana
  misc_feature: MA Experiment 20000234 PARAMETER Experiment Name: At_Siliques_P Parameter: Plant Line Value: WS
  misc_feature: MA Experiment 20000234 PARAMETER Experiment Name: At_Siliques_P Parameter: Tissue Value: Less Than 5mm Siliques vs. Whole Plant
  misc_feature: MA Experiment ID: 20000235 Result: Up-regulated in Transcription
  misc_feature: MA Experiment 20000235 PARAMETER Experiment Name: At_Siliques_P Parameter: Age (day) Value: 21
  misc_feature: MA Experiment 20000235 PARAMETER Experiment Name: At_Siliques_P Parameter: Organism Value: A. thaliana
  misc_feature: MA Experiment 20000235 PARAMETER Experiment Name: At_Siliques_P Parameter: Plant Line Value: WS
  misc_feature: MA Experiment 20000235 PARAMETER Experiment Name: At_Siliques_P Parameter: Tissue Value: 5-10mm Siliques vs. Whole Plant
  misc_feature: MA Experiment ID: 20000264 Result: Up-regulated in Transcription
  misc_feature: MA Experiment 20000264 PARAMETER Experiment Name: At_Open_Flower_P Parameter: Age (day) Value: 21
  misc_feature: MA Experiment 20000264 PARAMETER Experiment Name: At_Open_Flower_P Parameter: Plant Line Value: WS
  misc_feature: MA Experiment 20000264 PARAMETER Experiment Name: At_Open_Flower_P Parameter: Tissue Value: Open Flower vs. Whole Plant
  misc_feature: MA Experiment ID: 20000265 Result: Up-regulated in Transcription
  misc_feature: MA Experiment 20000265 PARAMETER Experiment Name: At_Open_Flower_P Parameter: Age (day) Value: 21
  misc_feature: MA Experiment 20000265 PARAMETER Experiment Name: At_Open_Flower_P Parameter: Plant Line Value: WS
  misc_feature: MA Experiment 20000265 PARAMETER Experiment Name: At_Open_Flower_P Parameter: Tissue Value: Closed Flower vs. Whole Plant
  misc_feature: MA Experiment ID: 20000286 Result: Up-regulated in Transcription
  misc_feature: MA Experiment 20000286 PARAMETER Experiment Name: At_Open_Flower_P Parameter: Age (day) Value: 21
  misc_feature: MA Experiment 20000286 PARAMETER Experiment Name: At_Open_Flower_P Parameter: Plant Line Value: WS
  misc_feature: MA Experiment 20000286 PARAMETER Experiment Name: At_Open_Flower_P Parameter: Tissue Value: Half Open vs. Whole Plant
  misc_feature: MA Experiment ID: 20000437 Result: Down-regulated in Transcription
  misc_feature: MA Experiment 20000437 PARAMETER Experiment Name: At_Drought_P Parameter: Age (day) Value: 8
  misc_feature: MA Experiment 20000437 PARAMETER Experiment Name: At_Drought_P Parameter: Organism Value: A. thaliana
  misc_feature: MA Experiment 20000437 PARAMETER Experiment Name: At_Drought_P Parameter: Plant Line Value: WS
  misc_feature: MA Experiment 20000437 PARAMETER Experiment Name: At_Drought_P Parameter: Timepoint (hr) Value: 24
  misc_feature: MA Experiment 20000437 PARAMETER Experiment Name: At_Drought_P Parameter: Tissue Value: Whole Plant
  misc_feature: MA Experiment 20000437 PARAMETER Experiment Name: At_Drought_P Parameter: Treatment Value: Drought vs. No Drought
  misc_feature: MA Experiment ID: 20000451 Result: Down-regulated in Transcription
  misc_feature: MA Experiment 20000451 PARAMETER Experiment Name: At_CS6879_Shoots-Roots_P Parameter: Age (day) Value: 14
  misc_feature: MA Experiment 20000451 PARAMETER Experiment Name: At_CS6879_Shoots-Roots_P Parameter: Organism Value: A. thaliana
  misc_feature: MA Experiment 20000451 PARAMETER Experiment Name: At_CS6879_Shoots-Roots_P Parameter: Plant Line Value: CS6879 vs. WS
  misc_feature: MA Experiment 20000451 PARAMETER Experiment Name: At_CS6879_Shoots-Roots_P Parameter: Tissue Value: Roots
  misc_feature: MA Experiment ID: 20001555 Result: Down-regulated in Transcription
  misc_feature: MA Experiment 20001555 PARAMETER Experiment Name: At_Drought_Soil_Dry_P Parameter: Age (day) Value: 24
  misc_feature: MA Experiment 20001555 PARAMETER Experiment Name: At_Drought_Soil_Dry_P Parameter: Organism Value: A. thaliana
  misc_feature: MA Experiment 20001555 PARAMETER Experiment Name: At_Drought_Soil_Dry_P Parameter: Plant Line Value: WS
  misc_feature: MA Experiment 20001555 PARAMETER Experiment Name: At_Drought_Soil_Dry_P Parameter: Post Timepoint (hr) Value: None
  misc_feature: MA Experiment 20001555 PARAMETER Experiment Name: At_Drought_Soil_Dry_P Parameter: Post-Treatment Value: None
  misc_feature: MA Experiment 20001555 PARAMETER Experiment Name: At_Drought_Soil_Dry_P Parameter: Timepoint (day) Value: 10
  misc_feature: MA Experiment 20001555 PARAMETER Experiment Name: At_Drought_Soil_Dry_P Parameter: Treatment Value: Drought vs. No Drought
  misc_feature: MA Experiment ID: 20001556 Result: Down-regulated in Transcription
  misc_feature: MA Experiment 20001556 PARAMETER Experiment Name: At_Drought_Soil_Dry_P Parameter: Age (day) Value: 26
  misc_feature: MA Experiment 20001556 PARAMETER Experiment Name: At_Drought_Soil_Dry_P Parameter: Organism Value: A. thaliana
  misc_feature: MA Experiment 20001556 PARAMETER Experiment Name: At_Drought_Soil_Dry_P Parameter: Plant Line Value: WS
  misc_feature: MA Experiment 20001556 PARAMETER Experiment Name: At_Drought_Soil_Dry_P Parameter: Post Timepoint (hr) Value: None
  misc_feature: MA Experiment 20001556 PARAMETER Experiment Name: At_Drought_Soil_Dry_P Parameter: Post-Treatment Value: None
  misc_feature: MA Experiment 20001556 PARAMETER Experiment Name: At_Drought_Soil_Dry_P Parameter: Timepoint (day) Value: 12
  misc_feature: MA Experiment 20001556 PARAMETER Experiment Name: At_Drought_Soil_Dry_P Parameter: Treatment Value: Drought vs. No Drought
  misc_feature: MA Experiment ID: 20001558 Result: Up-regulated in Transcription
  misc_feature: MA Experiment 20001558 PARAMETER Experiment Name: At_Drought_Soil_Dry_P Parameter: Age (day) Value: 27
  misc_feature: MA Experiment 20001558 PARAMETER Experiment Name: At_Drought_Soil_Dry_P Parameter: Organism Value: A. thaliana
  misc_feature: MA Experiment 20001558 PARAMETER Experiment Name: At_Drought_Soil_Dry_P Parameter: Plant Line Value: WS
  misc_feature: MA Experiment 20001558 PARAMETER Experiment Name: At_Drought_Soil_Dry_P Parameter: Post Timepoint (hr) Value: 6
  misc_feature: MA Experiment 20001558 PARAMETER Experiment Name: At_Drought_Soil_Dry_P Parameter: Post-Treatment Value: Re-Water vs. No Drought
  misc_feature: MA Experiment 20001558 PARAMETER Experiment Name: At_Drought_Soil_Dry_P Parameter: Timepoint (day) Value: 13
  misc_feature: MA Experiment 20001558 PARAMETER Experiment Name: At_Drought_Soil_Dry_P Parameter: Treatment Value: Drought vs. No Drought
atcaagttaaaaaaaaaacagaaggagaaatggcaataagttttagaactctagctcttttgaccctctcggtgttactaatttccatatctctcggcgtcgtcacagcaacagagtcgcagaggaatgaaggggaggtgcttacaatgtacgagcaatggcttgtagagaatgggaagaactataacggtcttggagagaaggagagacggttcaagatcttcaaagacaacttgaagcgcatcgaagaacacaattcagatccaaaccggagttatgaacgcgggttgaacaagttttcggatctaacggctgatgagtttcaagctagttacttaggtgggaagatggaaaagaaaagcctatcagatgtagcggagaggtatcagtacaaagaaggagatgttttacctgatgaagttgattggagggagagaggagcagttgttccaagagtcaaaagacaaggagagtgtggaagttgttgggcgtttgccgcgactggagcggtggaaggtataaaccagatcacaaccggagaattagtatctttatcggaacaagaactcattgactgcgatagagggaacgacaactttggatgtgctggtggtggagcagtatgggcctttgagttcattaaggagaacggtggtattgtatccgatgaagtttatggttataccggtgaagatactgccgcatgcaaggccattgagatgaaaaccactcgggttgttaccattaatggtcatgaggttgttcctgtaaacgatgagatgtctttgaagaaagctgttgcttatcaacctattagtgttatgatatcagctgcaaacatgagcgactacaaatctggtgtgtataaaggagcatgtagtaatttgtggggagatcacaatgtgctaattgtggggtatggaacatcatcagatgaaggagactactggcttattcgtaattcttggggaccagagtggggagaaggcgggtaccttaggcttcaacgtaacttccatgaaccaaccgggaaatgtgcagtcgctgtagctcctgtatacccaatcaagtcgaactcttcatctcatttgttgtctccaagtgtgtttaaattggttgttttatttgtttttcagttgattagtttggccttgctttgaaatatacttttatcggtgttcaagttcgttggtttttggtttaataaaggaaacaagattcgtcac

SEQ ID NO: 25022 - protein, 385 aa, Arabidopsis thaliana
  peptide (1)..(385): Ceres Seq. ID no. 13499987
  misc_feature (136)..(355): Pfam Name: Papain family cysteine protease Pfam Description: Papain family cysteine protease
  misc_feature (12)..(367): Homolog of NCBI NO: 7435801 NR Description: cysteine proteinase (EC 3.4.22.-) precursor -
  misc_feature (16)..(367): Homolog of NCBI NO: 18401614 NR Description: cysteine proteinase RD21A [Arabidopsis thaliana]
  misc_feature (10)..(367): Homolog of NCBI NO: 14517542 NR Description: F2G19.31/F2G19.31 [Arabidopsis thaliana]
  misc_feature (41)..(360): Homolog of NCBI NO: 30141019 NR Description: cysteine protease-1 [Helianthus annuus]
  misc_feature (14)..(361): Homolog of NCBI NO: 18141281 NR Description: senescence-associated cysteine protease [Brassica
  misc_feature (10)..(361): Homolog of NCBI NO: 18402225 NR Description: cysteine proteinase [Arabidopsis thaliana]
  misc_feature (18)..(365): Homolog of NCBI NO: 30685308 NR Description: cysteine proteinase [Arabidopsis thaliana]
  misc_feature (18)..(365): Homolog of NCBI NO: 26452046 NR Description: putative cysteine proteinase RD21A precursor
  misc_feature (10)..(385): Homolog of NCBI NO: 21593501 NR Description: cysteine proteinase [Arabidopsis thaliana]
  misc_feature (10)..(385): Homolog of NCBI NO: 18407678 NR Description: cysteine proteinase [Arabidopsis thaliana]
QVKKKTEGEMAISFRTLALLTLSVLLISISLGVVTATESQRNEGEVLTMYEQWLVENGKNYNGLGEKERRFKIFKDNLKRIEEHNSDPNRSYERGLNKFSDLTADEFQASYLGGKMEKKSLSDVAERYQYKEGDVLPDEVDWRERGAVVPRVKRQGECGSCWAFAATGAVEGINQITTGELVSLSEQELIDCDRGNDNFGCAGGGAVWAFEFIKENGGIVSDEVYGYTGEDTAACKAIEMKTTRVVTINGHEVVPVNDEMSLKKAVAYQPISVMISAANMSDYKSGVYKGACSNLWGDHNVLIVGYGTSSDEGDYWLIRNSWGPEWGEGGYLRLQRNFHEPTGKCAVAVAPVYPIKSNSSSHLLSPSVFKLVVLFVFQLISLALL

SEQ ID NO: 25023 - protein, 376 aa, Arabidopsis thaliana
  peptide (1)..(376): Ceres Seq. ID no. 13499988
  misc_feature (127)..(346): Pfam Name: Papain family cysteine protease Pfam Description: Papain family cysteine protease
  misc_feature (1)..(358): Homolog of NCBI NO: 14517542 NR Description: F2G19.31/F2G19.31 [Arabidopsis thaliana]
  misc_feature (32)..(351): Homolog of NCBI NO: 30141019 NR Description: cysteine protease-1 [Helianthus annuus]
  misc_feature (5)..(352): Homolog of NCBI NO: 18141281 NR Description: senescence-associated cysteine protease [Brassica
  misc_feature (1)..(352): Homolog of NCBI NO: 18402225 NR Description: cysteine proteinase [Arabidopsis thaliana]
  misc_feature (3)..(358): Homolog of NCBI NO: 7435801 NR Description: cysteine proteinase (EC 3.4.22.-) precursor -
  misc_feature (7)..(358): Homolog of NCBI NO: 18401614 NR Description: cysteine proteinase RD21A [Arabidopsis thaliana]
  misc_feature (9)..(356): Homolog of NCBI NO: 30685308 NR Description: cysteine proteinase [Arabidopsis thaliana]
  misc_feature (9)..(356): Homolog of NCBI NO: 26452046 NR Description: putative cysteine proteinase RD21A precursor
  misc_feature (1)..(376): Homolog of NCBI NO: 21593501 NR Description: cysteine proteinase [Arabidopsis thaliana]
  misc_feature (1)..(376): Homolog of NCBI NO: 18407678 NR Description: cysteine proteinase [Arabidopsis thaliana]
MAISFRTLALLTLSVLLISISLGVVTATESQRNEGEVLTMYEQWLVENGKNYNGLGEKERRFKIFKDNLKRIEEHNSDPNRSYERGLNKFSDLTADEFQASYLGGKMEKKSLSDVAERYQYKEGDVLPDEVDWRERGAVVPRVKRQGECGSCWAFAATGAVEGINQITTGELVSLSEQELIDCDRGNDNFGCAGGGAVWAFEFIKENGGIVSDEVYGYTGEDTAACKAIEMKTTRVVTINGHEVVPVNDEMSLKKAVAYQPISVMISAANMSDYKSGVYKGACSNLWGDHNVLIVGYGTSSDEGDYWLIRNSWGPEWGEGGYLRLQRNFHEPTGKCAVAVAPVYPIKSNSSSHLLSPSVFKLVVLFVFQLISLALL

SEQ ID NO: 25024 - protein, 337 aa, Arabidopsis thaliana
  peptide (1)..(337): Ceres Seq. ID no. 13499989
  misc_feature (88)..(307): Pfam Name: Papain family cysteine protease Pfam Description: Papain family cysteine protease
  misc_feature (1)..(319): Homolog of NCBI NO: 7435801 NR Description: cysteine proteinase (EC 3.4.22.-) precursor -
  misc_feature (1)..(319): Homolog of NCBI NO: 18401614 NR Description: cysteine proteinase RD21A [Arabidopsis thaliana]
  misc_feature (1)..(319): Homolog of NCBI NO: 14517542 NR Description: F2G19.31/F2G19.31 [Arabidopsis thaliana]
  misc_feature (1)..(312): Homolog of NCBI NO: 30141019 NR Description: cysteine protease-1 [Helianthus annuus]
  misc_feature (1)..(313): Homolog of NCBI NO: 18141281 NR Description: senescence-associated cysteine protease [Brassica
  misc_feature (1)..(313): Homolog of NCBI NO: 18402225 NR Description: cysteine proteinase [Arabidopsis thaliana]
  misc_feature (1)..(317): Homolog of NCBI NO: 30685308 NR Description: cysteine proteinase [Arabidopsis thaliana]
  misc_feature (1)..(317): Homolog of NCBI NO: 26452046 NR Description: putative cysteine proteinase RD21A precursor
  misc_feature (1)..(337): Homolog of NCBI NO: 21593501 NR Description: cysteine proteinase [Arabidopsis thaliana]
  misc_feature (1)..(337): Homolog of NCBI NO: 18407678 NR Description: cysteine proteinase [Arabidopsis thaliana]
MYEQWLVENGKNYNGLGEKERRFKIFKDNLKRIEEHNSDPNRSYERGLNKFSDLTADEFQASYLGGKMEKKSLSDVAERYQYKEGDVLPDEVDWRERGAVVPRVKRQGECGSCWAFAATGAVEGINQITTGELVSLSEQELIDCDRGNDNFGCAGGGAVWAFEFIKENGGIVSDEVYGYTGEDTAACKAIEMKTTRVVTINGHEVVPVNDEMSLKKAVAYQPISVMISAANMSDYKSGVYKGACSNLWGDHNVLIVGYGTSSDEGDYWLIRNSWGPEWGEGGYLRLQRNFHEPTGKCAVAVAPVYPIKSNSSSHLLSPSVFKLVVLFVFQLISLALL

SEQ ID NO: 25025 - DNA, 725 bp, Arabidopsis thaliana
  misc_feature (1)..(725): Ceres Seq. ID no. 12581408
  misc_feature: MA Experiment ID: 108434 Result: Up-regulated in Transcription
  misc_feature: MA Experiment 108434 PARAMETER Experiment Name: At_Root_Tips_cDNA_P Parameter: Tissue Value: Root Tips
  misc_feature: MA Experiment ID: 108488 Result: Down-regulated in Transcription
  misc_feature: MA Experiment ID: 108573 Result: Down-regulated in Transcription
  misc_feature: MA Experiment 108573 PARAMETER Experiment Name: At_Drought_cDNA_P Parameter: Timepoint (hr) Value: 6
  misc_feature: MA Experiment 108573 PARAMETER Experiment Name: At_Drought_cDNA_P Parameter: Tissue Value: Aerial
  misc_feature: MA Experiment 108573 PARAMETER Experiment Name: At_Drought_cDNA_P Parameter: Treatment Value: Drought vs. No Drought
  misc_feature: MA Experiment ID: 108579 Result: Up-regulated in Transcription
  misc_feature: MA Experiment 108579 PARAMETER Experiment Name: At_4deg_Cold_cDNA_P Parameter: Temperature (deg C) Value: 4 vs. 22
  misc_feature: MA Experiment 108579 PARAMETER Experiment Name: At_4deg_Cold_cDNA_P Parameter: Timepoint (hr) Value: 6
  misc_feature: MA Experiment 108579 PARAMETER Experiment Name: At_4deg_Cold_cDNA_P Parameter: Tissue Value: Aerial
  misc_feature: MA Experiment ID: 20000093 Result: Down-regulated in Transcription
  misc_feature: MA Experiment 20000093 PARAMETER Experiment Name: At_42deg_Heat_cDNA_P Parameter: Temperature (deg C) Value: 42 vs. 22
  misc_feature: MA Experiment 20000093 PARAMETER Experiment Name: At_42deg_Heat_cDNA_P Parameter: Timepoint (hr) Value: 0.5
  misc_feature: MA Experiment 20000093 PARAMETER Experiment Name: At_42deg_Heat_cDNA_P Parameter: Tissue Value: Aerial
  misc_feature: MA Experiment ID: 20000286 Result: Up-regulated in Transcription
  misc_feature: MA Experiment 20000286 PARAMETER Experiment Name: At_Open_Flower_P Parameter: Age (day) Value: 21
  misc_feature: MA Experiment 20000286 PARAMETER Experiment Name: At_Open_Flower_P Parameter: Plant Line Value: WS
  misc_feature: MA Experiment 20000286 PARAMETER Experiment Name: At_Open_Flower_P Parameter: Tissue Value: Half Open vs. Whole Plant
  misc_feature: MA Experiment ID: 20000794 Result: Up-regulated in Transcription
  misc_feature: MA Experiment 20000794 PARAMETER Experiment Name: At_Petals_P Parameter: Age (day) Value: 23-25 days
  misc_feature: MA Experiment 20000794 PARAMETER Experiment Name: At_Petals_P Parameter: Plant Line Value: WS
  misc_feature: MA Experiment 20000794 PARAMETER Experiment Name: At_Petals_P Parameter: Tissue Value: Petals vs. Whole plant
acccactcatcttctcaattcccagatcatctacaatagtcatttctcttcgatttcttcaaactctcatcaaatcgtttatctgttctaaatttcgaagaagacgatgagtacaggcgcaggaagcggaacaaccaaaggtggcagaggaaagccaaaggccaccaaatccgtctctcgatcatctaaagccggtcttcaattccccgtcggaagaatcgctagattcctcaaatccggtaaatacgccgagcgtgtcggtgccggagctccggtctatctctccgctgttctcgagtacctcgccgccgaggtgttggagctggcgggaaacgcagcaagggataacaagaagacacgtatagtaccaagacacattcagcttgcagtgaggaacgatgaagagttaagcaaacttctgggaagtgtgacgattgcgaatggaggagttttgccaaatattcatcagactcttttgccatccaaggttggcaagaacaaaggagatattggatctgcttctcaggagttctgaggttcttagacttcttagttcagttctcttgtttggattcggaacttgtaaaatagaccctgatggtgttttttggggatcaaattaggttttaaagctaagtatatttggcttttgcctaagtatgtttaattagtgaatgatatgatatttcggaacgaatcatgtatcaatggaactgaattaatcc

SEQ ID NO: 25026 - protein, 142 aa, Arabidopsis thaliana
  peptide (1)..(142): Ceres Seq. ID no. 12581409
  misc_feature (3)..(127): Pfam Name: Core histone H2A/H2B/H3/H4 Pfam Description: Core histone H2A/H2B/H3/H4
  misc_feature (5)..(131): Homolog of NCBI NO: 7439709 NR Description: histone H2A - loblolly pine
  misc_feature (13)..(132): Homolog of NCBI NO: 15237024 NR Description: histone H2A- like protein
  misc_feature (2)..(135): Homolog of NCBI NO: 685035 NR Description: histone H2A homolog
  misc_feature (5)..(132): Homolog of NCBI NO: 15239697 NR Description: histone H2A (gb|AAF64418.1)
  misc_feature (12)..(142): Homolog of NCBI NO: 21321778 NR Description: unknown protein [Oryza sativa (japonica
  misc_feature (7)..(142): Homolog of NCBI NO: 462234 NR Description: Histone H2A
  misc_feature (5)..(142): Homolog of NCBI NO: 15214035 NR Description: Histone H2A
  misc_feature (1)..(142): Homolog of NCBI NO: 21593507 NR Description: putative histone H2A [Arabidopsis thaliana]
  misc_feature (1)..(142): Homolog of NCBI NO: 15221875 NR Description: histone H2A, putative
  misc_feature (1)..(142): Homolog of NCBI NO: 15223948 NR Description: putative histone H2A
MSTGAGSGTTKGGRGKPKATKSVSRSSKAGLQFPVGRIARFLKSGKYAERVGAGAPVYLSAVLEYLAAEVLELAGNAARDNKKTRIVPRHIQLAVRNDEELSKLLGSVTIANGGVLPNIHQTLLPSKVGKNKGDIGSASQEF

SEQ ID NO: 25027 - DNA, 1317 bp, Arabidopsis thaliana
  misc_feature (1)..(1317): Ceres Seq. ID no. 12348654
  misc_feature: MA Experiment ID: 108434 Result: Down-regulated in Transcription
  misc_feature: MA Experiment 108434 PARAMETER Experiment Name: At_Root_Tips_cDNA_P Parameter: Tissue Value: Root Tips
  misc_feature: MA Experiment ID: 108462 Result: Up-regulated in Transcription
  misc_feature: MA Experiment 108462 PARAMETER Experiment Name: At_Germinating_Seeds_cDNA_P Parameter: Age (day) Value: 2 vs. 0
  misc_feature: MA Experiment 108462 PARAMETER Experiment Name: At_Germinating_Seeds_cDNA_P Parameter: Tissue Value: Germinating Seeds
  misc_feature: MA Experiment ID: 108463 Result: Up-regulated in Transcription
  misc_feature: MA Experiment 108463 PARAMETER Experiment Name: At_Germinating_Seeds_cDNA_P Parameter: Age (day) Value: 3 vs. 0
  misc_feature: MA Experiment 108463 PARAMETER Experiment Name: At_Germinating_Seeds_cDNA_P Parameter: Tissue Value: Germinating Seeds
  misc_feature: MA Experiment ID: 108488 Result: Down-regulated in Transcription
  misc_feature: MA Experiment ID: 108561 Result: Up-regulated in Transcription
  misc_feature: MA Experiment 108561 PARAMETER Experiment Name: At_100uM_ABA_cDNA_P Parameter: Timepoint (hr) Value: 6
  misc_feature: MA Experiment 108561 PARAMETER Experiment Name: At_100uM_ABA_cDNA_P Parameter: Tissue Value: Aerial
  misc_feature: MA Experiment 108561 PARAMETER Experiment Name: At_100uM_ABA_cDNA_P Parameter: Treatment Value: 100uM ABA vs. No Treatment
  misc_feature: MA Experiment ID: 108569 Result: Up-regulated in Transcription
  misc_feature: MA Experiment 108569 PARAMETER Experiment Name: At_0.001%_MeJA__cDNA_P Parameter: Timepoint (hr) Value: 6
  misc_feature: MA Experiment 108569 PARAMETER Experiment Name: At_0.001%_MeJA__cDNA_P Parameter: Tissue Value: Aerial
  misc_feature: MA Experiment 108569 PARAMETER Experiment Name: At_0.001%_MeJA__cDNA_P Parameter: Treatment Value: 0.001% MeJA vs. No Treatment
  misc_feature: MA Experiment ID: 108572 Result: Up-regulated in Transcription
  misc_feature: MA Experiment 108572 PARAMETER Experiment Name: At_Drought_cDNA_P Parameter: Timepoint (hr) Value: 1
  misc_feature: MA Experiment 108572 PARAMETER Experiment Name: At_Drought_cDNA_P Parameter: Tissue Value: Aerial
  misc_feature: MA Experiment 108572 PARAMETER Experiment Name: At_Drought_cDNA_P Parameter: Treatment Value: Drought vs. No Drought
  misc_feature: MA Experiment ID: 108573 Result: Up-regulated in Transcription
  misc_feature: MA Experiment 108573 PARAMETER Experiment Name: At_Drought_cDNA_P Parameter: Timepoint (hr) Value: 6
  misc_feature: MA Experiment 108573 PARAMETER Experiment Name: At_Drought_cDNA_P Parameter: Tissue Value: Aerial
  misc_feature: MA Experiment 108573 PARAMETER Experiment Name: At_Drought_cDNA_P Parameter: Treatment Value: Drought vs. No Drought
  misc_feature: MA Experiment ID: 108577 Result: Down-regulated in Transcription
  misc_feature: MA Experiment 108577 PARAMETER Experiment Name: At_42deg_Heat_cDNA_P Parameter: Temperature (deg C) Value: 42 vs. 22
  misc_feature: MA Experiment 108577 PARAMETER Experiment Name: At_42deg_Heat_cDNA_P Parameter: Timepoint (hr) Value: 6
  misc_feature: MA Experiment 108577 PARAMETER Experiment Name: At_42deg_Heat_cDNA_P Parameter: Tissue Value: Aerial
  misc_feature: MA Experiment ID: 108585 Result: Up-regulated in Transcription
  misc_feature: MA Experiment 108585 PARAMETER Experiment Name: At_5mM_NaNP_cDNA_P Parameter: Timepoint (hr) Value: 6
  misc_feature: MA Experiment 108585 PARAMETER Experiment Name: At_5mM_NaNP_cDNA_P Parameter: Tissue Value: Aerial
  misc_feature: MA Experiment 108585 PARAMETER Experiment Name: At_5mM_NaNP_cDNA_P Parameter: Treatment Value: null
  misc_feature: MA Experiment ID: 108594 Result: Down-regulated in Transcription
  misc_feature: MA Experiment 108594 PARAMETER Experiment Name: At_Ler-rhl_Root_cDNA_P Parameter: Plant Line Value: null
  misc_feature: MA Experiment ID: 108595 Result: Up-regulated in Transcription
  misc_feature: MA Experiment 108595 PARAMETER Experiment Name: At_Ler-pi_Ovule_cDNA_P Parameter: Plant Line Value: null
  misc_feature: MA Experiment ID: 108605 Result: Up-regulated in Transcription
  misc_feature: MA Experiment 108605 PARAMETER Experiment Name: At_100uM_ABA_cDNA_P Parameter: Timepoint (hr) Value: 6
  misc_feature: MA Experiment 108605 PARAMETER Experiment Name: At_100uM_ABA_cDNA_P Parameter: Tissue Value: Aerial
  misc_feature: MA Experiment 108605 PARAMETER Experiment Name: At_100uM_ABA_cDNA_P Parameter: Treatment Value: 100uM ABA vs. No Treatment
  misc_feature: MA Experiment ID: 108607 Result: Up-regulated in Transcription
  misc_feature: MA Experiment 108607 PARAMETER Experiment Name: At_100uM_ABA_cDNA_P Parameter: Timepoint (hr) Value: 4
  misc_feature: MA Experiment 108607 PARAMETER Experiment Name: At_100uM_ABA_cDNA_P Parameter: Tissue Value: Aerial
  misc_feature: MA Experiment 108607 PARAMETER Experiment Name: At_100uM_ABA_cDNA_P Parameter: Treatment Value: 100uM ABA vs. No Treatment
  misc_feature: MA Experiment ID: 108609 Result: Up-regulated in Transcription
  misc_feature: MA Experiment 108609 PARAMETER Experiment Name: At_100uM_ABA_cDNA_P Parameter: Timepoint (hr) Value: 24
  misc_feature: MA Experiment 108609 PARAMETER Experiment Name: At_100uM_ABA_cDNA_P Parameter: Tissue Value: Aerial
  misc_feature: MA Experiment 108609 PARAMETER Experiment Name: At_100uM_ABA_cDNA_P Parameter: Treatment Value: 100uM ABA vs. No Treatment
  misc_feature: MA Experiment ID: 108668 Result: Up-regulated in Transcription
  misc_feature: MA Experiment 108668 PARAMETER Experiment Name: At_2mM_SA_cDNA_P Parameter: Plant Line Value: WS
  misc_feature: MA Experiment 108668 PARAMETER Experiment Name: At_2mM_SA_cDNA_P Parameter: Timepoint (hr) Value: 6
  misc_feature: MA Experiment 108668 PARAMETER Experiment Name: At_2mM_SA_cDNA_P Parameter: Treatment Value: 2mM SA vs. No Treatment
  misc_feature: MA Experiment ID: 20000069 Result: Up-regulated in Transcription
  misc_feature: MA Experiment 20000069 PARAMETER Experiment Name: At_100uM_ABA_Mutants_cDNA_P Parameter: Plant Line Value: CS23
  misc_feature: MA Experiment 20000069 PARAMETER Experiment Name: At_100uM_ABA_Mutants_cDNA_P Parameter: Timepoint (hr) Value: 6
  misc_feature: MA Experiment 20000069 PARAMETER Experiment Name: At_100uM_ABA_Mutants_cDNA_P Parameter: Tissue Value: Aerial
  misc_feature: MA Experiment 20000069 PARAMETER Experiment Name: At_100uM_ABA_Mutants_cDNA_P Parameter: Treatment Value: 100uM ABA vs. No Treatment
  misc_feature: MA Experiment ID: 20000070 Result: Up-regulated in Transcription
  misc_feature: MA Experiment 20000070 PARAMETER Experiment Name: At_100uM_ABA_Mutants_cDNA_P Parameter: Plant Line Value: CS24
  misc_feature: MA Experiment 20000070 PARAMETER Experiment Name: At_100uM_ABA_Mutants_cDNA_P Parameter: Timepoint (hr) Value: 6
  misc_feature: MA Experiment 20000070 PARAMETER Experiment Name: At_100uM_ABA_Mutants_cDNA_P Parameter: Tissue Value: Aerial
  misc_feature: MA Experiment 20000070 PARAMETER Experiment Name: At_100uM_ABA_Mutants_cDNA_P Parameter: Treatment Value: 100uM ABA vs. No Treatment
  misc_feature: MA Experiment ID: 20000072 Result: Up-regulated in Transcription
  misc_feature: MA Experiment 20000072 PARAMETER Experiment Name: At_100uM_ABA_Mutants_cDNA_P Parameter: Plant Line Value: CS8105
  misc_feature: MA Experiment 20000072 PARAMETER Experiment Name: At_100uM_ABA_Mutants_cDNA_P Parameter: Timepoint (hr) Value: 6
  misc_feature: MA Experiment 20000072 PARAMETER Experiment Name: At_100uM_ABA_Mutants_cDNA_P Parameter: Tissue Value: Aerial
  misc_feature: MA Experiment 20000072 PARAMETER Experiment Name: At_100uM_ABA_Mutants_cDNA_P Parameter: Treatment Value: 100uM ABA vs. No Treatment
  misc_feature: MA Experiment ID: 20000086 Result: Up-regulated in Transcription
  misc_feature: MA Experiment 20000086 PARAMETER Experiment Name: At_100uM_ABA_Mutants_cDNA_P Parameter: Plant Line Value: CS22
  misc_feature: MA Experiment 20000086 PARAMETER Experiment Name: At_100uM_ABA_Mutants_cDNA_P Parameter: Timepoint (hr) Value: 6
  misc_feature: MA Experiment 20000086 PARAMETER Experiment Name: At_100uM_ABA_Mutants_cDNA_P Parameter: Tissue Value: Aerial
  misc_feature: MA Experiment 20000086 PARAMETER Experiment Name: At_100uM_ABA_Mutants_cDNA_P Parameter: Treatment Value: 100uM ABA vs. No Treatment
  misc_feature: MA Experiment ID: 20000087 Result: Up-regulated in Transcription
  misc_feature: MA Experiment 20000087 PARAMETER Experiment Name: At_100uM_ABA_Mutants_cDNA_P Parameter: Plant Line Value: WS
  misc_feature: MA Experiment 20000087 PARAMETER Experiment Name: At_100uM_ABA_Mutants_cDNA_P Parameter: Timepoint (hr) Value: 6
  misc_feature: MA Experiment 20000087 PARAMETER Experiment Name: At_100uM_ABA_Mutants_cDNA_P Parameter: Tissue Value: Aerial
  misc_feature: MA Experiment 20000087 PARAMETER Experiment Name: At_100uM_ABA_Mutants_cDNA_P Parameter: Treatment Value: 100uM ABA vs. No Treatment
  misc_feature: MA Experiment ID: 20000088 Result: Up-regulated in Transcription
  misc_feature: MA Experiment 20000088 PARAMETER Experiment Name: At_100uM_ABA_Mutants_cDNA_P Parameter: Plant Line Value: Landsberg
  misc_feature: MA Experiment 20000088 PARAMETER Experiment Name: At_100uM_ABA_Mutants_cDNA_P Parameter: Timepoint (hr) Value: 6
  misc_feature: MA Experiment 20000088 PARAMETER Experiment Name: At_100uM_ABA_Mutants_cDNA_P Parameter: Tissue Value: Aerial
  misc_feature: MA Experiment 20000088 PARAMETER Experiment Name: At_100uM_ABA_Mutants_cDNA_P Parameter: Treatment Value: 100uM ABA vs. No Treatment
  misc_feature: MA Experiment ID: 20000090 Result: Up-regulated in Transcription
  misc_feature: MA Experiment ID: 20000111 Result: Down-regulated in Transcription
  misc_feature: MA Experiment 20000111 PARAMETER Experiment Name: At_42deg_Heat_cDNA_P Parameter: Temperature (deg C) Value: 42 vs. 22
  misc_feature: MA Experiment 20000111 PARAMETER Experiment Name: At_42deg_Heat_cDNA_P Parameter: Timepoint (hr) Value: 6
  misc_feature: MA Experiment 20000111 PARAMETER Experiment Name: At_42deg_Heat_cDNA_P Parameter: Tissue Value: Aerial
  misc_feature: MA Experiment ID: 20000117 Result: Up-regulated in Transcription
  misc_feature: MA Experiment 20000117 PARAMETER Experiment Name: At_100uM_ABA_Mutants_cDNA_P Parameter: Plant Line Value: Columbia
  misc_feature: MA Experiment 20000117 PARAMETER Experiment Name: At_100uM_ABA_Mutants_cDNA_P Parameter: Timepoint (hr) Value: 6
  misc_feature: MA Experiment 20000117 PARAMETER Experiment Name: At_100uM_ABA_Mutants_cDNA_P Parameter: Tissue Value: Aerial
  misc_feature: MA Experiment 20000117 PARAMETER Experiment Name: At_100uM_ABA_Mutants_cDNA_P Parameter: Treatment Value: 100uM ABA vs. No Treatment
  misc_feature: MA Experiment ID: 20000169 Result: Up-regulated in Transcription
  misc_feature: MA Experiment 20000169 PARAMETER Experiment Name: At_100uM_ABA_P Parameter: Age (day) Value: 14
  misc_feature: MA Experiment 20000169 PARAMETER Experiment Name: At_100uM_ABA_P Parameter: Organism Value: A. thaliana
  misc_feature: MA Experiment 20000169 PARAMETER Experiment Name: At_100uM_ABA_P Parameter: Plant Line Value: WS
  misc_feature: MA Experiment 20000169 PARAMETER Experiment Name: At_100uM_ABA_P Parameter: Timepoint (hr) Value: 6
  misc_feature: MA Experiment 20000169 PARAMETER Experiment Name: At_100uM_ABA_P Parameter: Tissue Value: Aerial
  misc_feature: MA Experiment 20000169 PARAMETER Experiment Name: At_100uM_ABA_P Parameter: Treatment Value: 100uM ABA vs. No Treatment
  misc_feature: MA Experiment ID: 20000173 Result: Down-regulated in Transcription
  misc_feature: MA Experiment 20000173 PARAMETER Experiment Name: At_42deg_Heat_P Parameter: Age (day) Value: 14
  misc_feature: MA Experiment 20000173 PARAMETER Experiment Name: At_42deg_Heat_P Parameter: Organism Value: A. thaliana
  misc_feature: MA Experiment 20000173 PARAMETER Experiment Name: At_42deg_Heat_P Parameter: Plant Line Value: WS
  misc_feature: MA Experiment 20000173 PARAMETER Experiment Name: At_42deg_Heat_P Parameter: Temperature (deg C) Value: 42 vs. 22
  misc_feature: MA Experiment 20000173 PARAMETER Experiment Name: At_42deg_Heat_P Parameter: Timepoint (hr) Value: 6
  misc_feature: MA Experiment 20000173 PARAMETER Experiment Name: At_42deg_Heat_P Parameter: Tissue Value: Aerial
  misc_feature: MA Experiment ID: 20000182 Result: Up-regulated in Transcription
  misc_feature: MA Experiment 20000182 PARAMETER Experiment Name: At_2mM_SA_P Parameter: Age (day) Value: 14
  misc_feature: MA Experiment 20000182 PARAMETER Experiment Name: At_2mM_SA_P Parameter: Organism Value: A. thaliana
  misc_feature: MA Experiment 20000182 PARAMETER Experiment Name: At_2mM_SA_P Parameter: Plant Line Value: WS
  misc_feature: MA Experiment 20000182 PARAMETER Experiment Name: At_2mM_SA_P Parameter: Timepoint (hr) Value: 6
  misc_feature: MA Experiment 20000182 PARAMETER Experiment Name: At_2mM_SA_P Parameter: Tissue Value: Aerial
  misc_feature: MA Experiment 20000182 PARAMETER Experiment Name: At_2mM_SA_P Parameter: Treatment Value: 2mM SA vs. No Treatment
  misc_feature: MA Experiment ID: 20000224 Result: Up-regulated in Transcription
  misc_feature: MA Experiment ID: 20000227 Result: Down-regulated in Transcription
  misc_feature: MA Experiment 20000227 PARAMETER Experiment Name: At_Root-Tips-vs-Tops_P Parameter: Tissue Value: Root Tips vs. Root Tops
  misc_feature: MA Experiment ID: 20000234 Result: Down-regulated in Transcription
  misc_feature: MA Experiment 20000234 PARAMETER Experiment Name: At_Siliques_P Parameter: Age (day) Value: 21
  misc_feature: MA Experiment 20000234 PARAMETER Experiment Name: At_Siliques_P Parameter: Organism Value: A. thaliana
  misc_feature: MA Experiment 20000234 PARAMETER Experiment Name: At_Siliques_P Parameter: Plant Line Value: WS
  misc_feature: MA Experiment 20000234 PARAMETER Experiment Name: At_Siliques_P Parameter: Tissue Value: Less Than 5mm Siliques vs. Whole Plant
  misc_feature: MA Experiment ID: 20000264 Result: Down-regulated in Transcription
  misc_feature: MA Experiment 20000264 PARAMETER Experiment Name: At_Open_Flower_P Parameter: Age (day) Value: 21
  misc_feature: MA Experiment 20000264 PARAMETER Experiment Name: At_Open_Flower_P Parameter: Plant Line Value: WS
  misc_feature: MA Experiment 20000264 PARAMETER Experiment Name: At_Open_Flower_P Parameter: Tissue Value: Open Flower vs. Whole Plant
  misc_feature: MA Experiment ID: 20000265 Result: Down-regulated in Transcription
  misc_feature: MA Experiment 20000265 PARAMETER Experiment Name: At_Open_Flower_P Parameter: Age (day) Value: 21
  misc_feature: MA Experiment 20000265 PARAMETER Experiment Name: At_Open_Flower_P Parameter: Plant Line Value: WS
  misc_feature: MA Experiment 20000265 PARAMETER Experiment Name: At_Open_Flower_P Parameter: Tissue Value: Closed Flower vs. Whole Plant
  misc_feature: MA Experiment ID: 20000286 Result: Down-regulated in Transcription
  misc_feature: MA Experiment 20000286 PARAMETER Experiment Name: At_Open_Flower_P Parameter: Age (day) Value: 21
  misc_feature: MA Experiment 20000286 PARAMETER Experiment Name: At_Open_Flower_P Parameter: Plant Line Value: WS
  misc_feature: MA Experiment 20000286 PARAMETER Experiment Name: At_Open_Flower_P Parameter: Tissue Value: Half Open vs. Whole Plant
  misc_feature: MA Experiment ID: 20000436 Result: Up-regulated in Transcription
  misc_feature: MA Experiment 20000436 PARAMETER Experiment Name: At_Drought_P Parameter: Age (day) Value: 7
  misc_feature: MA Experiment 20000436 PARAMETER Experiment Name: At_Drought_P Parameter: Organism Value: A. thaliana
  misc_feature: MA Experiment 20000436 PARAMETER Experiment Name: At_Drought_P Parameter: Plant Line Value: WS
  misc_feature: MA Experiment 20000436 PARAMETER Experiment Name: At_Drought_P Parameter: Timepoint (hr) Value: 12
  misc_feature: MA Experiment 20000436 PARAMETER Experiment Name: At_Drought_P Parameter: Tissue Value: Whole Plant
  misc_feature: MA Experiment 20000436 PARAMETER Experiment Name: At_Drought_P Parameter: Treatment Value: Drought vs. No Drought
  misc_feature: MA Experiment ID: 20000437 Result: Up-regulated in Transcription
  misc_feature: MA Experiment 20000437 PARAMETER Experiment Name: At_Drought_P Parameter: Age (day) Value: 8
  misc_feature: MA Experiment 20000437 PARAMETER Experiment Name: At_Drought_P Parameter: Organism Value: A. thaliana
  misc_feature: MA Experiment 20000437 PARAMETER Experiment Name: At_Drought_P Parameter: Plant Line Value: WS
  misc_feature: MA Experiment 20000437 PARAMETER Experiment Name: At_Drought_P Parameter: Timepoint (hr) Value: 24
  misc_feature: MA Experiment 20000437 PARAMETER Experiment Name: At_Drought_P Parameter: Tissue Value: Whole Plant
  misc_feature: MA Experiment 20000437 PARAMETER Experiment Name: At_Drought_P Parameter: Treatment Value: Drought vs. No Drought
  misc_feature: MA Experiment ID: 20000438 Result: Down-regulated in Transcription
  misc_feature: MA Experiment 20000438 PARAMETER Experiment Name: At_Shoots__P Parameter: Age (day) Value: 14
  misc_feature: MA Experiment 20000438 PARAMETER Experiment Name: At_Shoots__P Parameter: Tissue Value: Shoots vs. Whole Plant
  misc_feature: MA Experiment ID: 20000453 Result: Up-regulated in Transcription
  misc_feature: MA Experiment 20000453 PARAMETER Experiment Name: At_100uM_ABA_P Parameter: Age (day) Value: 15
  misc_feature: MA Experiment 20000453 PARAMETER Experiment Name: At_100uM_ABA_P Parameter: Organism Value: A. thaliana
  misc_feature: MA Experiment 20000453 PARAMETER Experiment Name: At_100uM_ABA_P Parameter: Plant Line Value: WS
  misc_feature: MA Experiment 20000453 PARAMETER Experiment Name: At_100uM_ABA_P Parameter: Timepoint (hr) Value: 24
  misc_feature: MA Experiment 20000453 PARAMETER Experiment Name: At_100uM_ABA_P Parameter: Tissue Value: Aerial
  misc_feature: MA Experiment 20000453 PARAMETER Experiment Name: At_100uM_ABA_P Parameter: Treatment Value: 100uM ABA vs. No Treatment
  misc_feature: MA Experiment ID: 20000496 Result: Up-regulated in Transcription
  misc_feature: MA Experiment 20000496 PARAMETER Experiment Name: At_Guard_Cells_P Parameter: Harvest Date Value: 7/19/2002
  misc_feature: MA Experiment 20000496 PARAMETER Experiment Name: At_Guard_Cells_P Parameter: Organism Value: Canola
  misc_feature: MA Experiment 20000496 PARAMETER Experiment Name: At_Guard_Cells_P Parameter: Tissue Value: Guard Cells vs. Leaves
  misc_feature: MA Experiment ID: 20000527 Result: Down-regulated in Transcription
  misc_feature: MA Experiment 20000527 PARAMETER Experiment Name: At_10percent_PEG_P Parameter: Age (day) Value: 20
  misc_feature: MA Experiment 20000527 PARAMETER Experiment Name: At_10percent_PEG_P Parameter: Organism Value: A. thaliana
  misc_feature: MA Experiment 20000527 PARAMETER Experiment Name: At_10percent_PEG_P Parameter: Plant Line Value: WS
  misc_feature: MA Experiment 20000527 PARAMETER Experiment Name: At_10percent_PEG_P Parameter: Timepoint (day) Value: 20
  misc_feature: MA Experiment 20000527 PARAMETER Experiment Name: At_10percent_PEG_P Parameter: Tissue Value: Whole Plant
  misc_feature: MA Experiment 20000527 PARAMETER Experiment Name: At_10percent_PEG_P Parameter: Treatment Value: 10percent PEG vs. No Treatment
  misc_feature: MA Experiment ID: 20000794 Result: Down-regulated in Transcription
  misc_feature: MA Experiment 20000794 PARAMETER Experiment Name: At_Petals_P Parameter: Age (day) Value: 23-25 days
  misc_feature: MA Experiment 20000794 PARAMETER Experiment Name: At_Petals_P Parameter: Plant Line Value: WS
  misc_feature: MA Experiment 20000794 PARAMETER Experiment Name: At_Petals_P Parameter: Tissue Value: Petals vs. Whole plant
  misc_feature: MA Experiment ID: 20001559 Result: Up-regulated in Transcription
  misc_feature: MA Experiment 20001559 PARAMETER Experiment Name: At_Drought_Soil_Dry_P Parameter: Age (day) Value: 28
  misc_feature: MA Experiment 20001559 PARAMETER Experiment Name: At_Drought_Soil_Dry_P Parameter: Organism Value: A. thaliana
  misc_feature: MA Experiment 20001559 PARAMETER Experiment Name: At_Drought_Soil_Dry_P Parameter: Plant Line Value: WS
  misc_feature: MA Experiment 20001559 PARAMETER Experiment Name: At_Drought_Soil_Dry_P Parameter: Post Timepoint (hr) Value: 29
  misc_feature: MA Experiment 20001559 PARAMETER Experiment Name: At_Drought_Soil_Dry_P Parameter: Post-Treatment Value: Re-Water vs. No Drought
  misc_feature: MA Experiment 20001559 PARAMETER Experiment Name: At_Drought_Soil_Dry_P Parameter: Timepoint (day) Value: 14
  misc_feature: MA Experiment 20001559 PARAMETER Experiment Name: At_Drought_Soil_Dry_P Parameter: Treatment Value: Drought vs. No Drought
  misc_feature: MA Experiment ID: 20001560 Result: Down-regulated in Transcription
  misc_feature: MA Experiment 20001560 PARAMETER Experiment Name: At_Drought_Soil_Dry_P Parameter: Age (day) Value: 28
  misc_feature: MA Experiment 20001560 PARAMETER Experiment Name: At_Drought_Soil_Dry_P Parameter: Organism Value: A. thaliana
  misc_feature: MA Experiment 20001560 PARAMETER Experiment Name: At_Drought_Soil_Dry_P Parameter: Plant Line Value: WS
  misc_feature: MA Experiment 20001560 PARAMETER Experiment Name: At_Drought_Soil_Dry_P Parameter: Post Timepoint (hr) Value: None
  misc_feature: MA Experiment 20001560 PARAMETER Experiment Name: At_Drought_Soil_Dry_P Parameter: Post-Treatment Value: None
  misc_feature: MA Experiment 20001560 PARAMETER Experiment Name: At_Drought_Soil_Dry_P Parameter: Timepoint (day) Value: 14
  misc_feature: MA Experiment 20001560 PARAMETER Experiment Name: At_Drought_Soil_Dry_P Parameter: Treatment Value: Drought vs. No Drought
  misc_feature: MA Experiment ID: 20001904 Result: Up-regulated in Transcription
  misc_feature: MA Experiment 20001904 PARAMETER Experiment Name: At_Drought_Reproduction_P Parameter: Age (day) Value: 37
  misc_feature: MA Experiment 20001904 PARAMETER Experiment Name: At_Drought_Reproduction_P Parameter: Organism Value: A. thaliana
  misc_feature: MA Experiment 20001904 PARAMETER Experiment Name: At_Drought_Reproduction_P Parameter: Plant Line Value: WS
  misc_feature: MA Experiment 20001904 PARAMETER Experiment Name: At_Drought_Reproduction_P Parameter: Timepoint (day) Value: 7
  misc_feature: MA Experiment 20001904 PARAMETER Experiment Name: At_Drought_Reproduction_P Parameter: Tissue Value: Rosettes
  misc_feature: MA Experiment 20001904 PARAMETER Experiment Name: At_Drought_Reproduction_P Parameter: Treatment Value: Drought vs. No Drought
aaaaggaaactattcgtttgctgttctagataaaagccttcaattgagaaaaagaaaatgcctccagctttgacccgttttgcctataaaaggattctctaagatatggactttcctcatcttctcgggtaaacagaatcaactagttttgtttttcctctttcaaaaatgcatttctcttcgtcttcaacatcgtccacttggacaatcttaatcacattgggatgtcttatgcttcatgcatctttgtccgctgctcaactcacccctaccttctacgataggtcatgtcctaatgtcactaacatcgtacgagaaaccattgtaaatgagttaaggtcggaccctcgtatcgctgcgagcatccttcgtcttcacttccacgactgctttgttaatggttgtgacgcatccatcttgttagacaacacgacatcatttcgaacagagaaagatgcgtttggaaacgcaaattcggctcggggatttccagtgattgatagaatgaaagctgcggtggagagggcatgcccaagaaccgtttcatgcgcagatatgctcaccattgcagctcaacaatctgtcactttggcaggaggtccttcttggagggttcctttgggaaggagagacagtttacaagcattcctggaactcgctaatgcaaatcttccagctccattctttacacttccacaacttaaagccagcttcagaaatgttggtctcgatcgtccttctgatctcgttgctctctccggtggtcacacatttggtaaaaatcaatgtcagtttattcttgacagattatacaatttcagcaacacaggtttacccgaccctacactcaacactacttacctccaaactcttcgtggactatgcccccttaatggcaatcgaagtgccttggtagattttgatctacgtacgcctacggttttcgacaacaaatactacgtgaatctcaaagagcgaaaaggtcttatccagagcgaccaagagttgttctctagccccaatgccactgacacaatccccttggtgagagcatatgctgatggcacacaaacattcttcaatgcatttgtggaggcaatgaataggatgggaaacattacaccaactacaggaactcaaggacaaatcagattgaactgtagagttgtgaactccaactctctgctccatgatgtggtggatatcgttgactttgttagctctatgtgagaattgtttacccaatatgtggctacaagaatacatatatattaatgaataaaactctcaagacgtttacttgagaacatttatttt

SEQ ID NO: 25028 - protein, 353 aa, Arabidopsis thaliana
  peptide (1)..(353): Ceres Seq. ID no. 12348655
  misc_feature (48)..(299): Pfam Name: Peroxidase Pfam Description: Peroxidase
  misc_feature (70)..(353): Homolog of NCBI NO: 27448346 NR Description: peroxidase 1 [Lupinus albus]
  misc_feature (22)..(353): Homolog of NCBI NO: 129816 NR Description: Peroxidase C1C precursor
  misc_feature (1)..(353): Homolog of NCBI NO: 21592888 NR Description: peroxidase [Arabidopsis thaliana]
  misc_feature (1)..(353): Homolog of NCBI NO: 129814 NR Description: Peroxidase C1B precursor
  misc_feature (1)..(353): Homolog of NCBI NO: 25453209 NR Description: Peroxidase 32 precursor (Atperox P32) (PRXR3)
  misc_feature (1)..(353): Homolog of NCBI NO: 168241 NR Description: HRPC1
  misc_feature (1)..(353): Homolog of NCBI NO: 129813 NR Description: PEROXIDASE C1A PRECURSOR
  misc_feature (1)..(353): Homolog of NCBI NO: 15229084 NR Description: peroxidase
  misc_feature (1)..(353): Homolog of NCBI NO: 480907 NR Description: peroxidase (EC 1.11.1.7) Cb - Arabidopsis
  misc_feature (1)..(353): Homolog of NCBI NO: 15229095 NR Description: peroxidase, putative
MHFSSSSTSSTWTILITLGCLMLHASLSAAQLTPTFYDRSCPNVTNIVRETIVNELRSDPRIAASILRLHFHDCFVNGCDASILLDNTTSFRTEKDAFGNANSARGFPVIDRMKAAVERACPRTVSCADMLTIAAQQSVTLAGGPSWRVPLGRRDSLQAFLELANANLPAPFFTLPQLKASFRNVGLDRPSDLVALSGGHTFGKNQCQFILDRLYNFSNTGLPDPTLNTTYLQTLRGLCPLNGNRSALVDFDLRTPTVFDNKYYVNLKERKGLIQSDQELFSSPNATDTIPLVRAYADGTQTFFNAFVEAMNRMGNITPTTGTQGQIRLNCRVVNSNSLLHDVVDIVDFVSSM

SEQ ID NO: 25029 - protein, 332 aa, Arabidopsis thaliana
  peptide (1)..(332): Ceres Seq. ID no. 12348656
  misc_feature (27)..(278): Pfam Name: Peroxidase Pfam Description: Peroxidase
  misc_feature (49)..(332): Homolog of NCBI NO: 27448346 NR Description: peroxidase 1 [Lupinus albus]
  misc_feature (1)..(332): Homolog of NCBI NO: 129816 NR Description: Peroxidase C1C precursor
  misc_feature (1)..(332): Homolog of NCBI NO: 21592888 NR Description: peroxidase [Arabidopsis thaliana]
  misc_feature (1)..(332): Homolog of NCBI NO: 129814 NR Description: Peroxidase C1B precursor
  misc_feature (1)..(332): Homolog of NCBI NO: 25453209 NR Description: Peroxidase 32 precursor (Atperox P32) (PRXR3)
  misc_feature (1)..(332): Homolog of NCBI NO: 168241 NR Description: HRPC1
  misc_feature (1)..(332): Homolog of NCBI NO: 129813 NR Description: PEROXIDASE C1A PRECURSOR
  misc_feature (1)..(332): Homolog of NCBI NO: 15229084 NR Description: peroxidase
  misc_feature (1)..(332): Homolog of NCBI NO: 480907 NR Description: peroxidase (EC 1.11.1.7) Cb - Arabidopsis
  misc_feature (1)..(332): Homolog of NCBI NO: 15229095 NR Description: peroxidase, putative
MLHASLSAAQLTPTFYDRSCPNVTNIVRETIVNELRSDPRIAASILRLHFHDCFVNGCDASILLDNTTSFRTEKDAFGNANSARGFPVIDRMKAAVERACPRTVSCADMLTIAAQQSVTLAGGPSWRVPLGRRDSLQAFLELANANLPAPFFTLPQLKASFRNVGLDRPSDLVALSGGHTFGKNQCQFILDRLYNFSNTGLPDPTLNTTYLQTLRGLCPLNGNRSALVDFDLRTPTVFDNKYYVNLKERKGLIQSDQELFSSPNATDTIPLVRAYADGTQTFFNAFVEAMNRMGNITPTTGTQGQIRLNCRVVNSNSLLHDVVDIVDFVSSM

SEQ ID NO: 25030 - protein, 241 aa, Arabidopsis thaliana
  peptide (1)..(241): Ceres Seq. ID no. 12348657
  misc_feature (1)..(187): Pfam Name: Peroxidase Pfam Description: Peroxidase
  misc_feature (1)..(241): Homolog of NCBI NO: 27448346 NR Description: peroxidase 1 [Lupinus albus]
  misc_feature (1)..(241): Homolog of NCBI NO: 129816 NR Description: Peroxidase C1C precursor
  misc_feature (1)..(241): Homolog of NCBI NO: 21592888 NR Description: peroxidase [Arabidopsis thaliana]
  misc_feature (1)..(241): Homolog of NCBI NO: 129814 NR Description: Peroxidase C1B precursor
  misc_feature (1)..(241): Homolog of NCBI NO: 25453209 NR Description: Peroxidase 32 precursor (Atperox P32) (PRXR3)
  misc_feature (1)..(241): Homolog of NCBI NO: 168241 NR Description: HRPC1
  misc_feature (1)..(241): Homolog of NCBI NO: 129813 NR Description: PEROXIDASE C1A PRECURSOR
  misc_feature (1)..(241): Homolog of NCBI NO: 15229084 NR Description: peroxidase
  misc_feature (1)..(241): Homolog of NCBI NO: 480907 NR Description: peroxidase (EC 1.11.1.7) Cb - Arabidopsis
  misc_feature (1)..(241): Homolog of NCBI NO: 15229095 NR Description: peroxidase, putative
MKAAVERACPRTVSCADMLTIAAQQSVTLAGGPSWRVPLGRRDSLQAFLELANANLPAPFFTLPQLKASFRNVGLDRPSDLVALSGGHTFGKNQCQFILDRLYNFSNTGLPDPTLNTTYLQTLRGLCPLNGNRSALVDFDLRTPTVFDNKYYVNLKERKGLIQSDQELFSSPNATDTIPLVRAYADGTQTFFNAFVEAMNRMGNITPTTGTQGQIRLNCRVVNSNSLLHDVVDIVDFVSSM

SEQ ID NO: 25031 - DNA, 1216 bp, Arabidopsis thaliana
  misc_feature (1)..(1216): Ceres Seq. ID no. 12337414
  misc_feature: MA Experiment ID: 108461 Result: Up-regulated in Transcription
  misc_feature: MA Experiment 108461 PARAMETER Experiment Name: At_Germinating_Seeds_cDNA_P Parameter: Age (day) Value: 1 vs. 0
  misc_feature: MA Experiment 108461 PARAMETER Experiment Name: At_Germinating_Seeds_cDNA_P Parameter: Tissue Value: Germinating Seeds
  misc_feature: MA Experiment ID: 108488 Result: Down-regulated in Transcription
  misc_feature: MA Experiment ID: 20000113 Result: Up-regulated in Transcription
  misc_feature: MA Experiment 20000113 PARAMETER Experiment Name: At_42deg_Heat_cDNA_P Parameter: Temperature (deg C) Value: 42 vs. 22
  misc_feature: MA Experiment 20000113 PARAMETER Experiment Name: At_42deg_Heat_cDNA_P Parameter: Timepoint (hr) Value: 8
  misc_feature: MA Experiment 20000113 PARAMETER Experiment Name: At_42deg_Heat_cDNA_P Parameter: Tissue Value: Aerial
  misc_feature: MA Experiment ID: 20000117 Result: Down-regulated in Transcription
  misc_feature: MA Experiment 20000117 PARAMETER Experiment Name: At_100uM_ABA_Mutants_cDNA_P Parameter: Plant Line Value: Columbia
  misc_feature: MA Experiment 20000117 PARAMETER Experiment Name: At_100uM_ABA_Mutants_cDNA_P Parameter: Timepoint (hr) Value: 6
  misc_feature: MA Experiment 20000117 PARAMETER Experiment Name: At_100uM_ABA_Mutants_cDNA_P Parameter: Tissue Value: Aerial
  misc_feature: MA Experiment 20000117 PARAMETER Experiment Name: At_100uM_ABA_Mutants_cDNA_P Parameter: Treatment Value: 100uM ABA vs. No Treatment
  misc_feature: MA Experiment ID: 20000173 Result: Up-regulated in Transcription
  misc_feature: MA Experiment 20000173 PARAMETER Experiment Name: At_42deg_Heat_P Parameter: Age (day) Value: 14
  misc_feature: MA Experiment 20000173 PARAMETER Experiment Name: At_42deg_Heat_P Parameter: Organism Value: A. thaliana
  misc_feature: MA Experiment 20000173 PARAMETER Experiment Name: At_42deg_Heat_P Parameter: Plant Line Value: WS
  misc_feature: MA Experiment 20000173 PARAMETER Experiment Name: At_42deg_Heat_P Parameter: Temperature (deg C) Value: 42 vs. 22
  misc_feature: MA Experiment 20000173 PARAMETER Experiment Name: At_42deg_Heat_P Parameter: Timepoint (hr) Value: 6
  misc_feature: MA Experiment 20000173 PARAMETER Experiment Name: At_42deg_Heat_P Parameter: Tissue Value: Aerial
  misc_feature: MA Experiment ID: 20000179 Result: Up-regulated in Transcription
  misc_feature: MA Experiment 20000179 PARAMETER Experiment Name: At_Germinating_Seeds_P Parameter: Age (hr) Value: 6 vs. 0
  misc_feature: MA Experiment 20000179 PARAMETER Experiment Name: At_Germinating_Seeds_P Parameter: Tissue Value: Germinating Seeds
  misc_feature: MA Experiment ID: 20000180 Result: Up-regulated in Transcription
  misc_feature: MA Experiment 20000180 PARAMETER Experiment Name: At_Germinating_Seeds_P Parameter: Age (hr) Value: 24 vs. 0
  misc_feature: MA Experiment 20000180 PARAMETER Experiment Name: At_Germinating_Seeds_P Parameter: Tissue Value: Germinating Seeds
  misc_feature: MA Experiment ID: 20000224 Result: Up-regulated in Transcription
  misc_feature: MA Experiment ID: 20000264 Result: Up-regulated in Transcription
  misc_feature: MA Experiment 20000264 PARAMETER Experiment Name: At_Open_Flower_P Parameter: Age (day) Value: 21
  misc_feature: MA Experiment 20000264 PARAMETER Experiment Name: At_Open_Flower_P Parameter: Plant Line Value: WS
  misc_feature: MA Experiment 20000264 PARAMETER Experiment Name: At_Open_Flower_P Parameter: Tissue Value: Open Flower vs. Whole Plant
  misc_feature: MA Experiment ID: 20001555 Result: Down-regulated in Transcription
  misc_feature: MA Experiment 20001555 PARAMETER Experiment Name: At_Drought_Soil_Dry_P Parameter: Age (day) Value: 24
  misc_feature: MA Experiment 20001555 PARAMETER Experiment Name: At_Drought_Soil_Dry_P Parameter: Organism Value: A. thaliana
  misc_feature: MA Experiment 20001555 PARAMETER Experiment Name: At_Drought_Soil_Dry_P Parameter: Plant Line Value: WS
  misc_feature: MA Experiment 20001555 PARAMETER Experiment Name: At_Drought_Soil_Dry_P Parameter: Post Timepoint (hr) Value: None
  misc_feature: MA Experiment 20001555 PARAMETER Experiment Name: At_Drought_Soil_Dry_P Parameter: Post-Treatment Value: None
  misc_feature: MA Experiment 20001555 PARAMETER Experiment Name: At_Drought_Soil_Dry_P Parameter: Timepoint (day) Value: 10
  misc_feature: MA Experiment 20001555 PARAMETER Experiment Name: At_Drought_Soil_Dry_P Parameter: Treatment Value: Drought vs. No Drought
  misc_feature: MA Experiment ID: 20001905 Result: Up-regulated in Transcription
  misc_feature: MA Experiment 20001905 PARAMETER Experiment Name: At_Drought_Reproduction_P Parameter: Age (day) Value: 40
  misc_feature: MA Experiment 20001905 PARAMETER Experiment Name: At_Drought_Reproduction_P Parameter: Organism Value: A. thaliana
  misc_feature: MA Experiment 20001905 PARAMETER Experiment Name: At_Drought_Reproduction_P Parameter: Plant Line Value: WS
  misc_feature: MA Experiment 20001905 PARAMETER Experiment Name: At_Drought_Reproduction_P Parameter: Timepoint (day) Value: 10
  misc_feature: MA Experiment 20001905 PARAMETER Experiment Name: At_Drought_Reproduction_P Parameter: Tissue Value: Rosettes
  misc_feature: MA Experiment 20001905 PARAMETER Experiment Name: At_Drought_Reproduction_P Parameter: Treatment Value: Drought vs. No Drought
agacaagtttgttctggataaaaagacaattcatttctattttaattgtctgcaaaattctcacgggccatcggagagaggagacagaggtggtgctgcacaagaatccttcctcctatatcctacaagactttggaatgggaagagaagttgttgaggtgcttatggaccgaaacgccgacgtttcaagcgctagagttcatgttgctcctaagatagctgcagaggagactgatgaggaatttgaagtcaaagaatgcacagaggagaagtctctttctgagaatgcaccaaatgttggatctgctgagagagttggagctcagaaatcacctaaaacccgtaatggaaatgctaaagtttcaaagcagcaggatgctcctcttctcgcggtgaggaagccattgcaacccgagaacaagaagcatattgatgacgaagataattgctccattgcttcttccgttgcaacttccatgaggatgggtaagtctggattgacttatggaagtgctccaacgtttaggagtgctcaacgtgctgagaaacgcaaggagtattaccaaaagctcgaggagaaaaaccaagcgcttgaagctgagaggaacgagcttgaacagaggcaaaaggatgaacaagaagcagccttgaagcaacttagaaagaatctcaagttcaaggctaaacccgtccccaacttctactacgaggcacctcctgcgaaacctgagctcaagaagcttcctttgacacgtcccaagtcgccaaaactgatcctttctcggagaaaaagcttcagcgacgcagtcagctcgtcttcccgtgaagagattctgaagacagtctctaaccgtaaccgacacagcactggaacagttcagaacaaagacgatgatcacaagaacaagaacaccaatgctgcgcacgacagccctcgtgtcagatcaggcaaaggtaaatccggattgaaaccagtgaacgagtcctcagaagaagcttgaaatttcaaaagatgatgctttgttggtctaacttgatcttgccggagaaaatgtaaaatcaaagactctttgtttttcggttatttccggtatacgtttggttcactatgtaactgtctttttcgattttaagttttaacatgaaaaactttatgttgattgttgaacaactcctcctaatgttgaaatttgtaaatctgaatgttgttggattt

SEQ ID NO: 25032 - protein, 332 aa, Arabidopsis thaliana
  peptide (1)..(332): Ceres Seq. ID no. 12337415
  misc_feature (106)..(326): Homolog of NCBI NO: 34897180 NR Description: unknown protein [Oryza sativa (japonica
  misc_feature (87)..(305): Homolog of NCBI NO: 15228950 NR Description: unknown protein; protein id: At3g23090.1
  misc_feature (87)..(305): Homolog of NCBI NO: 9294199 NR Description: gb|AAF04893.1~gene_id:MXC7.13~similar to unknown
  misc_feature (91)..(332): Homolog of NCBI NO: 21553401 NR Description: unknown [Arabidopsis thaliana]
  misc_feature (91)..(332): Homolog of NCBI NO: 18404945 NR Description: expressed protein
  misc_feature (90)..(288): Homolog of NCBI NO: 28453880 NR Description: WAVE-DAMPENED2 [Arabidopsis thaliana]
  misc_feature (46)..(332): Homolog of NCBI NO: 30679219 NR Description: expressed protein [Arabidopsis thaliana]
  misc_feature (46)..(332): Homolog of NCBI NO: 18396961 NR Description: expressed protein
  misc_feature (46)..(332): Homolog of NCBI NO: 21618286 NR Description: unknown [Arabidopsis thaliana]
  misc_feature (45)..(332): Homolog of NCBI NO: 6175167 NR Description: unknown protein [Arabidopsis thaliana]
TSLFWIKRQFISILIVCKILTGHRREETEVVLHKNPSSYILQDFGMGREVVEVLMDRNADVSSARVHVAPKIAAEETDEEFEVKECTEEKSLSENAPNVGSAERVGAQKSPKTRNGNAKVSKQQDAPLLAVRKPLQPENKKHIDDEDNCSIASSVATSMRMGKSGLTYGSAPTFRSAQRAEKRKEYYQKLEEKNQALEAERNELEQRQKDEQEAALKQLRKNLKFKAKPVPNFYYEAPPAKPELKKLPLTRPKSPKLILSRRKSFSDAVSSSSREEILKTVSNRNRHSTGTVQNKDDDHKNKNTNAAHDSPRVRSGKGKSGLKPVNESSEEA

SEQ ID NO: 25033 - protein, 287 aa, Arabidopsis thaliana
  peptide (1)..(287): Ceres Seq. ID no. 12337416
  misc_feature (61)..(281): Homolog of NCBI NO: 34897180 NR Description: unknown protein [Oryza sativa (japonica
  misc_feature (42)..(260): Homolog of NCBI NO: 15228950 NR Description: unknown protein; protein id: At3g23090.1
  misc_feature (42)..(260): Homolog of NCBI NO: 9294199 NR Description: gb|AAF04893.1~gene_id:MXC7.13~similar to unknown
  misc_feature (46)..(287): Homolog of NCBI NO: 21553401 NR Description: unknown [Arabidopsis thaliana]
  misc_feature (46)..(287): Homolog of NCBI NO: 18404945 NR Description: expressed protein
  misc_feature (45)..(243): Homolog of NCBI NO: 28453880 NR Description: WAVE-DAMPENED2 [Arabidopsis thaliana]
  misc_feature (1)..(287): Homolog of NCBI NO: 30679219 NR Description: expressed protein [Arabidopsis thaliana]
  misc_feature (1)..(287): Homolog of NCBI NO: 18396961 NR Description: expressed protein
  misc_feature (1)..(287): Homolog of NCBI NO: 21618286 NR Description: unknown [Arabidopsis thaliana]
  misc_feature (1)..(287): Homolog of NCBI NO: 6175167 NR Description: unknown protein [Arabidopsis thaliana]
MGREVVEVLMDRNADVSSARVHVAPKIAAEETDEEFEVKECTEEKSLSENAPNVGSAERVGAQKSPKTRNGNAKVSKQQDAPLLAVRKPLQPENKKHIDDEDNCSIASSVATSMRMGKSGLTYGSAPTFRSAQRAEKRKEYYQKLEEKNQALEAERNELEQRQKDEQEAALKQLRKNLKFKAKPVPNFYYEAPPAKPELKKLPLTRPKSPKLILSRRKSFSDAVSSSSREEILKTVSNRNRHSTGTVQNKDDDHKNKNTNAAHDSPRVRSGKGKSGLKPVNESSEEA

SEQ ID NO: 25034 - protein, 278 aa, Arabidopsis thaliana
  peptide (1)..(278): Ceres Seq. ID no. 12337417
  misc_feature (52)..(272): Homolog of NCBI NO: 34897180 NR Description: unknown protein [Oryza sativa (japonica
  misc_feature (33)..(251): Homolog of NCBI NO: 15228950 NR Description: unknown protein; protein id: At3g23090.1
  misc_feature (33)..(251): Homolog of NCBI NO: 9294199 NR Description: gb|AAF04893.1~gene_id:MXC7.13~similar to unknown
  misc_feature (37)..(278): Homolog of NCBI NO: 21553401 NR Description: unknown [Arabidopsis thaliana]
  misc_feature (37)..(278): Homolog of NCBI NO: 18404945 NR Description: expressed protein
  misc_feature (36)..(234): Homolog of NCBI NO: 28453880 NR Description: WAVE-DAMPENED2 [Arabidopsis thaliana]
  misc_feature (1)..(278): Homolog of NCBI NO: 30679219 NR Description: expressed protein [Arabidopsis thaliana]
  misc_feature (1)..(278): Homolog of NCBI NO: 18396961 NR Description: expressed protein
  misc_feature (1)..(278): Homolog of NCBI NO: 21618286 NR Description: unknown [Arabidopsis thaliana]
  misc_feature (1)..(278): Homolog of NCBI NO: 6175167 NR Description: unknown protein [Arabidopsis thaliana]
MDRNADVSSARVHVAPKIAAEETDEEFEVKECTEEKSLSENAPNVGSAERVGAQKSPKTRNGNAKVSKQQDAPLLAVRKPLQPENKKHIDDEDNCSIASSVATSMRMGKSGLTYGSAPTFRSAQRAEKRKEYYQKLEEKNQALEAERNELEQRQKDEQEAALKQLRKNLKFKAKPVPNFYYEAPPAKPELKKLPLTRPKSPKLILSRRKSFSDAVSSSSREEILKTVSNRNRHSTGTVQNKDDDHKNKNTNAAHDSPRVRSGKGKSGLKPVNESSEEA

SEQ ID NO: 25035 - DNA, 1325 bp, Arabidopsis thaliana
  misc_feature (1)..(1325): Ceres Seq. ID no. 13490846
  misc_feature: MA Experiment ID: 108434 Result: Up-regulated in Transcription
  misc_feature: MA Experiment 108434 PARAMETER Experiment Name: At_Root_Tips_cDNA_P Parameter: Tissue Value: Root Tips
  misc_feature: MA Experiment ID: 108461 Result: Up-regulated in Transcription
  misc_feature: MA Experiment 108461 PARAMETER Experiment Name: At_Germinating_Seeds_cDNA_P Parameter: Age (day) Value: 1 vs. 0
  misc_feature: MA Experiment 108461 PARAMETER Experiment Name: At_Germinating_Seeds_cDNA_P Parameter: Tissue Value: Germinating Seeds
  misc_feature: MA Experiment ID: 108462 Result: Up-regulated in Transcription
  misc_feature: MA Experiment 108462 PARAMETER Experiment Name: At_Germinating_Seeds_cDNA_P Parameter: Age (day) Value: 2 vs. 0
  misc_feature: MA Experiment 108462 PARAMETER Experiment Name: At_Germinating_Seeds_cDNA_P Parameter: Tissue Value: Germinating Seeds
  misc_feature: MA Experiment ID: 108463 Result: Up-regulated in Transcription
  misc_feature: MA Experiment 108463 PARAMETER Experiment Name: At_Germinating_Seeds_cDNA_P Parameter: Age (day) Value: 3 vs. 0
  misc_feature: MA Experiment 108463 PARAMETER Experiment Name: At_Germinating_Seeds_cDNA_P Parameter: Tissue Value: Germinating Seeds
  misc_feature: MA Experiment ID: 108464 Result: Up-regulated in Transcription
  misc_feature: MA Experiment 108464 PARAMETER Experiment Name: At_Germinating_Seeds_cDNA_P Parameter: Age (day) Value: 4 vs. 0
  misc_feature: MA Experiment 108464 PARAMETER Experiment Name: At_Germinating_Seeds_cDNA_P Parameter: Tissue Value: Germinating Seeds
  misc_feature: MA Experiment ID: 108576 Result: Down-regulated in Transcription
  misc_feature: MA Experiment 108576 PARAMETER Experiment Name: At_42deg_Heat_cDNA_P Parameter: Temperature (deg C) Value: 42 vs. 22
  misc_feature: MA Experiment 108576 PARAMETER Experiment Name: At_42deg_Heat_cDNA_P Parameter: Timepoint (hr) Value: 1
  misc_feature: MA Experiment 108576 PARAMETER Experiment Name: At_42deg_Heat_cDNA_P Parameter: Tissue Value: Aerial
  misc_feature: MA Experiment ID: 108585 Result: Up-regulated in Transcription
  misc_feature: MA Experiment 108585 PARAMETER Experiment Name: At_5mM_NaNP_cDNA_P Parameter: Timepoint (hr) Value: 6
  misc_feature: MA Experiment 108585 PARAMETER Experiment Name: At_5mM_NaNP_cDNA_P Parameter: Tissue Value: Aerial
  misc_feature: MA Experiment 108585 PARAMETER Experiment Name: At_5mM_NaNP_cDNA_P Parameter: Treatment Value: null
  misc_feature: MA Experiment ID: 108668 Result: Down-regulated in Transcription
  misc_feature: MA Experiment 108668 PARAMETER Experiment Name: At_2mM_SA_cDNA_P Parameter: Plant Line Value: WS
  misc_feature: MA Experiment 108668 PARAMETER Experiment Name: At_2mM_SA_cDNA_P Parameter: Timepoint (hr) Value: 6
  misc_feature: MA Experiment 108668 PARAMETER Experiment Name: At_2mM_SA_cDNA_P Parameter: Treatment Value: 2mM SA vs. No Treatment
  misc_feature: MA Experiment ID: 20000069 Result: Down-regulated in Transcription
  misc_feature: MA Experiment 20000069 PARAMETER Experiment Name: At_100uM_ABA_Mutants_cDNA_P Parameter: Plant Line Value: CS23
  misc_feature: MA Experiment 20000069 PARAMETER Experiment Name: At_100uM_ABA_Mutants_cDNA_P Parameter: Timepoint (hr) Value: 6
  misc_feature: MA Experiment 20000069 PARAMETER Experiment Name: At_100uM_ABA_Mutants_cDNA_P Parameter: Tissue Value: Aerial
  misc_feature: MA Experiment 20000069 PARAMETER Experiment Name: At_100uM_ABA_Mutants_cDNA_P Parameter: Treatment Value: 100uM ABA vs. No Treatment
  misc_feature: MA Experiment ID: 20000071 Result: Down-regulated in Transcription
  misc_feature: MA Experiment 20000071 PARAMETER Experiment Name: At_100uM_ABA_Mutants_cDNA_P Parameter: Plant Line Value: CS8104
  misc_feature: MA Experiment 20000071 PARAMETER Experiment Name: At_100uM_ABA_Mutants_cDNA_P Parameter: Timepoint (hr) Value: 6
  misc_feature: MA Experiment 20000071 PARAMETER Experiment Name: At_100uM_ABA_Mutants_cDNA_P Parameter: Tissue Value: Aerial
  misc_feature: MA Experiment 20000071 PARAMETER Experiment Name: At_100uM_ABA_Mutants_cDNA_P Parameter: Treatment Value: 100uM ABA vs. No Treatment
  misc_feature: MA Experiment ID: 20000113 Result: Down-regulated in Transcription
  misc_feature: MA Experiment 20000113 PARAMETER Experiment Name: At_42deg_Heat_cDNA_P Parameter: Temperature (deg C) Value: 42 vs. 22
  misc_feature: MA Experiment 20000113 PARAMETER Experiment Name: At_42deg_Heat_cDNA_P Parameter: Timepoint (hr) Value: 8
  misc_feature: MA Experiment 20000113 PARAMETER Experiment Name: At_42deg_Heat_cDNA_P Parameter: Tissue Value: Aerial
  misc_feature: MA Experiment ID: 20000117 Result: Down-regulated in Transcription
  misc_feature: MA Experiment 20000117 PARAMETER Experiment Name: At_100uM_ABA_Mutants_cDNA_P Parameter: Plant Line Value: Columbia
  misc_feature: MA Experiment 20000117 PARAMETER Experiment Name: At_100uM_ABA_Mutants_cDNA_P Parameter: Timepoint (hr) Value: 6
  misc_feature: MA Experiment 20000117 PARAMETER Experiment Name: At_100uM_ABA_Mutants_cDNA_P Parameter: Tissue Value: Aerial
  misc_feature: MA Experiment 20000117 PARAMETER Experiment Name: At_100uM_ABA_Mutants_cDNA_P Parameter: Treatment Value: 100uM ABA vs. No Treatment
  misc_feature: MA Experiment ID: 20000144 Result: Down-regulated in Transcription
  misc_feature: MA Experiment 20000144 PARAMETER Experiment Name: At_42deg_Heat_cDNA_P Parameter: Temperature (deg C) Value: 42 vs. 22
  misc_feature: MA Experiment 20000144 PARAMETER Experiment Name: At_42deg_Heat_cDNA_P Parameter: Timepoint (hr) Value: 1
  misc_feature: MA Experiment 20000144 PARAMETER Experiment Name: At_42deg_Heat_cDNA_P Parameter: Tissue Value: Aerial
  misc_feature: MA Experiment ID: 20000234 Result: Up-regulated in Transcription
  misc_feature: MA Experiment 20000234 PARAMETER Experiment Name: At_Siliques_P Parameter: Age (day) Value: 21
  misc_feature: MA Experiment 20000234 PARAMETER Experiment Name: At_Siliques_P Parameter: Organism Value: A. thaliana
  misc_feature: MA Experiment 20000234 PARAMETER Experiment Name: At_Siliques_P Parameter: Plant Line Value: WS
  misc_feature: MA Experiment 20000234 PARAMETER Experiment Name: At_Siliques_P Parameter: Tissue Value: Less Than 5mm Siliques vs. Whole Plant
  misc_feature: MA Experiment ID: 20000235 Result: Up-regulated in Transcription
  misc_feature: MA Experiment 20000235 PARAMETER Experiment Name: At_Siliques_P Parameter: Age (day) Value: 21
  misc_feature: MA Experiment 20000235 PARAMETER Experiment Name: At_Siliques_P Parameter: Organism Value: A. thaliana
  misc_feature: MA Experiment 20000235 PARAMETER Experiment Name: At_Siliques_P Parameter: Plant Line Value: WS
  misc_feature: MA Experiment 20000235 PARAMETER Experiment Name: At_Siliques_P Parameter: Tissue Value: 5-10mm Siliques vs. Whole Plant
  misc_feature: MA Experiment ID: 20000264 Result: Up-regulated in Transcription
  misc_feature: MA Experiment 20000264 PARAMETER Experiment Name: At_Open_Flower_P Parameter: Age (day) Value: 21
  misc_feature: MA Experiment 20000264 PARAMETER Experiment Name: At_Open_Flower_P Parameter: Plant Line Value: WS
  misc_feature: MA Experiment 20000264 PARAMETER Experiment Name: At_Open_Flower_P Parameter: Tissue Value: Open Flower vs. Whole Plant
  misc_feature: MA Experiment ID: 20000265 Result: Up-regulated in Transcription
  misc_feature: MA Experiment 20000265 PARAMETER Experiment Name: At_Open_Flower_P Parameter: Age (day) Value: 21
  misc_feature: MA Experiment 20000265 PARAMETER Experiment Name: At_Open_Flower_P Parameter: Plant Line Value: WS
  misc_feature: MA Experiment 20000265 PARAMETER Experiment Name: At_Open_Flower_P Parameter: Tissue Value: Closed Flower vs. Whole Plant
  misc_feature: MA Experiment ID: 20000286 Result: Up-regulated in Transcription
  misc_feature: MA Experiment 20000286 PARAMETER Experiment Name: At_Open_Flower_P Parameter: Age (day) Value: 21
  misc_feature: MA Experiment 20000286 PARAMETER Experiment Name: At_Open_Flower_P Parameter: Plant Line Value: WS
  misc_feature: MA Experiment 20000286 PARAMETER Experiment Name: At_Open_Flower_P Parameter: Tissue Value: Half Open vs. Whole Plant
  misc_feature: MA Experiment ID: 20000438 Result: Up-regulated in Transcription
  misc_feature: MA Experiment 20000438 PARAMETER Experiment Name: At_Shoots__P Parameter: Age (day) Value: 14
  misc_feature: MA Experiment 20000438 PARAMETER Experiment Name: At_Shoots__P Parameter: Tissue Value: Shoots vs. Whole Plant
  misc_feature: MA Experiment ID: 20000495 Result: Up-regulated in Transcription
  misc_feature: MA Experiment 20000495 PARAMETER Experiment Name: At_Guard_Cells_P Parameter: Harvest Date Value: 8/2/2002
  misc_feature: MA Experiment 20000495 PARAMETER Experiment Name: At_Guard_Cells_P Parameter: Organism Value: A. thaliana
  misc_feature: MA Experiment 20000495 PARAMETER Experiment Name: At_Guard_Cells_P Parameter: Tissue Value: Guard Cells vs. Leaves
  misc_feature: MA Experiment ID: 20001450 Result: Down-regulated in Transcription
  misc_feature: MA Experiment 20001450 PARAMETER Experiment Name: At_Far-red-induction_P Parameter: Age (day) Value: 7
  misc_feature: MA Experiment 20001450 PARAMETER Experiment Name: At_Far-red-induction_P Parameter: Light Value: Far-red vs. White
  misc_feature: MA Experiment 20001450 PARAMETER Experiment Name: At_Far-red-induction_P Parameter: Organism Value: A. thaliana
  misc_feature: MA Experiment 20001450 PARAMETER Experiment Name: At_Far-red-induction_P Parameter: Plant Line Value: Columbia
  misc_feature: MA Experiment 20001450 PARAMETER Experiment Name: At_Far-red-induction_P Parameter: Timepoint (hr) Value: 8
  misc_feature: MA Experiment 20001450 PARAMETER Experiment Name: At_Far-red-induction_P Parameter: Tissue Value: Whole Plant
  misc_feature: MA Experiment ID: 20001451 Result: Down-regulated in Transcription
  misc_feature: MA Experiment 20001451 PARAMETER Experiment Name: At_Far-red-induction_P Parameter: Age (day) Value: 7
  misc_feature: MA Experiment 20001451 PARAMETER Experiment Name: At_Far-red-induction_P Parameter: Light Value: Far-red vs. White
  misc_feature: MA Experiment 20001451 PARAMETER Experiment Name: At_Far-red-induction_P Parameter: Organism Value: A. thaliana
  misc_feature: MA Experiment 20001451 PARAMETER Experiment Name: At_Far-red-induction_P Parameter: Plant Line Value: Columbia
  misc_feature: MA Experiment 20001451 PARAMETER Experiment Name: At_Far-red-induction_P Parameter: Timepoint (hr) Value: 24
  misc_feature: MA Experiment 20001451 PARAMETER Experiment Name: At_Far-red-induction_P Parameter: Tissue Value: Whole Plant
  misc_feature: MA Experiment ID: 20001906 Result: Down-regulated in Transcription
  misc_feature: MA Experiment 20001906 PARAMETER Experiment Name: At_Drought_Reproduction_P Parameter: Age (day) Value: 35
  misc_feature: MA Experiment 20001906 PARAMETER Experiment Name: At_Drought_Reproduction_P Parameter: Organism Value: A. thaliana
  misc_feature: MA Experiment 20001906 PARAMETER Experiment Name: At_Drought_Reproduction_P Parameter: Plant Line Value: WS
  misc_feature: MA Experiment 20001906 PARAMETER Experiment Name: At_Drought_Reproduction_P Parameter: Timepoint (day) Value: 5
  misc_feature: MA Experiment 20001906 PARAMETER Experiment Name: At_Drought_Reproduction_P Parameter: Tissue Value: Siliques
  misc_feature: MA Experiment 20001906 PARAMETER Experiment Name: At_Drought_Reproduction_P Parameter: Treatment Value: Drought vs. No Drought
  misc_feature: MA Experiment ID: 20001908 Result: Down-regulated in Transcription
  misc_feature: MA Experiment 20001908 PARAMETER Experiment Name: At_Drought_Reproduction_P Parameter: Age (day) Value: 40
  misc_feature: MA Experiment 20001908 PARAMETER Experiment Name: At_Drought_Reproduction_P Parameter: Organism Value: A. thaliana
  misc_feature: MA Experiment 20001908 PARAMETER Experiment Name: At_Drought_Reproduction_P Parameter: Plant Line Value: WS
  misc_feature: MA Experiment 20001908 PARAMETER Experiment Name: At_Drought_Reproduction_P Parameter: Timepoint (day) Value: 10
  misc_feature: MA Experiment 20001908 PARAMETER Experiment Name: At_Drought_Reproduction_P Parameter: Tissue Value: Siliques
  misc_feature: MA Experiment 20001908 PARAMETER Experiment Name: At_Drought_Reproduction_P Parameter: Treatment Value: Drought vs. No Drought
actccgaccgtttcctttctcacaagccaatggcgcaacttactaattccctcaattatctcttttctgtttctctcttattatttgtatcgttccactgcttatgttttcgtttttcgttggttgcagcttgttcaaactccactgacgatcaacagattcaacaccatcaccaccggaaatgggttggtccctcaggccacaaagtcatcaccgtctcacttaacggccacgctcagtttcgctccgtccaagacgctgtggattccataccaaagaacaataacaagagcatcacaatcaagattgctcccggattttacagagagaaagtggtggttccagctacaaaaccgtacataacgttcaaaggagctggtagggatgtgaccgctatagagtggcacgaccgtgcgtccgaccttggcgctaacggtcaacagttacgtacctatcaaaccgcttccgtcaccgtctacgctaattatttcaccgctagaaacattagcttcacgaatactgcgccggctccattgccggggatgcaagggtggcaagcggtggcgtttaggatctccggcgacaaagctttcttttccggctgcgggttttacggtgcacaagacactttatgcgacgatgctggccgtcattacttcaaggagtgttacattgaaggctctatcgactttatctttggtaatggccgctccatgtataaagattgtgagttgcattcgatagcgtcaagattcgggtcgatagcggcgcatggtaggacatgcccggaagagaaaacgggtttcgcgttcgtgggttgtcgggtaacaggtacgggtccattgtatgtgggccgggccatgggacaatactcacgtatcgtttacgcctacacttactttgatgctctcgtcgctcacggtggttgggacgattgggaccacaaatccaacaaaagcaagacggcatttttcggagtgtacaattgctatgggccaggagcagcagcgacgagaggcgtgtcttgggctagagctttggactatgaatcggcccatccatttatcgctaagagcttcgttaatgggagacattggatcgctcctcgagatgcttaaccaacttcaaaccttggcggggtttcttttcctaattcctcggttcctcccagtcccaagtcctaaaagcttactatatttttatcattcgtttatttcttttattgtttattttttccaatttatttatacattgtgtgatcgtacaacaaagtattgcttcttcttcatctgtatccatttcagttaaatgttttgagcttacac

SEQ ID NO: 25036 - protein, 371 aa, Arabidopsis thaliana
  peptide (1)..(371): Ceres Seq. ID no. 13490847
  misc_feature (69)..(363): Pfam Name: Pectinesterase Pfam Description: Pectinesterase
  misc_feature (55)..(366): Homolog of NCBI NO: 15228023 NR Description: pectinesterase family [Arabidopsis thaliana]
  misc_feature (68)..(366): Homolog of NCBI NO: 15240544 NR Description: pectinesterase family [Arabidopsis thaliana]
  misc_feature (80)..(366): Homolog of NCBI NO: 15241163 NR Description: pectinesterase family [Arabidopsis thaliana]
  misc_feature (56)..(366): Homolog of NCBI NO: 34909402 NR Description: putative pectin methylesterase
  misc_feature (55)..(366): Homolog of NCBI NO: 27754550 NR Description: putative pectinesterase family protein
  misc_feature (50)..(366): Homolog of NCBI NO: 15228022 NR Description: pectinesterase family [Arabidopsis thaliana]
  misc_feature (70)..(366): Homolog of NCBI NO: 15220471 NR Description: pectinesterase family [Arabidopsis thaliana]
  misc_feature (55)..(368): Homolog of NCBI NO: 38345478 NR Description: OSJNBa0010H02.16 [Oryza sativa (japonica
  misc_feature (10)..(371): Homolog of NCBI NO: 9758778 NR Description: pectin methylesterase-like [Arabidopsis thaliana]
  misc_feature (10)..(371): Homolog of NCBI NO: 15238111 NR Description: pectinesterase family [Arabidopsis thaliana]
SDRFLSHKPMAQLTNSLNYLFSVSLLLFVSFHCLCFRFSLVAACSNSTDDQQIQHHHHRKWVGPSGHKVITVSLNGHAQFRSVQDAVDSIPKNNNKSITIKIAPGFYREKVVVPATKPYITFKGAGRDVTAIEWHDRASDLGANGQQLRTYQTASVTVYANYFTARNISFTNTAPAPLPGMQGWQAVAFRISGDKAFFSGCGFYGAQDTLCDDAGRHYFKECYIEGSIDFIFGNGRSMYKDCELHSIASRFGSIAAHGRTCPEEKTGFAFVGCRVTGTGPLYVGRAMGQYSRIVYAYTYFDALVAHGGWDDWDHKSNKSKTAFFGVYNCYGPGAAATRGVSWARALDYESAHPFIAKSFVNGRHWIAPRDA

SEQ ID NO: 25037 - protein, 362 aa, Arabidopsis thaliana
  peptide (1)..(362): Ceres Seq. ID no. 13490848
  misc_feature (60)..(354): Pfam Name: Pectinesterase Pfam Description: Pectinesterase
  misc_feature (61)..(357): Homolog of NCBI NO: 15220471 NR Description: pectinesterase family [Arabidopsis thaliana]
  misc_feature (46)..(357): Homolog of NCBI NO: 27754550 NR Description: putative pectinesterase family protein
  misc_feature (41)..(357): Homolog of NCBI NO: 15228022 NR Description: pectinesterase family [Arabidopsis thaliana]
  misc_feature (46)..(357): Homolog of NCBI NO: 15228023 NR Description: pectinesterase family [Arabidopsis thaliana]
  misc_feature (59)..(357): Homolog of NCBI NO: 15240544 NR Description: pectinesterase family [Arabidopsis thaliana]
  misc_feature (71)..(357): Homolog of NCBI NO: 15241163 NR Description: pectinesterase family [Arabidopsis thaliana]
  misc_feature (47)..(357): Homolog of NCBI NO: 34909402 NR Description: putative pectin methylesterase
  misc_feature (46)..(359): Homolog of NCBI NO: 38345478 NR Description: OSJNBa0010H02.16 [Oryza sativa (japonica
  misc_feature (1)..(362): Homolog of NCBI NO: 9758778 NR Description: pectin methylesterase-like [Arabidopsis thaliana]
  misc_feature (1)..(362): Homolog of NCBI NO: 15238111 NR Description: pectinesterase family [Arabidopsis thaliana]
MAQLTNSLNYLFSVSLLLFVSFHCLCFRFSLVAACSNSTDDQQIQHHHHRKWVGPSGHKVITVSLNGHAQFRSVQDAVDSIPKNNNKSITIKIAPGFYREKVVVPATKPYITFKGAGRDVTAIEWHDRASDLGANGQQLRTYQTASVTVYANYFTARNISFTNTAPAPLPGMQGWQAVAFRISGDKAFFSGCGFYGAQDTLCDDAGRHYFKECYIEGSIDFIFGNGRSMYKDCELHSIASRFGSIAAHGRTCPEEKTGFAFVGCRVTGTGPLYVGRAMGQYSRIVYAYTYFDALVAHGGWDDWDHKSNKSKTAFFGVYNCYGPGAAATRGVSWARALDYESAHPFIAKSFVNGRHWIAPRDA

SEQ ID NO: 25038 - protein, 191 aa, Arabidopsis thaliana
  peptide (1)..(191): Ceres Seq. ID no. 13490849
  misc_feature (1)..(183): Pfam Name: Pectinesterase Pfam Description: Pectinesterase
  misc_feature (1)..(186): Homolog of NCBI NO: 15220471 NR Description: pectinesterase family [Arabidopsis thaliana]
  misc_feature (1)..(186): Homolog of NCBI NO: 27754550 NR Description: putative pectinesterase family protein
  misc_feature (1)..(186): Homolog of NCBI NO: 15228022 NR Description: pectinesterase family [Arabidopsis thaliana]
  misc_feature (1)..(186): Homolog of NCBI NO: 15228023 NR Description: pectinesterase family [Arabidopsis thaliana]
  misc_feature (1)..(186): Homolog of NCBI NO: 15240544 NR Description: pectinesterase family [Arabidopsis thaliana]
  misc_feature (1)..(186): Homolog of NCBI NO: 15241163 NR Description: pectinesterase family [Arabidopsis thaliana]
  misc_feature (1)..(186): Homolog of NCBI NO: 34909402 NR Description: putative pectin methylesterase
  misc_feature (1)..(188): Homolog of NCBI NO: 38345478 NR Description: OSJNBa0010H02.16 [Oryza sativa (japonica
  misc_feature (1)..(191): Homolog of NCBI NO: 9758778 NR Description: pectin methylesterase-like [Arabidopsis thaliana]
  misc_feature (1)..(191): Homolog of NCBI NO: 15238111 NR Description: pectinesterase family [Arabidopsis thaliana]
MQGWQAVAFRISGDKAFFSGCGFYGAQDTLCDDAGRHYFKECYIEGSIDFIFGNGRSMYKDCELHSIASRFGSIAAHGRTCPEEKTGFAFVGCRVTGTGPLYVGRAMGQYSRIVYAYTYFDALVAHGGWDDWDHKSNKSKTAFFGVYNCYGPGAAATRGVSWARALDYESAHPFIAKSFVNGRHWIAPRDA

SEQ ID NO: 25039 - DNA, 1697 bp, Arabidopsis thaliana
  misc_feature (1)..(1697): Ceres Seq. ID no. 13488308
  misc_feature: MA Experiment ID: 108434 Result: Down-regulated in Transcription
  misc_feature: MA Experiment 108434 PARAMETER Experiment Name: At_Root_Tips_cDNA_P Parameter: Tissue Value: Root Tips
  misc_feature: MA Experiment ID: 108573 Result: Up-regulated in Transcription
  misc_feature: MA Experiment 108573 PARAMETER Experiment Name: At_Drought_cDNA_P Parameter: Timepoint (hr) Value: 6
  misc_feature: MA Experiment 108573 PARAMETER Experiment Name: At_Drought_cDNA_P Parameter: Tissue Value: Aerial
  misc_feature: MA Experiment 108573 PARAMETER Experiment Name: At_Drought_cDNA_P Parameter: Treatment Value: Drought vs. No Drought
  misc_feature: MA Experiment ID: 108576 Result: Down-regulated in Transcription
  misc_feature: MA Experiment 108576 PARAMETER Experiment Name: At_42deg_Heat_cDNA_P Parameter: Temperature (deg C) Value: 42 vs. 22
  misc_feature: MA Experiment 108576 PARAMETER Experiment Name: At_42deg_Heat_cDNA_P Parameter: Timepoint (hr) Value: 1
  misc_feature: MA Experiment 108576 PARAMETER Experiment Name: At_42deg_Heat_cDNA_P Parameter: Tissue Value: Aerial
  misc_feature: MA Experiment ID: 108667 Result: Up-regulated in Transcription
  misc_feature: MA Experiment 108667 PARAMETER Experiment Name: At_2mM_SA_cDNA_P Parameter: Plant Line Value: WS
  misc_feature: MA Experiment 108667 PARAMETER Experiment Name: At_2mM_SA_cDNA_P Parameter: Timepoint (hr) Value: 1
  misc_feature: MA Experiment 108667 PARAMETER Experiment Name: At_2mM_SA_cDNA_P Parameter: Treatment Value: 2mM SA vs. No Treatment
  misc_feature: MA Experiment ID: 20000234 Result: Down-regulated in Transcription
  misc_feature: MA Experiment 20000234 PARAMETER Experiment Name: At_Siliques_P Parameter: Age (day) Value: 21
  misc_feature: MA Experiment 20000234 PARAMETER Experiment Name: At_Siliques_P Parameter: Organism Value: A. thaliana
  misc_feature: MA Experiment 20000234 PARAMETER Experiment Name: At_Siliques_P Parameter: Plant Line Value: WS
  misc_feature: MA Experiment 20000234 PARAMETER Experiment Name: At_Siliques_P Parameter: Tissue Value: Less Than 5mm Siliques vs. Whole Plant
  misc_feature: MA Experiment ID: 20000235 Result: Down-regulated in Transcription
  misc_feature: MA Experiment 20000235 PARAMETER Experiment Name: At_Siliques_P Parameter: Age (day) Value: 21
  misc_feature: MA Experiment 20000235 PARAMETER Experiment Name: At_Siliques_P Parameter: Organism Value: A. thaliana
  misc_feature: MA Experiment 20000235 PARAMETER Experiment Name: At_Siliques_P Parameter: Plant Line Value: WS
  misc_feature: MA Experiment 20000235 PARAMETER Experiment Name: At_Siliques_P Parameter: Tissue Value: 5-10mm Siliques vs. Whole Plant
  misc_feature: MA Experiment ID: 20000264 Result: Down-regulated in Transcription
  misc_feature: MA Experiment 20000264 PARAMETER Experiment Name: At_Open_Flower_P Parameter: Age (day) Value: 21
  misc_feature: MA Experiment 20000264 PARAMETER Experiment Name: At_Open_Flower_P Parameter: Plant Line Value: WS
  misc_feature: MA Experiment 20000264 PARAMETER Experiment Name: At_Open_Flower_P Parameter: Tissue Value: Open Flower vs. Whole Plant
  misc_feature: MA Experiment ID: 20000265 Result: Down-regulated in Transcription
  misc_feature: MA Experiment 20000265 PARAMETER Experiment Name: At_Open_Flower_P Parameter: Age (day) Value: 21
  misc_feature: MA Experiment 20000265 PARAMETER Experiment Name: At_Open_Flower_P Parameter: Plant Line Value: WS
  misc_feature: MA Experiment 20000265 PARAMETER Experiment Name: At_Open_Flower_P Parameter: Tissue Value: Closed Flower vs. Whole Plant
  misc_feature: MA Experiment ID: 20000286 Result: Down-regulated in Transcription
  misc_feature: MA Experiment 20000286 PARAMETER Experiment Name: At_Open_Flower_P Parameter: Age (day) Value: 21
  misc_feature: MA Experiment 20000286 PARAMETER Experiment Name: At_Open_Flower_P Parameter: Plant Line Value: WS
  misc_feature: MA Experiment 20000286 PARAMETER Experiment Name: At_Open_Flower_P Parameter: Tissue Value: Half Open vs. Whole Plant
aaaaagacagagagacgagagacgagagctcgtcgaaccagatctctttctctttcttctctctaattttgatttttttgaattttcttctgcaaagcaaaatcgcagaagtcgtcgtgtgtccgcgttgcatcgaaccacttgttcgattctctttcgtcatcctctcttatatcatcagcaacaacaacccttgtttcaaatttcttcattttcgccggatttataatcgcagattgattctgatcgatagagatagggttattcaaggagagacctcgattgacttcaattgtcttcctgattcgatagataagatttagggttagcttgacgttgacgttgatataggggaatggagacggacaatgggaaggggttgatactagctgtagcgtcaagtgttttcattggttccagcttcattcttaagaagaaaggtcttaagcgagctggtgctattggcacccgagcaggatatggaggctatacttatttattagagccgctttggtgggcagggatggttactatgattgttggagaagctgcaaactttgtggcttacatttatgcaccagctgtactcgttactcctctcggtgcattaagtataatcatcagtgctgttttggcacatttcttattgaaggaaaaacttaagaaaatgggggttctcggatgtgtgtcttgcattgttgggtctgttgttattgttatacacgcacctaaggaacagactcctaattccgttgaggaaatatggaatctggctactcagccagcttttctaatctacgtagccataaccatgtcgattgtccttgctttaattctgcattttgaacccctgtgcggccaaacaaacattctggtttatattggaatctgttcgttaatgggtgctctcactgttatgagcataaaagctattggaattgcgataaaattaacaatggagggagtaagccagatcgggtatccacagacatggctttttgtcatggttgcagtaacttgtgtcgttacacaattgatttacctaaataaggctttggacacattcaacgcagccattgtttctccagtatactatgtaatgttcacaaccctcacaattgttgctagtgcaataatgttcaaggactggtctgggcaagacgcagccagcgtagcctctgagttatgtggattcatcactgtgctcacagggacaatgatactccatggcacaagagaagaggaacaacaacaagcttcttcagaacatgtaagatggtacgactcgagaaagagcatgaacgaagaacatttggtaagcctgtacagtcctgaatactaggaagaagaagatgcaatatctctaggctctcaatagattgagtgaaatttgccaaaaacaagcctcatgagtcttaaaactggatcaatcaacaaatctgcggtcgggttcatttttgtattgttttatggtcactgtacagacaaaaaagtttgtctagttaaaaaaacttcacattctttagttttgatctttgtgtctctcttcttagtacagtacaggtcttcttcttatctggactcttttgtccaaatttacactgttatatatttatatatgtatctacatttttctaggatgaaatattccttcattgtatctcacttgaatgaaataataaggtaaaagtttgatc

SEQ ID NO: 25040 - protein, 328 aa, Arabidopsis thaliana
  peptide (1)..(328): Ceres Seq. ID no. 13488309
  misc_feature (1)..(300): Pfam Name: Protein of unknown function (DUF803) Pfam Description: Protein of unknown function (DUF803)
  misc_feature (1)..(295): Homolog of NCBI NO: 21593618 NR Description: unknown [Arabidopsis thaliana]
  misc_feature (1)..(295): Homolog of NCBI NO: 18414079 NR Description: expressed protein [Arabidopsis thaliana]
  misc_feature (1)..(295): Homolog of NCBI NO: 15229534 NR Description: purine permease - related [Arabidopsis thaliana]
  misc_feature (1)..(295): Homolog of NCBI NO: 20161440 NR Description: B1065E10.15 [Oryza sativa (japonica
  misc_feature (1)..(295): Homolog of NCBI NO: 25406128 NR Description: unknown protein F17M19.5 [imported] - Arabidopsis
  misc_feature (1)..(327): Homolog of NCBI NO: 18409942 NR Description: expressed protein [Arabidopsis thaliana]
  misc_feature (1)..(295): Homolog of NCBI NO: 18399280 NR Description: purine permease - related [Arabidopsis thaliana]
  misc_feature (1)..(328): Homolog of NCBI NO: 26449939 NR Description: unknown protein [Arabidopsis thaliana]
  misc_feature (1)..(328): Homolog of NCBI NO: 25412015 NR Description: hypothetical protein At2g21120 [imported] -
  misc_feature (1)..(328): Homolog of NCBI NO: 30681265 NR Description: expressed protein [Arabidopsis thaliana]
METDNGKGLILAVASSVFIGSSFILKKKGLKRAGAIGTRAGYGGYTYLLEPLWWAGMVTMIVGEAANFVAYIYAPAVLVTPLGALSIIISAVLAHFLLKEKLKKMGVLGCVSCIVGSVVIVIHAPKEQTPNSVEEIWNLATQPAFLIYVAITMSIVLALILHFEPLCGQTNILVYIGICSLMGALTVMSIKAIGIAIKLTMEGVSQIGYPQTWLFVMVAVTCVVTQLIYLNKALDTFNAAIVSPVYYVMFTTLTIVASAIMFKDWSGQDAASVASELCGFITVLTGTMILHGTREEEQQQASSEHVRWYDSRKSMNEEHLVSLYSPEY

SEQ ID NO: 25041 - protein, 272 aa, Arabidopsis thaliana
  peptide (1)..(272): Ceres Seq. ID no. 13488310
  misc_feature (1)..(244): Pfam Name: Protein of unknown function (DUF803) Pfam Description: Protein of unknown function (DUF803)
  misc_feature (1)..(239): Homolog of NCBI NO: 21593618 NR Description: unknown [Arabidopsis thaliana]
  misc_feature (1)..(239): Homolog of NCBI NO: 18414079 NR Description: expressed protein [Arabidopsis thaliana]
  misc_feature (1)..(239): Homolog of NCBI NO: 15229534 NR Description: purine permease - related [Arabidopsis thaliana]
  misc_feature (1)..(239): Homolog of NCBI NO: 20161440 NR Description: B1065E10.15 [Oryza sativa (japonica
  misc_feature (1)..(239): Homolog of NCBI NO: 25406128 NR Description: unknown protein F17M19.5 [imported] - Arabidopsis
  misc_feature (1)..(271): Homolog of NCBI NO: 18409942 NR Description: expressed protein [Arabidopsis thaliana]
  misc_feature (1)..(239): Homolog of NCBI NO: 18399280 NR Description: purine permease - related [Arabidopsis thaliana]
  misc_feature (1)..(272): Homolog of NCBI NO: 26449939 NR Description: unknown protein [Arabidopsis thaliana]
  misc_feature (1)..(272): Homolog of NCBI NO: 25412015 NR Description: hypothetical protein At2g21120 [imported] -
  misc_feature (1)..(272): Homolog of NCBI NO: 30681265 NR Description: expressed protein [Arabidopsis thaliana]
MVTMIVGEAANFVAYIYAPAVLVTPLGALSIIISAVLAHFLLKEKLKKMGVLGCVSCIVGSVVIVIHAPKEQTPNSVEEIWNLATQPAFLIYVAITMSIVLALILHFEPLCGQTNILVYIGICSLMGALTVMSIKAIGIAIKLTMEGVSQIGYPQTWLFVMVAVTCVVTQLIYLNKALDTFNAAIVSPVYYVMFTTLTIVASAIMFKDWSGQDAASVASELCGFITVLTGTMILHGTREEEQQQASSEHVRWYDSRKSMNEEHLVSLYSPEY

SEQ ID NO: 25042 - protein, 269 aa, Arabidopsis thaliana
  peptide (1)..(269): Ceres Seq. ID no. 13488311
  misc_feature (1)..(241): Pfam Name: Protein of unknown function (DUF803) Pfam Description: Protein of unknown function (DUF803)
  misc_feature (1)..(236): Homolog of NCBI NO: 21593618 NR Description: unknown [Arabidopsis thaliana]
  misc_feature (1)..(236): Homolog of NCBI NO: 18414079 NR Description: expressed protein [Arabidopsis thaliana]
  misc_feature (1)..(236): Homolog of NCBI NO: 15229534 NR Description: purine permease - related [Arabidopsis thaliana]
  misc_feature (1)..(236): Homolog of NCBI NO: 20161440 NR Description: B1065E10.15 [Oryza sativa (japonica
  misc_feature (1)..(236): Homolog of NCBI NO: 25406128 NR Description: unknown protein F17M19.5 [imported] - Arabidopsis
  misc_feature (1)..(268): Homolog of NCBI NO: 18409942 NR Description: expressed protein [Arabidopsis thaliana]
  misc_feature (1)..(236): Homolog of NCBI NO: 18399280 NR Description: purine permease - related [Arabidopsis thaliana]
  misc_feature (1)..(269): Homolog of NCBI NO: 26449939 NR Description: unknown protein [Arabidopsis thaliana]
  misc_feature (1)..(269): Homolog of NCBI NO: 25412015 NR Description: hypothetical protein At2g21120 [imported] -
  misc_feature (1)..(269): Homolog of NCBI NO: 30681265 NR Description: expressed protein [Arabidopsis thaliana]
MIVGEAANFVAYIYAPAVLVTPLGALSIIISAVLAHFLLKEKLKKMGVLGCVSCIVGSVVIVIHAPKEQTPNSVEEIWNLATQPAFLIYVAITMSIVLALILHFEPLCGQTNILVYIGICSLMGALTVMSIKAIGIAIKLTMEGVSQIGYPQTWLFVMVAVTCVVTQLIYLNKALDTFNAAIVSPVYYVMFTTLTIVASAIMFKDWSGQDAASVASELCGFITVLTGTMILHGTREEEQQQASSEHVRWYDSRKSMNEEHLVSLYSPEY

SEQ ID NO: 25043 - DNA, 1635 bp, Arabidopsis thaliana
  misc_feature (1)..(1635): Ceres Seq. ID no. 12371330
  misc_feature: MA Experiment ID: 108569 Result: Up-regulated in Transcription
  misc_feature: MA Experiment 108569 PARAMETER Experiment Name: At_0.001%_MeJA__cDNA_P Parameter: Timepoint (hr) Value: 6
  misc_feature: MA Experiment 108569 PARAMETER Experiment Name: At_0.001%_MeJA__cDNA_P Parameter: Tissue Value: Aerial
  misc_feature: MA Experiment 108569 PARAMETER Experiment Name: At_0.001%_MeJA__cDNA_P Parameter: Treatment Value: 0.001% MeJA vs. No Treatment
  misc_feature: MA Experiment ID: 108574 Result: Up-regulated in Transcription
  misc_feature: MA Experiment 108574 PARAMETER Experiment Name: At_Wounding__cDNA_P Parameter: Timepoint (hr) Value: 1
  misc_feature: MA Experiment 108574 PARAMETER Experiment Name: At_Wounding__cDNA_P Parameter: Tissue Value: Aerial
  misc_feature: MA Experiment 108574 PARAMETER Experiment Name: At_Wounding__cDNA_P Parameter: Treatment Value: Wounding vs. No Wounding
  misc_feature: MA Experiment ID: 108576 Result: Down-regulated in Transcription
  misc_feature: MA Experiment 108576 PARAMETER Experiment Name: At_42deg_Heat_cDNA_P Parameter: Temperature (deg C) Value: 42 vs. 22
  misc_feature: MA Experiment 108576 PARAMETER Experiment Name: At_42deg_Heat_cDNA_P Parameter: Timepoint (hr) Value: 1
  misc_feature: MA Experiment 108576 PARAMETER Experiment Name: At_42deg_Heat_cDNA_P Parameter: Tissue Value: Aerial
  misc_feature: MA Experiment ID: 108577 Result: Down-regulated in Transcription
  misc_feature: MA Experiment 108577 PARAMETER Experiment Name: At_42deg_Heat_cDNA_P Parameter: Temperature (deg C) Value: 42 vs. 22
  misc_feature: MA Experiment 108577 PARAMETER Experiment Name: At_42deg_Heat_cDNA_P Parameter: Timepoint (hr) Value: 6
  misc_feature: MA Experiment 108577 PARAMETER Experiment Name: At_42deg_Heat_cDNA_P Parameter: Tissue Value: Aerial
  misc_feature: MA Experiment ID: 108579 Result: Up-regulated in Transcription
  misc_feature: MA Experiment 108579 PARAMETER Experiment Name: At_4deg_Cold_cDNA_P Parameter: Temperature (deg C) Value: 4 vs. 22
  misc_feature: MA Experiment 108579 PARAMETER Experiment Name: At_4deg_Cold_cDNA_P Parameter: Timepoint (hr) Value: 6
  misc_feature: MA Experiment 108579 PARAMETER Experiment Name: At_4deg_Cold_cDNA_P Parameter: Tissue Value: Aerial
  misc_feature: MA Experiment ID: 20000071 Result: Up-regulated in Transcription
  misc_feature: MA Experiment 20000071 PARAMETER Experiment Name: At_100uM_ABA_Mutants_cDNA_P Parameter: Plant Line Value: CS8104
  misc_feature: MA Experiment 20000071 PARAMETER Experiment Name: At_100uM_ABA_Mutants_cDNA_P Parameter: Timepoint (hr) Value: 6
  misc_feature: MA Experiment 20000071 PARAMETER Experiment Name: At_100uM_ABA_Mutants_cDNA_P Parameter: Tissue Value: Aerial
  misc_feature: MA Experiment 20000071 PARAMETER Experiment Name: At_100uM_ABA_Mutants_cDNA_P Parameter: Treatment Value: 100uM ABA vs. No Treatment
  misc_feature: MA Experiment ID: 20000088 Result: Up-regulated in Transcription
  misc_feature: MA Experiment 20000088 PARAMETER Experiment Name: At_100uM_ABA_Mutants_cDNA_P Parameter: Plant Line Value: Landsberg
  misc_feature: MA Experiment 20000088 PARAMETER Experiment Name: At_100uM_ABA_Mutants_cDNA_P Parameter: Timepoint (hr) Value: 6
  misc_feature: MA Experiment 20000088 PARAMETER Experiment Name: At_100uM_ABA_Mutants_cDNA_P Parameter: Tissue Value: Aerial
  misc_feature: MA Experiment 20000088 PARAMETER Experiment Name: At_100uM_ABA_Mutants_cDNA_P Parameter: Treatment Value: 100uM ABA vs. No Treatment
  misc_feature: MA Experiment ID: 20000166 Result: Up-regulated in Transcription
  misc_feature: MA Experiment 20000166 PARAMETER Experiment Name: At_100uM_ABA_P Parameter: Age (day) Value: 14
  misc_feature: MA Experiment 20000166 PARAMETER Experiment Name: At_100uM_ABA_P Parameter: Organism Value: A. thaliana
  misc_feature: MA Experiment 20000166 PARAMETER Experiment Name: At_100uM_ABA_P Parameter: Plant Line Value: WS
  misc_feature: MA Experiment 20000166 PARAMETER Experiment Name: At_100uM_ABA_P Parameter: Timepoint (hr) Value: 1
  misc_feature: MA Experiment 20000166 PARAMETER Experiment Name: At_100uM_ABA_P Parameter: Tissue Value: Aerial
  misc_feature: MA Experiment 20000166 PARAMETER Experiment Name: At_100uM_ABA_P Parameter: Treatment Value: 100uM ABA vs. No Treatment
  misc_feature: MA Experiment ID: 20000171 Result: Down-regulated in Transcription
  misc_feature: MA Experiment 20000171 PARAMETER Experiment Name: At_42deg_Heat_P Parameter: Age (day) Value: 14
  misc_feature: MA Experiment 20000171 PARAMETER Experiment Name: At_42deg_Heat_P Parameter: Organism Value: A. thaliana
  misc_feature: MA Experiment 20000171 PARAMETER Experiment Name: At_42deg_Heat_P Parameter: Plant Line Value: WS
  misc_feature: MA Experiment 20000171 PARAMETER Experiment Name: At_42deg_Heat_P Parameter: Temperature (deg C) Value: 42 vs. 22
  misc_feature: MA Experiment 20000171 PARAMETER Experiment Name: At_42deg_Heat_P Parameter: Timepoint (hr) Value: 1
  misc_feature: MA Experiment 20000171 PARAMETER Experiment Name: At_42deg_Heat_P Parameter: Tissue Value: Aerial
  misc_feature: MA Experiment ID: 20000180 Result: Up-regulated in Transcription
  misc_feature: MA Experiment 20000180 PARAMETER Experiment Name: At_Germinating_Seeds_P Parameter: Age (hr) Value: 24 vs. 0
  misc_feature: MA Experiment 20000180 PARAMETER Experiment Name: At_Germinating_Seeds_P Parameter: Tissue Value: Germinating Seeds
  misc_feature: MA Experiment ID: 20000184 Result: Down-regulated in Transcription
  misc_feature: MA Experiment 20000184 PARAMETER Experiment Name: At_Shoots__P Parameter: Age (day) Value: 7
  misc_feature: MA Experiment 20000184 PARAMETER Experiment Name: At_Shoots__P Parameter: Tissue Value: Shoots vs. Whole Plant
  misc_feature: MA Experiment ID: 20000185 Result: Down-regulated in Transcription
  misc_feature: MA Experiment 20000185 PARAMETER Experiment Name: At_Roots__P Parameter: Age (day) Value: 7 vs. 21
  misc_feature: MA Experiment 20000185 PARAMETER Experiment Name: At_Roots__P Parameter: Organism Value: A. thaliana
  misc_feature: MA Experiment 20000185 PARAMETER Experiment Name: At_Roots__P Parameter: Tissue Value: Roots vs. Whole Plant
  misc_feature: MA Experiment ID: 20000211 Result: Up-regulated in Transcription
  misc_feature: MA Experiment 20000211 PARAMETER Experiment Name: At_0.001percent_MeJA__P Parameter: Age (day) Value: 14
  misc_feature: MA Experiment 20000211 PARAMETER Experiment Name: At_0.001percent_MeJA__P Parameter: Organism Value: A. thaliana
  misc_feature: MA Experiment 20000211 PARAMETER Experiment Name: At_0.001percent_MeJA__P Parameter: Plant Line Value: WS
  misc_feature: MA Experiment 20000211 PARAMETER Experiment Name: At_0.001percent_MeJA__P Parameter: Timepoint (hr) Value: 1
  misc_feature: MA Experiment 20000211 PARAMETER Experiment Name: At_0.001percent_MeJA__P Parameter: Tissue Value: Aerial
  misc_feature: MA Experiment 20000211 PARAMETER Experiment Name: At_0.001percent_MeJA__P Parameter: Treatment Value: 0.001percent MeJA vs. No Treatment
  misc_feature: MA Experiment ID: 20000227 Result: Down-regulated in Transcription
  misc_feature: MA Experiment 20000227 PARAMETER Experiment Name: At_Root-Tips-vs-Tops_P Parameter: Tissue Value: Root Tips vs. Root Tops
  misc_feature: MA Experiment ID: 20000234 Result: Up-regulated in Transcription
  misc_feature: MA Experiment 20000234 PARAMETER Experiment Name: At_Siliques_P Parameter: Age (day) Value: 21
  misc_feature: MA Experiment 20000234 PARAMETER Experiment Name: At_Siliques_P Parameter: Organism Value: A. thaliana
  misc_feature: MA Experiment 20000234 PARAMETER Experiment Name: At_Siliques_P Parameter: Plant Line Value: WS
  misc_feature: MA Experiment 20000234 PARAMETER Experiment Name: At_Siliques_P Parameter: Tissue Value: Less Than 5mm Siliques vs. Whole Plant
  misc_feature: MA Experiment ID: 20000264 Result: Up-regulated in Transcription
  misc_feature: MA Experiment 20000264 PARAMETER Experiment Name: At_Open_Flower_P Parameter: Age (day) Value: 21
  misc_feature: MA Experiment 20000264 PARAMETER Experiment Name: At_Open_Flower_P Parameter: Plant Line Value: WS
  misc_feature: MA Experiment 20000264 PARAMETER Experiment Name: At_Open_Flower_P Parameter: Tissue Value: Open Flower vs. Whole Plant
  misc_feature: MA Experiment ID: 20000265 Result: Up-regulated in Transcription
  misc_feature: MA Experiment 20000265 PARAMETER Experiment Name: At_Open_Flower_P Parameter: Age (day) Value: 21
  misc_feature: MA Experiment 20000265 PARAMETER Experiment Name: At_Open_Flower_P Parameter: Plant Line Value: WS
  misc_feature: MA Experiment 20000265 PARAMETER Experiment Name: At_Open_Flower_P Parameter: Tissue Value: Closed Flower vs. Whole Plant
  misc_feature: MA Experiment ID: 20000268 Result: Up-regulated in Transcription
  misc_feature: MA Experiment 20000268 PARAMETER Experiment Name: At_100mM_NaCl__P Parameter: Age (day) Value: 14
  misc_feature: MA Experiment 20000268 PARAMETER Experiment Name: At_100mM_NaCl__P Parameter: Organism Value: A. thaliana
  misc_feature: MA Experiment 20000268 PARAMETER Experiment Name: At_100mM_NaCl__P Parameter: Plant Line Value: WS
  misc_feature: MA Experiment 20000268 PARAMETER Experiment Name: At_100mM_NaCl__P Parameter: Timepoint (hr) Value: 6
  misc_feature: MA Experiment 20000268 PARAMETER Experiment Name: At_100mM_NaCl__P Parameter: Tissue Value: Whole Plant
  misc_feature: MA Experiment 20000268 PARAMETER Experiment Name: At_100mM_NaCl__P Parameter: Treatment Value: 100mM NaCl vs. No Treatment
  misc_feature: MA Experiment ID: 20000286 Result: Up-regulated in Transcription
  misc_feature: MA Experiment 20000286 PARAMETER Experiment Name: At_Open_Flower_P Parameter: Age (day) Value: 21
  misc_feature: MA Experiment 20000286 PARAMETER Experiment Name: At_Open_Flower_P Parameter: Plant Line Value: WS
  misc_feature: MA Experiment 20000286 PARAMETER Experiment Name: At_Open_Flower_P Parameter: Tissue Value: Half Open vs. Whole Plant
  misc_feature: MA Experiment ID: 20000308 Result: Up-regulated in Transcription
  misc_feature: MA Experiment 20000308 PARAMETER Experiment Name: At_100mM_NaCl__P Parameter: Age (day) Value: 17
  misc_feature: MA Experiment 20000308 PARAMETER Experiment Name: At_100mM_NaCl__P Parameter: Organism Value: A. thaliana
  misc_feature: MA Experiment 20000308 PARAMETER Experiment Name: At_100mM_NaCl__P Parameter: Plant Line Value: WS
  misc_feature: MA Experiment 20000308 PARAMETER Experiment Name: At_100mM_NaCl__P Parameter: Timepoint (hr) Value: 72
  misc_feature: MA Experiment 20000308 PARAMETER Experiment Name: At_100mM_NaCl__P Parameter: Tissue Value: Whole Plant
  misc_feature: MA Experiment 20000308 PARAMETER Experiment Name: At_100mM_NaCl__P Parameter: Treatment Value: 100mM NaCl vs. No Treatment
  misc_feature: MA Experiment ID: 20000438 Result: Down-regulated in Transcription
  misc_feature: MA Experiment 20000438 PARAMETER Experiment Name: At_Shoots__P Parameter: Age (day) Value: 14
  misc_feature: MA Experiment 20000438 PARAMETER Experiment Name: At_Shoots__P Parameter: Tissue Value: Shoots vs. Whole Plant
  misc_feature: MA Experiment ID: 20000451 Result: Up-regulated in Transcription
  misc_feature: MA Experiment 20000451 PARAMETER Experiment Name: At_CS6879_Shoots-Roots_P Parameter: Age (day) Value: 14
  misc_feature: MA Experiment 20000451 PARAMETER Experiment Name: At_CS6879_Shoots-Roots_P Parameter: Organism Value: A. thaliana
  misc_feature: MA Experiment 20000451 PARAMETER Experiment Name: At_CS6879_Shoots-Roots_P Parameter: Plant Line Value: CS6879 vs. WS
  misc_feature: MA Experiment 20000451 PARAMETER Experiment Name: At_CS6879_Shoots-Roots_P Parameter: Tissue Value: Roots
  misc_feature: MA Experiment ID: 20000495 Result: Down-regulated in Transcription
  misc_feature: MA Experiment 20000495 PARAMETER Experiment Name: At_Guard_Cells_P Parameter: Harvest Date Value: 8/2/2002
  misc_feature: MA Experiment 20000495 PARAMETER Experiment Name: At_Guard_Cells_P Parameter: Organism Value: A. thaliana
  misc_feature: MA Experiment 20000495 PARAMETER Experiment Name: At_Guard_Cells_P Parameter: Tissue Value: Guard Cells vs. Leaves
  misc_feature: MA Experiment ID: 20000527 Result: Down-regulated in Transcription
  misc_feature: MA Experiment 20000527 PARAMETER Experiment Name: At_10percent_PEG_P Parameter: Age (day) Value: 20
  misc_feature: MA Experiment 20000527 PARAMETER Experiment Name: At_10percent_PEG_P Parameter: Organism Value: A. thaliana
  misc_feature: MA Experiment 20000527 PARAMETER Experiment Name: At_10percent_PEG_P Parameter: Plant Line Value: WS
  misc_feature: MA Experiment 20000527 PARAMETER Experiment Name: At_10percent_PEG_P Parameter: Timepoint (day) Value: 20
  misc_feature: MA Experiment 20000527 PARAMETER Experiment Name: At_10percent_PEG_P Parameter: Tissue Value: Whole Plant
  misc_feature: MA Experiment 20000527 PARAMETER Experiment Name: At_10percent_PEG_P Parameter: Treatment Value: 10percent PEG vs. No Treatment
  misc_feature: MA Experiment ID: 20000573 Result: Down-regulated in Transcription
  misc_feature: MA Experiment 20000573 PARAMETER Experiment Name: At_100uM_ABA_Mutants__P Parameter: Organism Value: A. thaliana
  misc_feature: MA Experiment 20000573 PARAMETER Experiment Name: At_100uM_ABA_Mutants__P Parameter: Plant Line Value: CS22 vs. Ler wt
  misc_feature: MA Experiment 20000573 PARAMETER Experiment Name: At_100uM_ABA_Mutants__P Parameter: Timepoint (hr) Value: N/A
  misc_feature: MA Experiment 20000573 PARAMETER Experiment Name: At_100uM_ABA_Mutants__P Parameter: Tissue Value: Whole Plant
  misc_feature: MA Experiment 20000573 PARAMETER Experiment Name: At_100uM_ABA_Mutants__P Parameter: Treatment Value: None
  misc_feature: MA Experiment ID: 20000574 Result: Down-regulated in Transcription
  misc_feature: MA Experiment 20000574 PARAMETER Experiment Name: At_100uM_ABA_Mutants__P Parameter: Organism Value: A. thaliana
  misc_feature: MA Experiment 20000574 PARAMETER Experiment Name: At_100uM_ABA_Mutants__P Parameter: Plant Line Value: CS23 vs. Ler wt
  misc_feature: MA Experiment 20000574 PARAMETER Experiment Name: At_100uM_ABA_Mutants__P Parameter: Timepoint (hr) Value: N/A
  misc_feature: MA Experiment 20000574 PARAMETER Experiment Name: At_100uM_ABA_Mutants__P Parameter: Tissue Value: Whole Plant
  misc_feature: MA Experiment 20000574 PARAMETER Experiment Name: At_100uM_ABA_Mutants__P Parameter: Treatment Value: None
  misc_feature: MA Experiment ID: 20001248 Result: Down-regulated in Transcription
  misc_feature: MA Experiment 20001248 PARAMETER Experiment Name: At_Far-red-induction_P Parameter: Age (day) Value: 7
  misc_feature: MA Experiment 20001248 PARAMETER Experiment Name: At_Far-red-induction_P Parameter: Light Value: Far-red vs. White
  misc_feature: MA Experiment 20001248 PARAMETER Experiment Name: At_Far-red-induction_P Parameter: Organism Value: A. thaliana
  misc_feature: MA Experiment 20001248 PARAMETER Experiment Name: At_Far-red-induction_P Parameter: Plant Line Value: Columbia
  misc_feature: MA Experiment 20001248 PARAMETER Experiment Name: At_Far-red-induction_P Parameter: Timepoint (hr) Value: 4
  misc_feature: MA Experiment 20001248 PARAMETER Experiment Name: At_Far-red-induction_P Parameter: Tissue Value: Whole Plant
  misc_feature: MA Experiment ID: 20001450 Result: Down-regulated in Transcription
  misc_feature: MA Experiment 20001450 PARAMETER Experiment Name: At_Far-red-induction_P Parameter: Age (day) Value: 7
  misc_feature: MA Experiment 20001450 PARAMETER Experiment Name: At_Far-red-induction_P Parameter: Light Value: Far-red vs. White
  misc_feature: MA Experiment 20001450 PARAMETER Experiment Name: At_Far-red-induction_P Parameter: Organism Value: A. thaliana
  misc_feature: MA Experiment 20001450 PARAMETER Experiment Name: At_Far-red-induction_P Parameter: Plant Line Value: Columbia
  misc_feature: MA Experiment 20001450 PARAMETER Experiment Name: At_Far-red-induction_P Parameter: Timepoint (hr) Value: 8
  misc_feature: MA Experiment 20001450 PARAMETER Experiment Name: At_Far-red-induction_P Parameter: Tissue Value: Whole Plant
  misc_feature: MA Experiment ID: 20001451 Result: Down-regulated in Transcription
  misc_feature: MA Experiment 20001451 PARAMETER Experiment Name: At_Far-red-induction_P Parameter: Age (day) Value: 7
  misc_feature: MA Experiment 20001451 PARAMETER Experiment Name: At_Far-red-induction_P Parameter: Light Value: Far-red vs. White
  misc_feature: MA Experiment 20001451 PARAMETER Experiment Name: At_Far-red-induction_P Parameter: Organism Value: A. thaliana
  misc_feature: MA Experiment 20001451 PARAMETER Experiment Name: At_Far-red-induction_P Parameter: Plant Line Value: Columbia
  misc_feature: MA Experiment 20001451 PARAMETER Experiment Name: At_Far-red-induction_P Parameter: Timepoint (hr) Value: 24
  misc_feature: MA Experiment 20001451 PARAMETER Experiment Name: At_Far-red-induction_P Parameter: Tissue Value: Whole Plant
  misc_feature: MA Experiment ID: 20001503 Result: Up-regulated in Transcription
  misc_feature: MA Experiment 20001503 PARAMETER Experiment Name: At_Far-red-enriched_P Parameter: Age (day) Value: 7
  misc_feature: MA Experiment 20001503 PARAMETER Experiment Name: At_Far-red-enriched_P Parameter: Light Value: Far-red enriched vs. White
  misc_feature: MA Experiment 20001503 PARAMETER Experiment Name: At_Far-red-enriched_P Parameter: Organism Value: A. thaliana
  misc_feature: MA Experiment 20001503 PARAMETER Experiment Name: At_Far-red-enriched_P Parameter: Plant Line Value: Columbia
  misc_feature: MA Experiment 20001503 PARAMETER Experiment Name: At_Far-red-enriched_P Parameter: Timepoint (day) Value: 3
  misc_feature: MA Experiment 20001503 PARAMETER Experiment Name: At_Far-red-enriched_P Parameter: Tissue Value: Whole Plant
  misc_feature: MA Experiment ID: 20001557 Result: Up-regulated in Transcription
  misc_feature: MA Experiment 20001557 PARAMETER Experiment Name: At_Drought_Soil_Dry_P Parameter: Age (day) Value: 27
  misc_feature: MA Experiment 20001557 PARAMETER Experiment Name: At_Drought_Soil_Dry_P Parameter: Organism Value: A. thaliana
  misc_feature: MA Experiment 20001557 PARAMETER Experiment Name: At_Drought_Soil_Dry_P Parameter: Plant Line Value: WS
  misc_feature: MA Experiment 20001557 PARAMETER Experiment Name: At_Drought_Soil_Dry_P Parameter: Post Timepoint (hr) Value: 3
  misc_feature: MA Experiment 20001557 PARAMETER Experiment Name: At_Drought_Soil_Dry_P Parameter: Post-Treatment Value: Re-Water vs. No Drought
  misc_feature: MA Experiment 20001557 PARAMETER Experiment Name: At_Drought_Soil_Dry_P Parameter: Timepoint (day) Value: 13
  misc_feature: MA Experiment 20001557 PARAMETER Experiment Name: At_Drought_Soil_Dry_P Parameter: Treatment Value: Drought vs. No Drought
  misc_feature: MA Experiment ID: 20001559 Result: Up-regulated in Transcription
  misc_feature: MA Experiment 20001559 PARAMETER Experiment Name: At_Drought_Soil_Dry_P Parameter: Age (day) Value: 28
  misc_feature: MA Experiment 20001559 PARAMETER Experiment Name: At_Drought_Soil_Dry_P Parameter: Organism Value: A. thaliana
  misc_feature: MA Experiment 20001559 PARAMETER Experiment Name: At_Drought_Soil_Dry_P Parameter: Plant Line Value: WS
  misc_feature: MA Experiment 20001559 PARAMETER Experiment Name: At_Drought_Soil_Dry_P Parameter: Post Timepoint (hr) Value: 29
  misc_feature: MA Experiment 20001559 PARAMETER Experiment Name: At_Drought_Soil_Dry_P Parameter: Post-Treatment Value: Re-Water vs. No Drought
  misc_feature: MA Experiment 20001559 PARAMETER Experiment Name: At_Drought_Soil_Dry_P Parameter: Timepoint (day) Value: 14
  misc_feature: MA Experiment 20001559 PARAMETER Experiment Name: At_Drought_Soil_Dry_P Parameter: Treatment Value: Drought vs. No Drought
ataatagagatacaaagaaacaagaaaacgaaaggaaaaaatacagaaatgggtggtttgaagtttcatgtacttatgtatccatggttcgcaacaggccatatgaccccgttcctttttcttgccaacaaattggctgagaaaggtcatacggtcacttttttgattcccaagaaagctctgaaacagttggaaaatctcaatctgtttccacacaacattgtctttcgctctgtcaccgtccctcatgtggatggtctccccgttggcacagagacagtctctgagatccccgtgacatcagctgatctcttgatgtctgctatggatctcacacgtgatcaagttgaaggtgtggtccgagccgtggaaccggacctgatcttctttgacttcgctcattggattccagaggtagctagagactttggccttaagactgtaaagtacgtcgtggtatctgcatcgactatagctagtatgcttgttccaggtggtgagttaggtgttcctccgccgggatatccttcatcgaaggtgctgcttcgtaaacaagatgcttacaccatgaagaatctggagtctacaaatacaatcaatgtcggaccaaacttattggaaagagtcactacaagtcttatgaactctgatgtcattgcgataaggacagccagagaaatcgaaggaaacttttgcgactatatcgaaaaacattgcaggaaaaaggttctcttgacaggtccggtgttccctgagccagacaagactagagagctagaggaacgatgggttaagtggctaagtgggtatgaaccagactcagtggtgttttgtgcgttgggctcacaagtcattttagagaaagatcaattccaagaactctgcttaggaatggagctaacaggttcaccgtttcttgtagcggttaagccacctagaggctcatcaacgattcaagaagcacttcctgaaggattcgaggagagggttaaaggaagaggagttgtttggggagaatgggttcaacaaccattgctattgtctcatccatcagtcgggtgctttgtgagccattgtgggtttggatcaatgtgggagtctttgctgagtgattgtcagatagtcttggtaccacagttgggtgatcaggtcctcaacacaagattgctgagtgacgaactcaaggtttcggttgaagtggcaagagaggaaacaggatggttctcgaaagagagcttgttcgatgctatcaatagtgtgatgaaaagggacagtgagatcgggaatctggtgaagaagaatcacaccaagtggagggagacactaactagtcctggacttgtgaccggttatgtcgataatttcatagagtcattgcaggatcttgtctctgggaccaaccatgtttcgaagtagaagggagtgatcaataaggttggtacaaaccaaactatatatcttgaagtgcttctgtttccaagtgtgtttttgtttgtttgtatcatgtttctaagtagcagtaggggatttataaggttttataaaccaaaccttacttgaagtacctctgttttccctagttggctttataataatgtgtttcgtagttgtaagggcaagacaataaaatctctt

SEQ ID NO: 25044 - protein, 471 aa, Arabidopsis thaliana
  peptide (1)..(471): Ceres Seq. ID no. 12371331
  misc_feature (22)..(461): Homolog of NCBI NO: 15227766 NR Description: putative flavonol 3-O-glucosyltransferase
  misc_feature (19)..(467): Homolog of NCBI NO: 15239525 NR Description: flavonol 3-O-glucosyltransferase-like protein
  misc_feature (21)..(461): Homolog of NCBI NO: 15233903 NR Description: putative protein; protein id: At4g09500.1
  misc_feature (19)..(466): Homolog of NCBI NO: 15217773 NR Description: rhamnosyltransferase, putative; protein id:
  misc_feature (19)..(470): Homolog of NCBI NO: 15217796 NR Description: anthocyanidin-3-glucoside rhamnosyltransferase,
  misc_feature (19)..(467): Homolog of NCBI NO: 15239523 NR Description: flavonol 3-O-glucosyltransferase-like protein
  misc_feature (17)..(468): Homolog of NCBI NO: 15234196 NR Description: UDP rhamnose--anthocyanidin-3-glucoside
  misc_feature (26)..(471): Homolog of NCBI NO: 21593514 NR Description: UDP rhamnose-anthocyanidin-3-glucoside
  misc_feature (17)..(458): Homolog of NCBI NO: 15982889 NR Description: AT4g27560/T29A15_50 [Arabidopsis thaliana]
  misc_feature (17)..(471): Homolog of NCBI NO: 15234195 NR Description: UDP rhamnose-anthocyanidin-3-glucoside
IIEIQRNKKTKGKNTEMGGLKFHVLMYPWFATGHMTPFLFLANKLAEKGHTVTFLIPKKALKQLENLNLFPHNIVFRSVTVPHVDGLPVGTETVSEIPVTSADLLMSAMDLTRDQVEGVVRAVEPDLIFFDFAHWIPEVARDFGLKTVKYVVVSASTIASMLVPGGELGVPPPGYPSSKVLLRKQDAYTMKNLESTNTINVGPNLLERVTTSLMNSDVIAIRTAREIEGNFCDYIEKHCRKKVLLTGPVFPEPDKTRELEERWVKWLSGYEPDSVVFCALGSQVILEKDQFQELCLGMELTGSPFLVAVKPPRGSSTIQEALPEGFEERVKGRGVVWGEWVQQPLLLSHPSVGCFVSHCGFGSMWESLLSDCQIVLVPQLGDQVLNTRLLSDELKVSVEVAREETGWFSKESLFDAINSVMKRDSEIGNLVKKNHTKWRETLTSPGLVTGYVDNFIESLQDLVSGTNHVSK

SEQ ID NO: 25045 - protein, 455 aa, Arabidopsis thaliana
  peptide (1)..(455): Ceres Seq. ID no. 12371332
  misc_feature (6)..(445): Homolog of NCBI NO: 15227766 NR Description: putative flavonol 3-O-glucosyltransferase
  misc_feature (3)..(451): Homolog of NCBI NO: 15239525 NR Description: flavonol 3-O-glucosyltransferase-like protein
  misc_feature (5)..(445): Homolog of NCBI NO: 15233903 NR Description: putative protein; protein id: At4g09500.1
  misc_feature (3)..(450): Homolog of NCBI NO: 15217773 NR Description: rhamnosyltransferase, putative; protein id:
  misc_feature (3)..(454): Homolog of NCBI NO: 15217796 NR Description: anthocyanidin-3-glucoside rhamnosyltransferase,
  misc_feature (3)..(451): Homolog of NCBI NO: 15239523 NR Description: flavonol 3-O-glucosyltransferase-like protein
  misc_feature (1)..(452): Homolog of NCBI NO: 15234196 NR Description: UDP rhamnose--anthocyanidin-3-glucoside
  misc_feature (10)..(455): Homolog of NCBI NO: 21593514 NR Description: UDP rhamnose-anthocyanidin-3-glucoside
  misc_feature (1)..(442): Homolog of NCBI NO: 15982889 NR Description: AT4g27560/T29A15_50 [Arabidopsis thaliana]
  misc_feature (1)..(455): Homolog of NCBI NO: 15234195 NR Description: UDP rhamnose-anthocyanidin-3-glucoside
MGGLKFHVLMYPWFATGHMTPFLFLANKLAEKGHTVTFLIPKKALKQLENLNLFPHNIVFRSVTVPHVDGLPVGTETVSEIPVTSADLLMSAMDLTRDQVEGVVRAVEPDLIFFDFAHWIPEVARDFGLKTVKYVVVSASTIASMLVPGGELGVPPPGYPSSKVLLRKQDAYTMKNLESTNTINVGPNLLERVTTSLMNSDVIAIRTAREIEGNFCDYIEKHCRKKVLLTGPVFPEPDKTRELEERWVKWLSGYEPDSVVFCALGSQVILEKDQFQELCLGMELTGSPFLVAVKPPRGSSTIQEALPEGFEERVKGRGVVWGEWVQQPLLLSHPSVGCFVSHCGFGSMWESLLSDCQIVLVPQLGDQVLNTRLLSDELKVSVEVAREETGWFSKESLFDAINSVMKRDSEIGNLVKKNHTKWRETLTSPGLVTGYVDNFIESLQDLVSGTNHVSK

SEQ ID NO: 25046 - protein, 446 aa, Arabidopsis thaliana
  peptide (1)..(446): Ceres Seq. ID no. 12371333
  misc_feature (1)..(442): Homolog of NCBI NO: 15239523 NR Description: flavonol 3-O-glucosyltransferase-like protein
  misc_feature (1)..(443): Homolog of NCBI NO: 15234196 NR Description: UDP rhamnose--anthocyanidin-3-glucoside
  misc_feature (1)..(446): Homolog of NCBI NO: 21593514 NR Description: UDP rhamnose-anthocyanidin-3-glucoside
  misc_feature (1)..(433): Homolog of NCBI NO: 15982889 NR Description: AT4g27560/T29A15_50 [Arabidopsis thaliana]
  misc_feature (1)..(446): Homolog of NCBI NO: 15234195 NR Description: UDP rhamnose-anthocyanidin-3-glucoside
  misc_feature (1)..(436): Homolog of NCBI NO: 15227766 NR Description: putative flavonol 3-O-glucosyltransferase
  misc_feature (1)..(442): Homolog of NCBI NO: 15239525 NR Description: flavonol 3-O-glucosyltransferase-like protein
  misc_feature (1)..(436): Homolog of NCBI NO: 15233903 NR Description: putative protein; protein id: At4g09500.1
  misc_feature (1)..(441): Homolog of NCBI NO: 15217773 NR Description: rhamnosyltransferase, putative; protein id:
  misc_feature (1)..(445): Homolog of NCBI NO: 15217796 NR Description: anthocyanidin-3-glucoside rhamnosyltransferase,
MYPWFATGHMTPFLFLANKLAEKGHTVTFLIPKKALKQLENLNLFPHNIVFRSVTVPHVDGLPVGTETVSEIPVTSADLLMSAMDLTRDQVEGVVRAVEPDLIFFDFAHWIPEVARDFGLKTVKYVVVSASTIASMLVPGGELGVPPPGYPSSKVLLRKQDAYTMKNLESTNTINVGPNLLERVTTSLMNSDVIAIRTAREIEGNFCDYIEKHCRKKVLLTGPVFPEPDKTRELEERWVKWLSGYEPDSVVFCALGSQVILEKDQFQELCLGMELTGSPFLVAVKPPRGSSTIQEALPEGFEERVKGRGVVWGEWVQQPLLLSHPSVGCFVSHCGFGSMWESLLSDCQIVLVPQLGDQVLNTRLLSDELKVSVEVAREETGWFSKESLFDAINSVMKRDSEIGNLVKKNHTKWRETLTSPGLVTGYVDNFIESLQDLVSGTNHVSK

SEQ ID NO: 25047 - DNA, 2279 bp, Arabidopsis thaliana
  misc_feature (1)..(2279): Ceres Seq. ID no. 13492441
  misc_feature: MA Experiment ID: 108461 Result: Up-regulated in Transcription
  misc_feature: MA Experiment 108461 PARAMETER Experiment Name: At_Germinating_Seeds_cDNA_P Parameter: Age (day) Value: 1 vs. 0
  misc_feature: MA Experiment 108461 PARAMETER Experiment Name: At_Germinating_Seeds_cDNA_P Parameter: Tissue Value: Germinating Seeds
  misc_feature: MA Experiment ID: 108577 Result: Down-regulated in Transcription
  misc_feature: MA Experiment 108577 PARAMETER Experiment Name: At_42deg_Heat_cDNA_P Parameter: Temperature (deg C) Value: 42 vs. 22
  misc_feature: MA Experiment 108577 PARAMETER Experiment Name: At_42deg_Heat_cDNA_P Parameter: Timepoint (hr) Value: 6
  misc_feature: MA Experiment 108577 PARAMETER Experiment Name: At_42deg_Heat_cDNA_P Parameter: Tissue Value: Aerial
  misc_feature: MA Experiment ID: 108595 Result: Down-regulated in Transcription
  misc_feature: MA Experiment 108595 PARAMETER Experiment Name: At_Ler-pi_Ovule_cDNA_P Parameter: Plant Line Value: null
  misc_feature: MA Experiment ID: 20000113 Result: Down-regulated in Transcription
  misc_feature: MA Experiment 20000113 PARAMETER Experiment Name: At_42deg_Heat_cDNA_P Parameter: Temperature (deg C) Value: 42 vs. 22
  misc_feature: MA Experiment 20000113 PARAMETER Experiment Name: At_42deg_Heat_cDNA_P Parameter: Timepoint (hr) Value: 8
  misc_feature: MA Experiment 20000113 PARAMETER Experiment Name: At_42deg_Heat_cDNA_P Parameter: Tissue Value: Aerial
  misc_feature: MA Experiment ID: 20000173 Result: Down-regulated in Transcription
  misc_feature: MA Experiment 20000173 PARAMETER Experiment Name: At_42deg_Heat_P Parameter: Age (day) Value: 14
  misc_feature: MA Experiment 20000173 PARAMETER Experiment Name: At_42deg_Heat_P Parameter: Organism Value: A. thaliana
  misc_feature: MA Experiment 20000173 PARAMETER Experiment Name: At_42deg_Heat_P Parameter: Plant Line Value: WS
  misc_feature: MA Experiment 20000173 PARAMETER Experiment Name: At_42deg_Heat_P Parameter: Temperature (deg C) Value: 42 vs. 22
  misc_feature: MA Experiment 20000173 PARAMETER Experiment Name: At_42deg_Heat_P Parameter: Timepoint (hr) Value: 6
  misc_feature: MA Experiment 20000173 PARAMETER Experiment Name: At_42deg_Heat_P Parameter: Tissue Value: Aerial
  misc_feature: MA Experiment ID: 20000227 Result: Up-regulated in Transcription
  misc_feature: MA Experiment 20000227 PARAMETER Experiment Name: At_Root-Tips-vs-Tops_P Parameter: Tissue Value: Root Tips vs. Root Tops
  misc_feature: MA Experiment ID: 20001557 Result: Up-regulated in Transcription
  misc_feature: MA Experiment 20001557 PARAMETER Experiment Name: At_Drought_Soil_Dry_P Parameter: Age (day) Value: 27
  misc_feature: MA Experiment 20001557 PARAMETER Experiment Name: At_Drought_Soil_Dry_P Parameter: Organism Value: A. thaliana
  misc_feature: MA Experiment 20001557 PARAMETER Experiment Name: At_Drought_Soil_Dry_P Parameter: Plant Line Value: WS
  misc_feature: MA Experiment 20001557 PARAMETER Experiment Name: At_Drought_Soil_Dry_P Parameter: Post Timepoint (hr) Value: 3
  misc_feature: MA Experiment 20001557 PARAMETER Experiment Name: At_Drought_Soil_Dry_P Parameter: Post-Treatment Value: Re-Water vs. No Drought
  misc_feature: MA Experiment 20001557 PARAMETER Experiment Name: At_Drought_Soil_Dry_P Parameter: Timepoint (day) Value: 13
  misc_feature: MA Experiment 20001557 PARAMETER Experiment Name: At_Drought_Soil_Dry_P Parameter: Treatment Value: Drought vs. No Drought
atggaaaacatcaaaaaccctaaaaacgcagatgattgttccgatagcatatcaaaaaacagtcatcaaggcgttgatgattccctgaaccagtcaagatcttacgtatgcagtttctgcataaggggcttctcgaatgctcaagcactaggagggcatatgaacatccacagaagagacagggctaaactcagacaaaagcttatggaagataataaggatgatgtcgtcgccgagagtgatgcatccgaagttgtgtctctagaccttaatgaacaacaacaacaacaaggagaagctttgacatgtgatgatcacgatcaatatgttgataacgatataagtcctaaacagaaattagagttttgggttcaagaaagcaagcttgatactaatgatcatggaaaggtcacggaggctagcatagatggttcgagttcgagtcatcatcgtgatattgaagtattggatctcgagcttcgtgacaacgaagaccagcaggtccagcacacgatcctaaatcctgtgagcatcgtctccatcgctggtcttccattattgacgaatctctttgcctttttttcttccttcttaaacaaacccaattcgatttcaacgaacgcctcttctctctcactctctttcgatttgttctttgccggagctcgtagtgtaagcgtgatccgcggcggagagatggctcctaatgatcctaaaaaagccgttggtggcggcggaagtggtttcttcgcctctcttgcttcgtcgatctccaatttgggatctgctatgaccaaatcagttaatggtttggttccctatgagggacttgaagttatcaatcctgaaggaagtacagatgatgctgaggaggaagcaagcagaggaagatggaagcaagaggatcgagatggctattggaagatgatgcagaagtacataggatctgatgttacatcaatggtgacccttcctgtgattatttttgaaccaatgacaatgcttcagaaaatggcggagttgatggaatactcgcatctgctagacatggcagacaaaaccgaggacccttatttgcgcatggtgtatgcatcatcgtgggctatatccgtgtattatgctttccaacgtacctggaaaccattcaatccaatccttggtgagacttatgagatggctaattacaatggtgttaacttcatatctgaacaggtcagccatcacccaccaatgagtgctggtcatgctgaaaatgagcattttacgtatgattgtacttcaaaactgaaaacaaaatttttgggcaattccattgacgtttacccagtaggaaggacacgggtgacacttaaaagagatggagttgttcttgacttggtacctcctctgaccaaagttcacaacctaatctttggacgaacttgggtcgattcgcctggggaaatgatcatgacaaatcagaccaccggtgacaaagtcgtgctttactttcaaccatgtggctggttcggatctggtcgatatgaagtggatggatatgtctataacgcctctgaggagcctaagatactcatgactggcaaatggaacgagtccatgagttatcagccgtgtgatggtgaaggtgaacctctcccaggcaccgaactgaaagaggtatggaaactcgctgatgtgccaaaggatgacaaatatcaatacactcactttgctcacaagattaatagcttcgacactgccccgaaaaagctgttgccctctgattcacggttacgacctgatagatacgcacttgagatgggcgacatgtccaaatcaggctatgagaagagcagcatggaagagagacagagagctgaaaagagaacccgcgaagagaaaggccaagcctttactccaaaatggttcgatgtaacggaagaagtcactgctacaccatggggtgatctggaagtttaccaattcaatggaaagtactcggaacatcgtgcagctgcggataactctgaagataacaccgaccctaagtcgatccaattcaacccatggcaattccaagatctgtctacttaaatgtatcgctccaaaagacagaaaagatcaaatctttttggaaacaaatgtattcttattctctcgtagttacaaaaaactttgttctacatctgctagctttcccattgctttctctagtattagtgtacaacttctactgttttgtcttaaattcattcaaatctttctttgatcttcgtcgtcatagttatcttcttcttctt

SEQ ID NO: 25048 - protein, 690 aa, Arabidopsis thaliana
  peptide (1)..(690): Ceres Seq. ID no. 13492442
  misc_feature (262)..(665): Pfam Name: Oxysterol-binding protein Pfam Description: Oxysterol-binding protein
  misc_feature (307)..(541): Homolog of NCBI NO: 33417067 NR Description: Unknown (protein for IMAGE:4679737) [Xenopus
  misc_feature (545)..(636): Homolog of NCBI NO: 27469640 NR Description: Similar to oxysterol binding protein-like 2
  misc_feature (307)..(541): Homolog of NCBI NO: 27469640 NR Description: Similar to oxysterol binding protein-like 2
  misc_feature (1)..(161): Homolog of NCBI NO: 15232631 NR Description: zinc finger (C2H2 type) protein family
  misc_feature (314)..(532): Homolog of NCBI NO: 38639321 NR Description: putative oxysterol-binding protein [Solanum
  misc_feature (233)..(687): Homolog of NCBI NO: 38639323 NR Description: oxysterol-binding protein [Solanum tuberosum]
  misc_feature (238)..(690): Homolog of NCBI NO: 8885548 NR Description: oxysterol-binding protein [Arabidopsis thaliana]
  misc_feature (238)..(690): Homolog of NCBI NO: 15238398 NR Description: oxysterol-binding protein - like [Arabidopsis
  misc_feature (233)..(689): Homolog of NCBI NO: 15241681 NR Description: expressed protein [Arabidopsis thaliana]
  misc_feature (233)..(690): Homolog of NCBI NO: 15232633 NR Description: oxysterol-binding protein -related [Arabidopsis
MENIKNPKNADDCSDSISKNSHQGVDDSLNQSRSYVCSFCIRGFSNAQALGGHMNIHRRDRAKLRQKLMEDNKDDVVAESDASEVVSLDLNEQQQQQGEALTCDDHDQYVDNDISPKQKLEFWVQESKLDTNDHGKVTEASIDGSSSSHHRDIEVLDLELRDNEDQQVQHTILNPVSIVSIAGLPLLTNLFAFFSSFLNKPNSISTNASSLSLSFDLFFAGARSVSVIRGGEMAPNDPKKAVGGGGSGFFASLASSISNLGSAMTKSVNGLVPYEGLEVINPEGSTDDAEEEASRGRWKQEDRDGYWKMMQKYIGSDVTSMVTLPVIIFEPMTMLQKMAELMEYSHLLDMADKTEDPYLRMVYASSWAISVYYAFQRTWKPFNPILGETYEMANYNGVNFISEQVSHHPPMSAGHAENEHFTYDCTSKLKTKFLGNSIDVYPVGRTRVTLKRDGVVLDLVPPLTKVHNLIFGRTWVDSPGEMIMTNQTTGDKVVLYFQPCGWFGSGRYEVDGYVYNASEEPKILMTGKWNESMSYQPCDGEGEPLPGTELKEVWKLADVPKDDKYQYTHFAHKINSFDTAPKKLLPSDSRLRPDRYALEMGDMSKSGYEKSSMEERQRAEKRTREEKGQAFTPKWFDVTEEVTATPWGDLEVYQFNGKYSEHRAAADNSEDNTDPKSIQFNPWQFQDLST

SEQ ID NO: 25049 - protein, 637 aa, Arabidopsis thaliana
  peptide (1)..(637): Ceres Seq. ID no. 13492443
  misc_feature (209)..(612): Pfam Name: Oxysterol-binding protein Pfam Description: Oxysterol-binding protein
  misc_feature (254)..(488): Homolog of NCBI NO: 33417067 NR Description: Unknown (protein for IMAGE:4679737) [Xenopus
  misc_feature (492)..(583): Homolog of NCBI NO: 27469640 NR Description: Similar to oxysterol binding protein-like 2
  misc_feature (254)..(488): Homolog of NCBI NO: 27469640 NR Description: Similar to oxysterol binding protein-like 2
  misc_feature (1)..(108): Homolog of NCBI NO: 15232631 NR Description: zinc finger (C2H2 type) protein family
  misc_feature (261)..(479): Homolog of NCBI NO: 38639321 NR Description: putative oxysterol-binding protein [Solanum
  misc_feature (180)..(634): Homolog of NCBI NO: 38639323 NR Description: oxysterol-binding protein [Solanum tuberosum]
  misc_feature (185)..(637): Homolog of NCBI NO: 8885548 NR Description: oxysterol-binding protein [Arabidopsis thaliana]
  misc_feature (185)..(637): Homolog of NCBI NO: 15238398 NR Description: oxysterol-binding protein - like [Arabidopsis
  misc_feature (180)..(636): Homolog of NCBI NO: 15241681 NR Description: expressed protein [Arabidopsis thaliana]
  misc_feature (180)..(637): Homolog of NCBI NO: 15232633 NR Description: oxysterol-binding protein -related [Arabidopsis
MNIHRRDRAKLRQKLMEDNKDDVVAESDASEVVSLDLNEQQQQQGEALTCDDHDQYVDNDISPKQKLEFWVQESKLDTNDHGKVTEASIDGSSSSHHRDIEVLDLELRDNEDQQVQHTILNPVSIVSIAGLPLLTNLFAFFSSFLNKPNSISTNASSLSLSFDLFFAGARSVSVIRGGEMAPNDPKKAVGGGGSGFFASLASSISNLGSAMTKSVNGLVPYEGLEVINPEGSTDDAEEEASRGRWKQEDRDGYWKMMQKYIGSDVTSMVTLPVIIFEPMTMLQKMAELMEYSHLLDMADKTEDPYLRMVYASSWAISVYYAFQRTWKPFNPILGETYEMANYNGVNFISEQVSHHPPMSAGHAENEHFTYDCTSKLKTKFLGNSIDVYPVGRTRVTLKRDGVVLDLVPPLTKVHNLIFGRTWVDSPGEMIMTNQTTGDKVVLYFQPCGWFGSGRYEVDGYVYNASEEPKILMTGKWNESMSYQPCDGEGEPLPGTELKEVWKLADVPKDDKYQYTHFAHKINSFDTAPKKLLPSDSRLRPDRYALEMGDMSKSGYEKSSMEERQRAEKRTREEKGQAFTPKWFDVTEEVTATPWGDLEVYQFNGKYSEHRAAADNSEDNTDPKSIQFNPWQFQDLST

SEQ ID NO: 25050 - protein, 622 aa, Arabidopsis thaliana
  peptide (1)..(622): Ceres Seq. ID no. 13492444
  misc_feature (194)..(597): Pfam Name: Oxysterol-binding protein Pfam Description: Oxysterol-binding protein
  misc_feature (239)..(473): Homolog of NCBI NO: 33417067 NR Description: Unknown (protein for IMAGE:4679737) [Xenopus
  misc_feature (477)..(568): Homolog of NCBI NO: 27469640 NR Description: Similar to oxysterol binding protein-like 2
  misc_feature (239)..(473): Homolog of NCBI NO: 27469640 NR Description: Similar to oxysterol binding protein-like 2
  misc_feature (1)..(93): Homolog of NCBI NO: 15232631 NR Description: zinc finger (C2H2 type) protein family
  misc_feature (246)..(464): Homolog of NCBI NO: 38639321 NR Description: putative oxysterol-binding protein [Solanum
  misc_feature (165)..(619): Homolog of NCBI NO: 38639323 NR Description: oxysterol-binding protein [Solanum tuberosum]
  misc_feature (170)..(622): Homolog of NCBI NO: 8885548 NR Description: oxysterol-binding protein [Arabidopsis thaliana]
  misc_feature (170)..(622): Homolog of NCBI NO: 15238398 NR Description: oxysterol-binding protein - like [Arabidopsis
  misc_feature (165)..(621): Homolog of NCBI NO: 15241681 NR Description: expressed protein [Arabidopsis thaliana]
  misc_feature (165)..(622): Homolog of NCBI NO: 15232633 NR Description: oxysterol-binding protein -related [Arabidopsis
MEDNKDDVVAESDASEVVSLDLNEQQQQQGEALTCDDHDQYVDNDISPKQKLEFWVQESKLDTNDHGKVTEASIDGSSSSHHRDIEVLDLELRDNEDQQVQHTILNPVSIVSIAGLPLLTNLFAFFSSFLNKPNSISTNASSLSLSFDLFFAGARSVSVIRGGEMAPNDPKKAVGGGGSGFFASLASSISNLGSAMTKSVNGLVPYEGLEVINPEGSTDDAEEEASRGRWKQEDRDGYWKMMQKYIGSDVTSMVTLPVIIFEPMTMLQKMAELMEYSHLLDMADKTEDPYLRMVYASSWAISVYYAFQRTWKPFNPILGETYEMANYNGVNFISEQVSHHPPMSAGHAENEHFTYDCTSKLKTKFLGNSIDVYPVGRTRVTLKRDGVVLDLVPPLTKVHNLIFGRTWVDSPGEMIMTNQTTGDKVVLYFQPCGWFGSGRYEVDGYVYNASEEPKILMTGKWNESMSYQPCDGEGEPLPGTELKEVWKLADVPKDDKYQYTHFAHKINSFDTAPKKLLPSDSRLRPDRYALEMGDMSKSGYEKSSMEERQRAEKRTREEKGQAFTPKWFDVTEEVTATPWGDLEVYQFNGKYSEHRAAADNSEDNTDPKSIQFNPWQFQDLST

SEQ ID NO: 25051 - DNA, 1140 bp, Arabidopsis thaliana
  misc_feature (1)..(1140): Ceres Seq. ID no. 12335389
  misc_feature: MA Experiment ID: 108434 Result: Up-regulated in Transcription
  misc_feature: MA Experiment 108434 PARAMETER Experiment Name: At_Root_Tips_cDNA_P Parameter: Tissue Value: Root Tips
  misc_feature: MA Experiment ID: 108473 Result: Up-regulated in Transcription
  misc_feature: MA Experiment 108473 PARAMETER Experiment Name: At_Drought_Flowers_cDNA_P Parameter: Timepoint (hr) Value: 7 d
  misc_feature: MA Experiment 108473 PARAMETER Experiment Name: At_Drought_Flowers_cDNA_P Parameter: Tissue Value: Flower
  misc_feature: MA Experiment 108473 PARAMETER Experiment Name: At_Drought_Flowers_cDNA_P Parameter: Treatment Value: Drought vs. No Drought
  misc_feature: MA Experiment ID: 108572 Result: Up-regulated in Transcription
  misc_feature: MA Experiment 108572 PARAMETER Experiment Name: At_Drought_cDNA_P Parameter: Timepoint (hr) Value: 1
  misc_feature: MA Experiment 108572 PARAMETER Experiment Name: At_Drought_cDNA_P Parameter: Tissue Value: Aerial
  misc_feature: MA Experiment 108572 PARAMETER Experiment Name: At_Drought_cDNA_P Parameter: Treatment Value: Drought vs. No Drought
  misc_feature: MA Experiment ID: 108573 Result: Up-regulated in Transcription
  misc_feature: MA Experiment 108573 PARAMETER Experiment Name: At_Drought_cDNA_P Parameter: Timepoint (hr) Value: 6
  misc_feature: MA Experiment 108573 PARAMETER Experiment Name: At_Drought_cDNA_P Parameter: Tissue Value: Aerial
  misc_feature: MA Experiment 108573 PARAMETER Experiment Name: At_Drought_cDNA_P Parameter: Treatment Value: Drought vs. No Drought
  misc_feature: MA Experiment ID: 20000069 Result: Up-regulated in Transcription
  misc_feature: MA Experiment 20000069 PARAMETER Experiment Name: At_100uM_ABA_Mutants_cDNA_P Parameter: Plant Line Value: CS23
  misc_feature: MA Experiment 20000069 PARAMETER Experiment Name: At_100uM_ABA_Mutants_cDNA_P Parameter: Timepoint (hr) Value: 6
  misc_feature: MA Experiment 20000069 PARAMETER Experiment Name: At_100uM_ABA_Mutants_cDNA_P Parameter: Tissue Value: Aerial
  misc_feature: MA Experiment 20000069 PARAMETER Experiment Name: At_100uM_ABA_Mutants_cDNA_P Parameter: Treatment Value: 100uM ABA vs. No Treatment
  misc_feature: MA Experiment ID: 20000088 Result: Up-regulated in Transcription
  misc_feature: MA Experiment 20000088 PARAMETER Experiment Name: At_100uM_ABA_Mutants_cDNA_P Parameter: Plant Line Value: Landsberg
  misc_feature: MA Experiment 20000088 PARAMETER Experiment Name: At_100uM_ABA_Mutants_cDNA_P Parameter: Timepoint (hr) Value: 6
  misc_feature: MA Experiment 20000088 PARAMETER Experiment Name: At_100uM_ABA_Mutants_cDNA_P Parameter: Tissue Value: Aerial
  misc_feature: MA Experiment 20000088 PARAMETER Experiment Name: At_100uM_ABA_Mutants_cDNA_P Parameter: Treatment Value: 100uM ABA vs. No Treatment
  misc_feature: MA Experiment ID: 20000089 Result: Up-regulated in Transcription
  misc_feature: MA Experiment ID: 20000224 Result: Down-regulated in Transcription
  misc_feature: MA Experiment ID: 20000437 Result: Up-regulated in Transcription
  misc_feature: MA Experiment 20000437 PARAMETER Experiment Name: At_Drought_P Parameter: Age (day) Value: 8
  misc_feature: MA Experiment 20000437 PARAMETER Experiment Name: At_Drought_P Parameter: Organism Value: A. thaliana
  misc_feature: MA Experiment 20000437 PARAMETER Experiment Name: At_Drought_P Parameter: Plant Line Value: WS
  misc_feature: MA Experiment 20000437 PARAMETER Experiment Name: At_Drought_P Parameter: Timepoint (hr) Value: 24
  misc_feature: MA Experiment 20000437 PARAMETER Experiment Name: At_Drought_P Parameter: Tissue Value: Whole Plant
  misc_feature: MA Experiment 20000437 PARAMETER Experiment Name: At_Drought_P Parameter: Treatment Value: Drought vs. No Drought
  misc_feature: MA Experiment ID: 20001248 Result: Up-regulated in Transcription
  misc_feature: MA Experiment 20001248 PARAMETER Experiment Name: At_Far-red-induction_P Parameter: Age (day) Value: 7
  misc_feature: MA Experiment 20001248 PARAMETER Experiment Name: At_Far-red-induction_P Parameter: Light Value: Far-red vs. White
  misc_feature: MA Experiment 20001248 PARAMETER Experiment Name: At_Far-red-induction_P Parameter: Organism Value: A. thaliana
  misc_feature: MA Experiment 20001248 PARAMETER Experiment Name: At_Far-red-induction_P Parameter: Plant Line Value: Columbia
  misc_feature: MA Experiment 20001248 PARAMETER Experiment Name: At_Far-red-induction_P Parameter: Timepoint (hr) Value: 4
  misc_feature: MA Experiment 20001248 PARAMETER Experiment Name: At_Far-red-induction_P Parameter: Tissue Value: Whole Plant
  misc_feature: MA Experiment ID: 20001450 Result: Up-regulated in Transcription
  misc_feature: MA Experiment 20001450 PARAMETER Experiment Name: At_Far-red-induction_P Parameter: Age (day) Value: 7
  misc_feature: MA Experiment 20001450 PARAMETER Experiment Name: At_Far-red-induction_P Parameter: Light Value: Far-red vs. White
  misc_feature: MA Experiment 20001450 PARAMETER Experiment Name: At_Far-red-induction_P Parameter: Organism Value: A. thaliana
  misc_feature: MA Experiment 20001450 PARAMETER Experiment Name: At_Far-red-induction_P Parameter: Plant Line Value: Columbia
  misc_feature: MA Experiment 20001450 PARAMETER Experiment Name: At_Far-red-induction_P Parameter: Timepoint (hr) Value: 8
  misc_feature: MA Experiment 20001450 PARAMETER Experiment Name: At_Far-red-induction_P Parameter: Tissue Value: Whole Plant
  misc_feature: MA Experiment ID: 20001451 Result: Up-regulated in Transcription
  misc_feature: MA Experiment 20001451 PARAMETER Experiment Name: At_Far-red-induction_P Parameter: Age (day) Value: 7
  misc_feature: MA Experiment 20001451 PARAMETER Experiment Name: At_Far-red-induction_P Parameter: Light Value: Far-red vs. White
  misc_feature: MA Experiment 20001451 PARAMETER Experiment Name: At_Far-red-induction_P Parameter: Organism Value: A. thaliana
  misc_feature: MA Experiment 20001451 PARAMETER Experiment Name: At_Far-red-induction_P Parameter: Plant Line Value: Columbia
  misc_feature: MA Experiment 20001451 PARAMETER Experiment Name: At_Far-red-induction_P Parameter: Timepoint (hr) Value: 24
  misc_feature: MA Experiment 20001451 PARAMETER Experiment Name: At_Far-red-induction_P Parameter: Tissue Value: Whole Plant
  misc_feature: MA Experiment ID: 20001556 Result: Up-regulated in Transcription
  misc_feature: MA Experiment 20001556 PARAMETER Experiment Name: At_Drought_Soil_Dry_P Parameter: Age (day) Value: 26
  misc_feature: MA Experiment 20001556 PARAMETER Experiment Name: At_Drought_Soil_Dry_P Parameter: Organism Value: A. thaliana
  misc_feature: MA Experiment 20001556 PARAMETER Experiment Name: At_Drought_Soil_Dry_P Parameter: Plant Line Value: WS
  misc_feature: MA Experiment 20001556 PARAMETER Experiment Name: At_Drought_Soil_Dry_P Parameter: Post Timepoint (hr) Value: None
  misc_feature: MA Experiment 20001556 PARAMETER Experiment Name: At_Drought_Soil_Dry_P Parameter: Post-Treatment Value: None
  misc_feature: MA Experiment 20001556 PARAMETER Experiment Name: At_Drought_Soil_Dry_P Parameter: Timepoint (day) Value: 12
  misc_feature: MA Experiment 20001556 PARAMETER Experiment Name: At_Drought_Soil_Dry_P Parameter: Treatment Value: Drought vs. No Drought
ctcattaagatacatctcgagaagcagagcagagagaaagagattccgagagagagagagaaggagggagagaaggagcttagtggtctcattaccattaccagctccatacgaaccgaaacgacgccgttcgctcaacccttttctctgcaatctctcttcctcccacgagtttctcagcttttctcggatcatctaattaagagaggagatcttgtctcacggtgggattgatttttctcttcacgaagatcgtgttccaggcaattaactgcagaaaatggtgatgtgggtctttggctatggctctcttgtgtggaacccaggatttcactacgatgagaaagtgttaggtttcatcaagggatataaacgtgtctttgatcttgcttgcattgatcatagaggtacaccagaacaccctgcaagaacttgcaccctcgagaaagctgaagaagccatatgctggggtactgcattctgtgtccgtggaggaccagaaaaagaacgtctggctatggagtacttggaacgtagagagtgtgaatatgatctcaagacaagtgtagacttttacaaggaagattatcctctaaagccagctgtaactggagtgatagtattcacttctactcctgacaaggtctccaacaagtattatctcggacctgcgccattagaagacatggcaagacaaatcgcgacagccaatggaccatgtggtaacaacagagattatctcttcctgctcgagaaggcaatgcacgacattgggcatgaggaggactatgttatagagctggcaaacgaggtgaggaaggttctggccgagtcctcgacgaagaaggtgacaccggtgaaggaatcaagagcaagccgtgtagctaacaagtcgaagaacaatgtccccacggctcatcagatactacctcatcatccagaagctgttgccactacaatataactcttgtagttttcttcttaattggctttagagatgagtgaaatcaggtctttttttttataataataacaaagtaagtttgttttctgagtagagaagtgtaatctttgtgtgtttcgaactttgttgtcttgtgtgttgtcctaacgagtgcctagttgtgcaccttttgaagc

SEQ ID NO: 25052 - protein, 227 aa, Arabidopsis thaliana
  peptide (1)..(227): Ceres Seq. ID no. 12335390
  misc_feature (3)..(181): Pfam Name: ChaC-like protein Pfam Description: ChaC-like protein
  misc_feature (3)..(185): Homolog of NCBI NO: 12083292 NR Description: unknown protein [Arabidopsis thaliana]
  misc_feature (1)..(185): Homolog of NCBI NO: 18401334 NR Description: expressed protein
  misc_feature (1)..(81): Homolog of NCBI NO: 7486723 NR Description: hypothetical protein F9D12.14 - Arabidopsis
  misc_feature (107)..(215): Homolog of NCBI NO: 7486723 NR Description: hypothetical protein F9D12.14 - Arabidopsis
  misc_feature (1)..(224): Homolog of NCBI NO: 27525010 NR Description: putative cation transporter [Beta procumbens]
  misc_feature (1)..(215): Homolog of NCBI NO: 15239626 NR Description: putative protein; protein id: At5g26220.1
  misc_feature (148)..(227): Homolog of NCBI NO: 7486662 NR Description: hypothetical protein F8F16.110 - Arabidopsis
  misc_feature (1)..(165): Homolog of NCBI NO: 7486662 NR Description: hypothetical protein F8F16.110 - Arabidopsis
  misc_feature (1)..(227): Homolog of NCBI NO: 18417778 NR Description: unknown protein
  misc_feature (1)..(227): Homolog of NCBI NO: 21593515 NR Description: unknown [Arabidopsis thaliana]
MVMWVFGYGSLVWNPGFHYDEKVLGFIKGYKRVFDLACIDHRGTPEHPARTCTLEKAEEAICWGTAFCVRGGPEKERLAMEYLERRECEYDLKTSVDFYKEDYPLKPAVTGVIVFTSTPDKVSNKYYLGPAPLEDMARQIATANGPCGNNRDYLFLLEKAMHDIGHEEDYVIELANEVRKVLAESSTKKVTPVKESRASRVANKSKNNVPTAHQILPHHPEAVATTI

SEQ ID NO: 25053 - protein, 225 aa, Arabidopsis thaliana
  peptide (1)..(225): Ceres Seq. ID no. 12335391
  misc_feature (1)..(179): Pfam Name: ChaC-like protein Pfam Description: ChaC-like protein
  misc_feature (1)..(183): Homolog of NCBI NO: 12083292 NR Description: unknown protein [Arabidopsis thaliana]
  misc_feature (1)..(183): Homolog of NCBI NO: 18401334 NR Description: expressed protein
  misc_feature (1)..(79): Homolog of NCBI NO: 7486723 NR Description: hypothetical protein F9D12.14 - Arabidopsis
  misc_feature (105)..(213): Homolog of NCBI NO: 7486723 NR Description: hypothetical protein F9D12.14 - Arabidopsis
  misc_feature (1)..(222): Homolog of NCBI NO: 27525010 NR Description: putative cation transporter [Beta procumbens]
  misc_feature (1)..(213): Homolog of NCBI NO: 15239626 NR Description: putative protein; protein id: At5g26220.1
  misc_feature (146)..(225): Homolog of NCBI NO: 7486662 NR Description: hypothetical protein F8F16.110 - Arabidopsis
  misc_feature (1)..(163): Homolog of NCBI NO: 7486662 NR Description: hypothetical protein F8F16.110 - Arabidopsis
  misc_feature (1)..(225): Homolog of NCBI NO: 18417778 NR Description: unknown protein
  misc_feature (1)..(225): Homolog of NCBI NO: 21593515 NR Description: unknown [Arabidopsis thaliana]
MWVFGYGSLVWNPGFHYDEKVLGFIKGYKRVFDLACIDHRGTPEHPARTCTLEKAEEAICWGTAFCVRGGPEKERLAMEYLERRECEYDLKTSVDFYKEDYPLKPAVTGVIVFTSTPDKVSNKYYLGPAPLEDMARQIATANGPCGNNRDYLFLLEKAMHDIGHEEDYVIELANEVRKVLAESSTKKVTPVKESRASRVANKSKNNVPTAHQILPHHPEAVATTI

SEQ ID NO: 25054 - protein, 148 aa, Arabidopsis thaliana
  peptide (1)..(148): Ceres Seq. ID no. 12335392
  misc_feature (1)..(102): Pfam Name: ChaC-like protein Pfam Description: ChaC-like protein
  misc_feature (1)..(101): Homolog of NCBI NO: 38344831 NR Description: OSJNBa0064H22.12 [Oryza sativa (japonica
  misc_feature (1)..(106): Homolog of NCBI NO: 12083292 NR Description: unknown protein [Arabidopsis thaliana]
  misc_feature (1)..(106): Homolog of NCBI NO: 18401334 NR Description: expressed protein
  misc_feature (28)..(136): Homolog of NCBI NO: 7486723 NR Description: hypothetical protein F9D12.14 - Arabidopsis
  misc_feature (1)..(145): Homolog of NCBI NO: 27525010 NR Description: putative cation transporter [Beta procumbens]
  misc_feature (1)..(136): Homolog of NCBI NO: 15239626 NR Description: putative protein; protein id: At5g26220.1
  misc_feature (69)..(148): Homolog of NCBI NO: 7486662 NR Description: hypothetical protein F8F16.110 - Arabidopsis
  misc_feature (1)..(86): Homolog of NCBI NO: 7486662 NR Description: hypothetical protein F8F16.110 - Arabidopsis
  misc_feature (1)..(148): Homolog of NCBI NO: 18417778 NR Description: unknown protein
  misc_feature (1)..(148): Homolog of NCBI NO: 21593515 NR Description: unknown [Arabidopsis thaliana]
MEYLERRECEYDLKTSVDFYKEDYPLKPAVTGVIVFTSTPDKVSNKYYLGPAPLEDMARQIATANGPCGNNRDYLFLLEKAMHDIGHEEDYVIELANEVRKVLAESSTKKVTPVKESRASRVANKSKNNVPTAHQILPHHPEAVATTI

SEQ ID NO: 25055 - DNA, 1203 bp, Arabidopsis thaliana
  misc_feature (1)..(1203): Ceres Seq. ID no. 5002163
  misc_feature: MA Experiment ID: 108569 Result: Down-regulated in Transcription
  misc_feature: MA Experiment 108569 PARAMETER Experiment Name: At_0.001%_MeJA__cDNA_P Parameter: Timepoint (hr) Value: 6
  misc_feature: MA Experiment 108569 PARAMETER Experiment Name: At_0.001%_MeJA__cDNA_P Parameter: Tissue Value: Aerial
  misc_feature: MA Experiment 108569 PARAMETER Experiment Name: At_0.001%_MeJA__cDNA_P Parameter: Treatment Value: 0.001% MeJA vs. No Treatment
  misc_feature: MA Experiment ID: 20000184 Result: Down-regulated in Transcription
  misc_feature: MA Experiment 20000184 PARAMETER Experiment Name: At_Shoots__P Parameter: Age (day) Value: 7
  misc_feature: MA Experiment 20000184 PARAMETER Experiment Name: At_Shoots__P Parameter: Tissue Value: Shoots vs. Whole Plant
  misc_feature: MA Experiment ID: 20000437 Result: Up-regulated in Transcription
  misc_feature: MA Experiment 20000437 PARAMETER Experiment Name: At_Drought_P Parameter: Age (day) Value: 8
  misc_feature: MA Experiment 20000437 PARAMETER Experiment Name: At_Drought_P Parameter: Organism Value: A. thaliana
  misc_feature: MA Experiment 20000437 PARAMETER Experiment Name: At_Drought_P Parameter: Plant Line Value: WS
  misc_feature: MA Experiment 20000437 PARAMETER Experiment Name: At_Drought_P Parameter: Timepoint (hr) Value: 24
  misc_feature: MA Experiment 20000437 PARAMETER Experiment Name: At_Drought_P Parameter: Tissue Value: Whole Plant
  misc_feature: MA Experiment 20000437 PARAMETER Experiment Name: At_Drought_P Parameter: Treatment Value: Drought vs. No Drought
  misc_feature: MA Experiment ID: 20000438 Result: Down-regulated in Transcription
  misc_feature: MA Experiment 20000438 PARAMETER Experiment Name: At_Shoots__P Parameter: Age (day) Value: 14
  misc_feature: MA Experiment 20000438 PARAMETER Experiment Name: At_Shoots__P Parameter: Tissue Value: Shoots vs. Whole Plant
agaaaggcaaatttctcaaaggaagcgaagccctagcgtcctctctctgtcttctcgtttctgcgccgattcgtagtctgttgtgcgcttgcctctcctcttttggattagcatacctctcactcgcatcagattttcagttgctttttctatccaaatggactgcaagaagttcatccagatggtcgaggagaagaaacgaagagttcttgagaagcaagaagctcctttgaaatgggagcagaagctagaggcggctgcgaatgccaaagcagacacagaaactaaagtgaagagatcaaagggccctaagagaaaacaaagggctgcgtctgaatctagctcagaaagtgatagtagctctgaggtgagaagaaagtctagaagatctcacaataagcaccgaagacatgcacactctgattcagatgacagtgataggaggaaagagaagaaatccaggaggcagaaaagaaggtccttgagtccaagcgatgatagcactggtgattatgaaagtgggtcagaggatgagctgaggatgaagataaagcaccatcggaggcacaagtggcatagctcaagaaagacttgcgatgatgacagtaccgaagatgtgagaagaaaacatttaaagcatcacaggcgcagtgaggtggtcacttcaagtgatagtgaggaagagagtggaagaagaaggcgaggcaaatatcacaggcacaacagaggttcagcctcctcgagtggctcggaagaagatagtgggaaaagtatgaagagaaggcaacataaaaggcatcgtttggctgagtcttcaagtgaggaagatggggcaatgagaaggactaggcatcataaacatggcagagattcagcatctgagtctgatggaagaaggtaatcagatgagaaaagagagcactacttcgacaaatgaaaatggaaaatgtctttgtttaattcacatcataagaactgaatcttgtggtaaaccatcagcacatgattactacccagatgttgggacccaaatacgatgaatattgtgttgaattactatggtggcactctgttcttagattttcatttttacatttgtagcaagaatggtacacaaccaattgaactctgaaatgcatgtgcagatgatggtttttattttgattatacctcgtagttaagaggagtgtgttacaaaataag

SEQ ID NO: 25056 - protein, 247 aa, Arabidopsis thaliana
  peptide (1)..(247): Ceres Seq. ID no. 5002164
  misc_feature (8)..(247): Pfam Name: Granin (chromogranin or secretogranin) Pfam Description: Granin (chromogranin or secretogranin)
  misc_feature (18)..(247): Homolog of NCBI NO: 39589507 NR Description: Hypothetical protein CBG22293 [Caenorhabditis
  misc_feature (11)..(247): Homolog of NCBI NO: 24580684 NR Description: CG2839-PA [Drosophila melanogaster]
  misc_feature (12)..(247): Homolog of NCBI NO: 17509687 NR Description: Human XNP gene related XNP-1 (156.2 kD) (xnp-1)
  misc_feature (12)..(247): Homolog of NCBI NO: 17367114 NR Description: Transcriptional regulator ATRX homolog (X-linked
  misc_feature (7)..(215): Homolog of NCBI NO: 21618036 NR Description: unknown [Arabidopsis thaliana]
  misc_feature (7)..(215): Homolog of NCBI NO: 27651999 NR Description: CAX-interacting protein 4 [Arabidopsis thaliana]
  misc_feature (7)..(215): Homolog of NCBI NO: 18401896 NR Description: expressed protein
  misc_feature (19)..(247): Homolog of NCBI NO: 34895374 NR Description: P0698A04.25 [Oryza sativa (japonica
  misc_feature (1)..(247): Homolog of NCBI NO: 34895374 NR Description: P0698A04.25 [Oryza sativa (japonica
  misc_feature (1)..(247): Homolog of NCBI NO: 18379151 NR Description: expressed protein
MDCKKFIQMVEEKKRRVLEKQEAPLKWEQKLEAAANAKADTETKVKRSKGPKRKQRAASESSSESDSSSEVRRKSRRSHNKHRRHAHSDSDDSDRRKEKKSRRQKRRSLSPSDDSTGDYESGSEDELRMKIKHHRRHKWHSSRKTCDDDSTEDVRRKHLKHHRRSEVVTSSDSEEESGRRRRGKYHRHNRGSASSSGSEEDSGKSMKRRQHKRHRLAESSSEEDGAMRRTRHHKHGRDSASESDGRR

SEQ ID NO: 25057 - protein, 239 aa, Arabidopsis thaliana
  peptide (1)..(239): Ceres Seq. ID no. 5002165
  misc_feature (1)..(239): Pfam Name: Granin (chromogranin or secretogranin) Pfam Description: Granin (chromogranin or secretogranin)
  misc_feature (4)..(239): Homolog of NCBI NO: 17367114 NR Description: Transcriptional regulator ATRX homolog (X-linked
  misc_feature (1)..(207): Homolog of NCBI NO: 21618036 NR Description: unknown [Arabidopsis thaliana]
  misc_feature (1)..(207): Homolog of NCBI NO: 27651999 NR Description: CAX-interacting protein 4 [Arabidopsis thaliana]
  misc_feature (1)..(207): Homolog of NCBI NO: 18401896 NR Description: expressed protein
  misc_feature (3)..(239): Homolog of NCBI NO: 24580684 NR Description: CG2839-PA [Drosophila melanogaster]
  misc_feature (4)..(239): Homolog of NCBI NO: 17509687 NR Description: Human XNP gene related XNP-1 (156.2 kD) (xnp-1)
  misc_feature (10)..(239): Homolog of NCBI NO: 39589507 NR Description: Hypothetical protein CBG22293 [Caenorhabditis
  misc_feature (11)..(239): Homolog of NCBI NO: 34895374 NR Description: P0698A04.25 [Oryza sativa (japonica
  misc_feature (1)..(239): Homolog of NCBI NO: 34895374 NR Description: P0698A04.25 [Oryza sativa (japonica
  misc_feature (1)..(239): Homolog of NCBI NO: 18379151 NR Description: expressed protein
MVEEKKRRVLEKQEAPLKWEQKLEAAANAKADTETKVKRSKGPKRKQRAASESSSESDSSSEVRRKSRRSHNKHRRHAHSDSDDSDRRKEKKSRRQKRRSLSPSDDSTGDYESGSEDELRMKIKHHRRHKWHSSRKTCDDDSTEDVRRKHLKHHRRSEVVTSSDSEEESGRRRRGKYHRHNRGSASSSGSEEDSGKSMKRRQHKRHRLAESSSEEDGAMRRTRHHKHGRDSASESDGRR

SEQ ID NO: 25058 - DNA, 1156 bp, Arabidopsis thaliana; identical to SEQ ID NO: 24607
  misc_feature (1)..(1156): Ceres Seq. ID no. 12337904
  misc_feature: MA Experiment ID: 20000180 Result: Up-regulated in Transcription
  misc_feature: MA Experiment 20000180 PARAMETER Experiment Name: At_Germinating_Seeds_P Parameter: Age (hr) Value: 24 vs. 0
  misc_feature: MA Experiment 20000180 PARAMETER Experiment Name: At_Germinating_Seeds_P Parameter: Tissue Value: Germinating Seeds
  misc_feature: MA Experiment ID: 20000185 Result: Down-regulated in Transcription
  misc_feature: MA Experiment 20000185 PARAMETER Experiment Name: At_Roots__P Parameter: Age (day) Value: 7 vs. 21
  misc_feature: MA Experiment 20000185 PARAMETER Experiment Name: At_Roots__P Parameter: Organism Value: A. thaliana
  misc_feature: MA Experiment 20000185 PARAMETER Experiment Name: At_Roots__P Parameter: Tissue Value: Roots vs. Whole Plant
  misc_feature: MA Experiment ID: 20000234 Result: Up-regulated in Transcription
  misc_feature: MA Experiment 20000234 PARAMETER Experiment Name: At_Siliques_P Parameter: Age (day) Value: 21
  misc_feature: MA Experiment 20000234 PARAMETER Experiment Name: At_Siliques_P Parameter: Organism Value: A. thaliana
  misc_feature: MA Experiment 20000234 PARAMETER Experiment Name: At_Siliques_P Parameter: Plant Line Value: WS
  misc_feature: MA Experiment 20000234 PARAMETER Experiment Name: At_Siliques_P Parameter: Tissue Value: Less Than 5mm Siliques vs. Whole Plant
  misc_feature: MA Experiment ID: 20000265 Result: Up-regulated in Transcription
  misc_feature: MA Experiment 20000265 PARAMETER Experiment Name: At_Open_Flower_P Parameter: Age (day) Value: 21
  misc_feature: MA Experiment 20000265 PARAMETER Experiment Name: At_Open_Flower_P Parameter: Plant Line Value: WS
  misc_feature: MA Experiment 20000265 PARAMETER Experiment Name: At_Open_Flower_P Parameter: Tissue Value: Closed Flower vs. Whole Plant
  misc_feature: MA Experiment ID: 20000286 Result: Up-regulated in Transcription
  misc_feature: MA Experiment 20000286 PARAMETER Experiment Name: At_Open_Flower_P Parameter: Age (day) Value: 21
  misc_feature: MA Experiment 20000286 PARAMETER Experiment Name: At_Open_Flower_P Parameter: Plant Line Value: WS
  misc_feature: MA Experiment 20000286 PARAMETER Experiment Name: At_Open_Flower_P Parameter: Tissue Value: Half Open vs. Whole Plant
  misc_feature: MA Experiment ID: 20000437 Result: Down-regulated in Transcription
  misc_feature: MA Experiment 20000437 PARAMETER Experiment Name: At_Drought_P Parameter: Age (day) Value: 8
  misc_feature: MA Experiment 20000437 PARAMETER Experiment Name: At_Drought_P Parameter: Organism Value: A. thaliana
  misc_feature: MA Experiment 20000437 PARAMETER Experiment Name: At_Drought_P Parameter: Plant Line Value: WS
  misc_feature: MA Experiment 20000437 PARAMETER Experiment Name: At_Drought_P Parameter: Timepoint (hr) Value: 24
  misc_feature: MA Experiment 20000437 PARAMETER Experiment Name: At_Drought_P Parameter: Tissue Value: Whole Plant
  misc_feature: MA Experiment 20000437 PARAMETER Experiment Name: At_Drought_P Parameter: Treatment Value: Drought vs. No Drought
  misc_feature: MA Experiment ID: 20000439 Result: Down-regulated in Transcription
  misc_feature: MA Experiment 20000439 PARAMETER Experiment Name: At_Roots__P Parameter: Age (day) Value: 14 vs. 21
  misc_feature: MA Experiment 20000439 PARAMETER Experiment Name: At_Roots__P Parameter: Organism Value: A. thaliana
  misc_feature: MA Experiment 20000439 PARAMETER Experiment Name: At_Roots__P Parameter: Tissue Value: Roots vs. Whole Plant
  misc_feature: MA Experiment ID: 20000495 Result: Up-regulated in Transcription
  misc_feature: MA Experiment 20000495 PARAMETER Experiment Name: At_Guard_Cells_P Parameter: Harvest Date Value: 8/2/2002
  misc_feature: MA Experiment 20000495 PARAMETER Experiment Name: At_Guard_Cells_P Parameter: Organism Value: A. thaliana
  misc_feature: MA Experiment 20000495 PARAMETER Experiment Name: At_Guard_Cells_P Parameter: Tissue Value: Guard Cells vs. Leaves
  misc_feature: MA Experiment ID: 20001248 Result: Down-regulated in Transcription
  misc_feature: MA Experiment 20001248 PARAMETER Experiment Name: At_Far-red-induction_P Parameter: Age (day) Value: 7
  misc_feature: MA Experiment 20001248 PARAMETER Experiment Name: At_Far-red-induction_P Parameter: Light Value: Far-red vs. White
  misc_feature: MA Experiment 20001248 PARAMETER Experiment Name: At_Far-red-induction_P Parameter: Organism Value: A. thaliana
  misc_feature: MA Experiment 20001248 PARAMETER Experiment Name: At_Far-red-induction_P Parameter: Plant Line Value: Columbia
  misc_feature: MA Experiment 20001248 PARAMETER Experiment Name: At_Far-red-induction_P Parameter: Timepoint (hr) Value: 4
  misc_feature: MA Experiment 20001248 PARAMETER Experiment Name: At_Far-red-induction_P Parameter: Tissue Value: Whole Plant
  misc_feature: MA Experiment ID: 20001555 Result: Down-regulated in Transcription
  misc_feature: MA Experiment 20001555 PARAMETER Experiment Name: At_Drought_Soil_Dry_P Parameter: Age (day) Value: 24
  misc_feature: MA Experiment 20001555 PARAMETER Experiment Name: At_Drought_Soil_Dry_P Parameter: Organism Value: A. thaliana
  misc_feature: MA Experiment 20001555 PARAMETER Experiment Name: At_Drought_Soil_Dry_P Parameter: Plant Line Value: WS
  misc_feature: MA Experiment 20001555 PARAMETER Experiment Name: At_Drought_Soil_Dry_P Parameter: Post Timepoint (hr) Value: None
  misc_feature: MA Experiment 20001555 PARAMETER Experiment Name: At_Drought_Soil_Dry_P Parameter: Post-Treatment Value: None
  misc_feature: MA Experiment 20001555 PARAMETER Experiment Name: At_Drought_Soil_Dry_P Parameter: Timepoint (day) Value: 10
  misc_feature: MA Experiment 20001555 PARAMETER Experiment Name: At_Drought_Soil_Dry_P Parameter: Treatment Value: Drought vs. No Drought

SEQ ID NO: 25059 - protein, 91 aa, Arabidopsis thaliana; identical to SEQ ID NO: 24608
  peptide (1)..(91): Ceres Seq. ID no. 12337905
  misc_feature (1)..(79): Pfam Name: alpha/beta hydrolase fold Pfam Description: alpha/beta hydrolase fold
  misc_feature (1)..(79): Pfam Name: alpha/beta hydrolase fold Pfam Description: alpha/beta hydrolase fold
  misc_feature (1)..(91): Homolog of NCBI NO: 15230018 NR Description: putative epoxide hydrolase
  misc_feature (1)..(91): Homolog of NCBI NO: 15230018 NR Description: putative epoxide hydrolase

SEQ ID NO: 25060 - protein, 69 aa, Arabidopsis thaliana; identical to SEQ ID NO: 24609
  peptide (1)..(69): Ceres Seq. ID no. 12337906
  misc_feature (1)..(57): Pfam Name: alpha/beta hydrolase fold Pfam Description: alpha/beta hydrolase fold
  misc_feature (1)..(57): Pfam Name: alpha/beta hydrolase fold Pfam Description: alpha/beta hydrolase fold
  misc_feature (1)..(69): Homolog of NCBI NO: 15230018 NR Description: putative epoxide hydrolase
  misc_feature (1)..(69): Homolog of NCBI NO: 15230018 NR Description: putative epoxide hydrolase

SEQ ID NO: 25061 - protein, 63 aa, Arabidopsis thaliana; identical to SEQ ID NO: 24610
  peptide (1)..(63): Ceres Seq. ID no. 12337907
  misc_feature (1)..(51): Pfam Name: alpha/beta hydrolase fold Pfam Description: alpha/beta hydrolase fold
  misc_feature (1)..(51): Pfam Name: alpha/beta hydrolase fold Pfam Description: alpha/beta hydrolase fold
  misc_feature (1)..(63): Homolog of NCBI NO: 15230018 NR Description: putative epoxide hydrolase
  misc_feature (1)..(63): Homolog of NCBI NO: 15230018 NR Description: putative epoxide hydrolase

SEQ ID NO: 25062 - DNA, 1624 bp, Arabidopsis thaliana
  misc_feature (1)..(1624): Ceres Seq. ID no. 13487679
  misc_feature: MA Experiment ID: 108461 Result: Down-regulated in Transcription
  misc_feature: MA Experiment 108461 PARAMETER Experiment Name: At_Germinating_Seeds_cDNA_P Parameter: Age (day) Value: 1 vs. 0
  misc_feature: MA Experiment 108461 PARAMETER Experiment Name: At_Germinating_Seeds_cDNA_P Parameter: Tissue Value: Germinating Seeds
  misc_feature: MA Experiment ID: 108573 Result: Up-regulated in Transcription
  misc_feature: MA Experiment 108573 PARAMETER Experiment Name: At_Drought_cDNA_P Parameter: Timepoint (hr) Value: 6
  misc_feature: MA Experiment 108573 PARAMETER Experiment Name: At_Drought_cDNA_P Parameter: Tissue Value: Aerial
  misc_feature: MA Experiment 108573 PARAMETER Experiment Name: At_Drought_cDNA_P Parameter: Treatment Value: Drought vs. No Drought
  misc_feature: MA Experiment ID: 108594 Result: Up-regulated in Transcription
  misc_feature: MA Experiment 108594 PARAMETER Experiment Name: At_Ler-rhl_Root_cDNA_P Parameter: Plant Line Value: null
  misc_feature: MA Experiment ID: 20000111 Result: Down-regulated in Transcription
  misc_feature: MA Experiment 20000111 PARAMETER Experiment Name: At_42deg_Heat_cDNA_P Parameter: Temperature (deg C) Value: 42 vs. 22
  misc_feature: MA Experiment 20000111 PARAMETER Experiment Name: At_42deg_Heat_cDNA_P Parameter: Timepoint (hr) Value: 6
  misc_feature: MA Experiment 20000111 PARAMETER Experiment Name: At_42deg_Heat_cDNA_P Parameter: Tissue Value: Aerial
  misc_feature: MA Experiment ID: 20000113 Result: Down-regulated in Transcription
  misc_feature: MA Experiment 20000113 PARAMETER Experiment Name: At_42deg_Heat_cDNA_P Parameter: Temperature (deg C) Value: 42 vs. 22
  misc_feature: MA Experiment 20000113 PARAMETER Experiment Name: At_42deg_Heat_cDNA_P Parameter: Timepoint (hr) Value: 8
  misc_feature: MA Experiment 20000113 PARAMETER Experiment Name: At_42deg_Heat_cDNA_P Parameter: Tissue Value: Aerial
  misc_feature: MA Experiment ID: 20000173 Result: Down-regulated in Transcription
  misc_feature: MA Experiment 20000173 PARAMETER Experiment Name: At_42deg_Heat_P Parameter: Age (day) Value: 14
  misc_feature: MA Experiment 20000173 PARAMETER Experiment Name: At_42deg_Heat_P Parameter: Organism Value: A. thaliana
  misc_feature: MA Experiment 20000173 PARAMETER Experiment Name: At_42deg_Heat_P Parameter: Plant Line Value: WS
  misc_feature: MA Experiment 20000173 PARAMETER Experiment Name: At_42deg_Heat_P Parameter: Temperature (deg C) Value: 42 vs. 22
  misc_feature: MA Experiment 20000173 PARAMETER Experiment Name: At_42deg_Heat_P Parameter: Timepoint (hr) Value: 6
  misc_feature: MA Experiment 20000173 PARAMETER Experiment Name: At_42deg_Heat_P Parameter: Tissue Value: Aerial
  misc_feature: MA Experiment ID: 20000179 Result: Down-regulated in Transcription
  misc_feature: MA Experiment 20000179 PARAMETER Experiment Name: At_Germinating_Seeds_P Parameter: Age (hr) Value: 6 vs. 0
  misc_feature: MA Experiment 20000179 PARAMETER Experiment Name: At_Germinating_Seeds_P Parameter: Tissue Value: Germinating Seeds
  misc_feature: MA Experiment ID: 20000184 Result: Down-regulated in Transcription
  misc_feature: MA Experiment 20000184 PARAMETER Experiment Name: At_Shoots__P Parameter: Age (day) Value: 7
  misc_feature: MA Experiment 20000184 PARAMETER Experiment Name: At_Shoots__P Parameter: Tissue Value: Shoots vs. Whole Plant
  misc_feature: MA Experiment ID: 20000438 Result: Down-regulated in Transcription
  misc_feature: MA Experiment 20000438 PARAMETER Experiment Name: At_Shoots__P Parameter: Age (day) Value: 14
  misc_feature: MA Experiment 20000438 PARAMETER Experiment Name: At_Shoots__P Parameter: Tissue Value: Shoots vs. Whole Plant
  misc_feature: MA Experiment ID: 20000794 Result: Up-regulated in Transcription
  misc_feature: MA Experiment 20000794 PARAMETER Experiment Name: At_Petals_P Parameter: Age (day) Value: 23-25 days
  misc_feature: MA Experiment 20000794 PARAMETER Experiment Name: At_Petals_P Parameter: Plant Line Value: WS
  misc_feature: MA Experiment 20000794 PARAMETER Experiment Name: At_Petals_P Parameter: Tissue Value: Petals vs. Whole plant
  misc_feature: MA Experiment ID: 20001247 Result: Up-regulated in Transcription
  misc_feature: MA Experiment 20001247 PARAMETER Experiment Name: At_Far-red-induction_P Parameter: Age (day) Value: 7
  misc_feature: MA Experiment 20001247 PARAMETER Experiment Name: At_Far-red-induction_P Parameter: Light Value: Far-red vs. White
  misc_feature: MA Experiment 20001247 PARAMETER Experiment Name: At_Far-red-induction_P Parameter: Organism Value: A. thaliana
  misc_feature: MA Experiment 20001247 PARAMETER Experiment Name: At_Far-red-induction_P Parameter: Plant Line Value: Columbia
  misc_feature: MA Experiment 20001247 PARAMETER Experiment Name: At_Far-red-induction_P Parameter: Timepoint (hr) Value: 1
  misc_feature: MA Experiment 20001247 PARAMETER Experiment Name: At_Far-red-induction_P Parameter: Tissue Value: Whole Plant
  misc_feature: MA Experiment ID: 20001248 Result: Up-regulated in Transcription
  misc_feature: MA Experiment 20001248 PARAMETER Experiment Name: At_Far-red-induction_P Parameter: Age (day) Value: 7
  misc_feature: MA Experiment 20001248 PARAMETER Experiment Name: At_Far-red-induction_P Parameter: Light Value: Far-red vs. White
  misc_feature: MA Experiment 20001248 PARAMETER Experiment Name: At_Far-red-induction_P Parameter: Organism Value: A. thaliana
  misc_feature: MA Experiment 20001248 PARAMETER Experiment Name: At_Far-red-induction_P Parameter: Plant Line Value: Columbia
  misc_feature: MA Experiment 20001248 PARAMETER Experiment Name: At_Far-red-induction_P Parameter: Timepoint (hr) Value: 4
  misc_feature: MA Experiment 20001248 PARAMETER Experiment Name: At_Far-red-induction_P Parameter: Tissue Value: Whole Plant
attcgtgtcggaactttagatccgatatttatagaaagcaaccaaactccggctccggttactcgggagttcaagttttggattttgatgggtcatgctcgaactcgtaccggtatcatctccgtcgcttttaaattcttcaggtctctgttccctcgccatcaccgtactaacagcatgaagataaaaacaggaacgtttttgggggtttcgatatcattgattcttataaacttagctgcgatcatggaacgtgcagacgagaatctattgccttcggtttataaagaagtgagtgaagcatttaacgcaggaccatcagatttaggctacttaacattcgttagaaactttgttcaaggacttgcatcaccattagcaggagttcttgtcattacctatgatcgtcccattgttcttgcaataggtactttctgttgggctttatcaactgctgcagttggagccagcagctacttcattcaggttgctttatggagagcagtgaatggttttggattggcaattgttatacccgcgcttcaatcgtttattgcagatagttataaggatggtgcgagaggagctggtttcggaatgttgaacctcattggtacaatcggtggtataggaggaggtgttgtagcaactgttatggctggttcagagttttggggcataccgggatggcgttgtgcttttataatgatggcagcgctcagcgcagtgatcggattacttgtctttctcttcgttgttgacccgagaaagaacattgaacgagaggaactaatggctcataagatgaattcgaactcggtttggaatgattcattagcagctgcaaaatctgtcgtcaaagtaagtacctttcagataatcgtcgcgcaaggaatcattggttcgtttccgtggaccgcgatggttttctttacaatgtggtttgagcttattggcttcgatcataaccagactgcagctttgcttggggtatttgctacaggaggagcgataggaacattaatgggagggataatagcggataaaatgtcgcggatatatccgaattcgggtagagtgatgtgtgcgcagttcagtgcattcatgggaatcccattctctattattcttctgaaagtaatcccacaaagcacaagcagctactcaatcttctcgataactctcttcctgatgggtcttaccataacttggtgcggatcagcggtcaatgcaccaatgtttgcagaagtcgttcctccaaggcaccgtacaatgatctacgcgtttgaccgtgctttcgaagggtcattctcatcttttgctgcgcctttggttggaattttgtcagagaaactgtttgggtatgactcaagaggtattgatcctttgaaaggttcctctgttcgtgaggctgatgccctttcaaaggggcttctgtcaatgatggctgttccgtttgggctctgttgtctctgttacactccgttgcattttgttttccagaaagatcgagaaaacgcgaaaatcgcgagctctaaagaaactgaaatgatctgagagacttgctcatgtagtcatgttgtgattctttttataccacaaacgattttaaaaccactatgtg

SEQ ID NO: 25063 - protein, 518 aa, Arabidopsis thaliana
  peptide (1)..(518): Ceres Seq. ID no. 13487680
  misc_feature (277)..(503): Homolog of NCBI NO: 7494336 NR Description: membrane transporter PFB0275w - malaria parasite
  misc_feature (54)..(278): Homolog of NCBI NO: 23593282 NR Description: hypothetical protein, conserved [Plasmodium
  misc_feature (277)..(503): Homolog of NCBI NO: 23593282 NR Description: hypothetical protein, conserved [Plasmodium
  misc_feature (71)..(201): Homolog of NCBI NO: 11358310 NR Description: hypothetical protein T31P16.180 - Arabidopsis
  misc_feature (158)..(517): Homolog of NCBI NO: 11358310 NR Description: hypothetical protein T31P16.180 - Arabidopsis
  misc_feature (71)..(517): Homolog of NCBI NO: 15238089 NR Description: transporter - related [Arabidopsis thaliana]
  misc_feature (71)..(517): Homolog of NCBI NO: 15218229 NR Description: transporter - related [Arabidopsis thaliana]
  misc_feature (219)..(518): Homolog of NCBI NO: 34393426 NR Description: membrane transporter PFB0275w-like protein
  misc_feature (82)..(517): Homolog of NCBI NO: 15224194 NR Description: transporter - related [Arabidopsis thaliana]
  misc_feature (30)..(518): Homolog of NCBI NO: 15234530 NR Description: transporter - related [Arabidopsis thaliana]
IRVGTLDPIFIESNQTPAPVTREFKFWILMGHARTRTGIISVAFKFFRSLFPRHHRTNSMKIKTGTFLGVSISLILINLAAIMERADENLLPSVYKEVSEAFNAGPSDLGYLTFVRNFVQGLASPLAGVLVITYDRPIVLAIGTFCWALSTAAVGASSYFIQVALWRAVNGFGLAIVIPALQSFIADSYKDGARGAGFGMLNLIGTIGGIGGGVVATVMAGSEFWGIPGWRCAFIMMAALSAVIGLLVFLFVVDPRKNIEREELMAHKMNSNSVWNDSLAAAKSVVKVSTFQIIVAQGIIGSFPWTAMVFFTMWFELIGFDHNQTAALLGVFATGGAIGTLMGGIIADKMSRIYPNSGRVMCAQFSAFMGIPFSIILLKVIPQSTSSYSIFSITLFLMGLTITWCGSAVNAPMFAEVVPPRHRTMIYAFDRAFEGSFSSFAAPLVGILSEKLFGYDSRGIDPLKGSSVREADALSKGLLSMMAVPFGLCCLCYTPLHFVFQKDRENAKIASSKETEMI

SEQ ID NO: 25064 - protein, 489 aa, Arabidopsis thaliana
  peptide (1)..(489): Ceres Seq. ID no. 13487681
  misc_feature (248)..(474): Homolog of NCBI NO: 7494336 NR Description: membrane transporter PFB0275w - malaria parasite
  misc_feature (25)..(249): Homolog of NCBI NO: 23593282 NR Description: hypothetical protein, conserved [Plasmodium
  misc_feature (248)..(474): Homolog of NCBI NO: 23593282 NR Description: hypothetical protein, conserved [Plasmodium
  misc_feature (42)..(172): Homolog of NCBI NO: 11358310 NR Description: hypothetical protein T31P16.180 - Arabidopsis
  misc_feature (129)..(488): Homolog of NCBI NO: 11358310 NR Description: hypothetical protein T31P16.180 - Arabidopsis
  misc_feature (42)..(488): Homolog of NCBI NO: 15238089 NR Description: transporter - related [Arabidopsis thaliana]
  misc_feature (42)..(488): Homolog of NCBI NO: 15218229 NR Description: transporter - related [Arabidopsis thaliana]
  misc_feature (190)..(489): Homolog of NCBI NO: 34393426 NR Description: membrane transporter PFB0275w-like protein
  misc_feature (53)..(488): Homolog of NCBI NO: 15224194 NR Description: transporter - related [Arabidopsis thaliana]
  misc_feature (1)..(489): Homolog of NCBI NO: 15234530 NR Description: transporter - related [Arabidopsis thaliana]
MGHARTRTGIISVAFKFFRSLFPRHHRTNSMKIKTGTFLGVSISLILINLAAIMERADENLLPSVYKEVSEAFNAGPSDLGYLTFVRNFVQGLASPLAGVLVITYDRPIVLAIGTFCWALSTAAVGASSYFIQVALWRAVNGFGLAIVIPALQSFIADSYKDGARGAGFGMLNLIGTIGGIGGGVVATVMAGSEFWGIPGWRCAFIMMAALSAVIGLLVFLFVVDPRKNIEREELMAHKMNSNSVWNDSLAAAKSVVKVSTFQIIVAQGIIGSFPWTAMVFFTMWFELIGFDHNQTAALLGVFATGGAIGTLMGGIIADKMSRIYPNSGRVMCAQFSAFMGIPFSIILLKVIPQSTSSYSIFSITLFLMGLTITWCGSAVNAPMFAEVVPPRHRTMIYAFDRAFEGSFSSFAAPLVGILSEKLFGYDSRGIDPLKGSSVREADALSKGLLSMMAVPFGLCCLCYTPLHFVFQKDRENAKIASSKETEMI

SEQ ID NO: 25065 - protein, 459 aa, Arabidopsis thaliana
  peptide (1)..(459): Ceres Seq. ID no. 13487682
  misc_feature (218)..(444): Homolog of NCBI NO: 7494336 NR Description: membrane transporter PFB0275w - malaria parasite
  misc_feature (1)..(219): Homolog of NCBI NO: 23593282 NR Description: hypothetical protein, conserved [Plasmodium
  misc_feature (218)..(444): Homolog of NCBI NO: 23593282 NR Description: hypothetical protein, conserved [Plasmodium
  misc_feature (12)..(142): Homolog of NCBI NO: 11358310 NR Description: hypothetical protein T31P16.180 - Arabidopsis
  misc_feature (99)..(458): Homolog of NCBI NO: 11358310 NR Description: hypothetical protein T31P16.180 - Arabidopsis
  misc_feature (12)..(458): Homolog of NCBI NO: 15238089 NR Description: transporter - related [Arabidopsis thaliana]
  misc_feature (12)..(458): Homolog of NCBI NO: 15218229 NR Description: transporter - related [Arabidopsis thaliana]
  misc_feature (160)..(459): Homolog of NCBI NO: 34393426 NR Description: membrane transporter PFB0275w-like protein
  misc_feature (23)..(458): Homolog of NCBI NO: 15224194 NR Description: transporter - related [Arabidopsis thaliana]
  misc_feature (1)..(459): Homolog of NCBI NO: 15234530 NR Description: transporter - related [Arabidopsis thaliana]
MKIKTGTFLGVSISLILINLAAIMERADENLLPSVYKEVSEAFNAGPSDLGYLTFVRNFVQGLASPLAGVLVITYDRPIVLAIGTFCWALSTAAVGASSYFIQVALWRAVNGFGLAIVIPALQSFIADSYKDGARGAGFGMLNLIGTIGGIGGGVVATVMAGSEFWGIPGWRCAFIMMAALSAVIGLLVFLFVVDPRKNIEREELMAHKMNSNSVWNDSLAAAKSVVKVSTFQIIVAQGIIGSFPWTAMVFFTMWFELIGFDHNQTAALLGVFATGGAIGTLMGGIIADKMSRIYPNSGRVMCAQFSAFMGIPFSIILLKVIPQSTSSYSIFSITLFLMGLTITWCGSAVNAPMFAEVVPPRHRTMIYAFDRAFEGSFSSFAAPLVGILSEKLFGYDSRGIDPLKGSSVREADALSKGLLSMMAVPFGLCCLCYTPLHFVFQKDRENAKIASSKETEMI

SEQ ID NO: 25066 - DNA, 1521 bp, Arabidopsis thaliana
  misc_feature (1)..(1521): Ceres Seq. ID no. 12738283
  misc_feature: MA Experiment ID: 108434 Result: Up-regulated in Transcription
  misc_feature: MA Experiment 108434 PARAMETER Experiment Name: At_Root_Tips_cDNA_P Parameter: Tissue Value: Root Tips
  misc_feature: MA Experiment ID: 108462 Result: Down-regulated in Transcription
  misc_feature: MA Experiment 108462 PARAMETER Experiment Name: At_Germinating_Seeds_cDNA_P Parameter: Age (day) Value: 2 vs. 0
  misc_feature: MA Experiment 108462 PARAMETER Experiment Name: At_Germinating_Seeds_cDNA_P Parameter: Tissue Value: Germinating Seeds
  misc_feature: MA Experiment ID: 108463 Result: Down-regulated in Transcription
  misc_feature: MA Experiment 108463 PARAMETER Experiment Name: At_Germinating_Seeds_cDNA_P Parameter: Age (day) Value: 3 vs. 0
  misc_feature: MA Experiment 108463 PARAMETER Experiment Name: At_Germinating_Seeds_cDNA_P Parameter: Tissue Value: Germinating Seeds
  misc_feature: MA Experiment ID: 108573 Result: Up-regulated in Transcription
  misc_feature: MA Experiment 108573 PARAMETER Experiment Name: At_Drought_cDNA_P Parameter: Timepoint (hr) Value: 6
  misc_feature: MA Experiment 108573 PARAMETER Experiment Name: At_Drought_cDNA_P Parameter: Tissue Value: Aerial
  misc_feature: MA Experiment 108573 PARAMETER Experiment Name: At_Drought_cDNA_P Parameter: Treatment Value: Drought vs. No Drought
  misc_feature: MA Experiment ID: 108576 Result: Up-regulated in Transcription
  misc_feature: MA Experiment 108576 PARAMETER Experiment Name: At_42deg_Heat_cDNA_P Parameter: Temperature (deg C) Value: 42 vs. 22
  misc_feature: MA Experiment 108576 PARAMETER Experiment Name: At_42deg_Heat_cDNA_P Parameter: Timepoint (hr) Value: 1
  misc_feature: MA Experiment 108576 PARAMETER Experiment Name: At_42deg_Heat_cDNA_P Parameter: Tissue Value: Aerial
  misc_feature: MA Experiment ID: 108577 Result: Up-regulated in Transcription
  misc_feature: MA Experiment 108577 PARAMETER Experiment Name: At_42deg_Heat_cDNA_P Parameter: Temperature (deg C) Value: 42 vs. 22
  misc_feature: MA Experiment 108577 PARAMETER Experiment Name: At_42deg_Heat_cDNA_P Parameter: Timepoint (hr) Value: 6
  misc_feature: MA Experiment 108577 PARAMETER Experiment Name: At_42deg_Heat_cDNA_P Parameter: Tissue Value: Aerial
  misc_feature: MA Experiment ID: 108585 Result: Up-regulated in Transcription
  misc_feature: MA Experiment 108585 PARAMETER Experiment Name: At_5mM_NaNP_cDNA_P Parameter: Timepoint (hr) Value: 6
  misc_feature: MA Experiment 108585 PARAMETER Experiment Name: At_5mM_NaNP_cDNA_P Parameter: Tissue Value: Aerial
  misc_feature: MA Experiment 108585 PARAMETER Experiment Name: At_5mM_NaNP_cDNA_P Parameter: Treatment Value: null
  misc_feature: MA Experiment ID: 20000093 Result: Up-regulated in Transcription
  misc_feature: MA Experiment 20000093 PARAMETER Experiment Name: At_42deg_Heat_cDNA_P Parameter: Temperature (deg C) Value: 42 vs. 22
  misc_feature: MA Experiment 20000093 PARAMETER Experiment Name: At_42deg_Heat_cDNA_P Parameter: Timepoint (hr) Value: 0.5
  misc_feature: MA Experiment 20000093 PARAMETER Experiment Name: At_42deg_Heat_cDNA_P Parameter: Tissue Value: Aerial
  misc_feature: MA Experiment ID: 20000111 Result: Up-regulated in Transcription
  misc_feature: MA Experiment 20000111 PARAMETER Experiment Name: At_42deg_Heat_cDNA_P Parameter: Temperature (deg C) Value: 42 vs. 22
  misc_feature: MA Experiment 20000111 PARAMETER Experiment Name: At_42deg_Heat_cDNA_P Parameter: Timepoint (hr) Value: 6
  misc_feature: MA Experiment 20000111 PARAMETER Experiment Name: At_42deg_Heat_cDNA_P Parameter: Tissue Value: Aerial
  misc_feature: MA Experiment ID: 20000112 Result: Up-regulated in Transcription
  misc_feature: MA Experiment 20000112 PARAMETER Experiment Name: At_42deg_Heat_cDNA_P Parameter: Temperature (deg C) Value: 42 vs. 22
  misc_feature: MA Experiment 20000112 PARAMETER Experiment Name: At_42deg_Heat_cDNA_P Parameter: Timepoint (hr) Value: 2
  misc_feature: MA Experiment 20000112 PARAMETER Experiment Name: At_42deg_Heat_cDNA_P Parameter: Tissue Value: Aerial
  misc_feature: MA Experiment ID: 20000144 Result: Up-regulated in Transcription
  misc_feature: MA Experiment 20000144 PARAMETER Experiment Name: At_42deg_Heat_cDNA_P Parameter: Temperature (deg C) Value: 42 vs. 22
  misc_feature: MA Experiment 20000144 PARAMETER Experiment Name: At_42deg_Heat_cDNA_P Parameter: Timepoint (hr) Value: 1
  misc_feature: MA Experiment 20000144 PARAMETER Experiment Name: At_42deg_Heat_cDNA_P Parameter: Tissue Value: Aerial
  misc_feature: MA Experiment ID: 20000173 Result: Up-regulated in Transcription
  misc_feature: MA Experiment 20000173 PARAMETER Experiment Name: At_42deg_Heat_P Parameter: Age (day) Value: 14
  misc_feature: MA Experiment 20000173 PARAMETER Experiment Name: At_42deg_Heat_P Parameter: Organism Value: A. thaliana
  misc_feature: MA Experiment 20000173 PARAMETER Experiment Name: At_42deg_Heat_P Parameter: Plant Line Value: WS
  misc_feature: MA Experiment 20000173 PARAMETER Experiment Name: At_42deg_Heat_P Parameter: Temperature (deg C) Value: 42 vs. 22
  misc_feature: MA Experiment 20000173 PARAMETER Experiment Name: At_42deg_Heat_P Parameter: Timepoint (hr) Value: 6
  misc_feature: MA Experiment 20000173 PARAMETER Experiment Name: At_42deg_Heat_P Parameter: Tissue Value: Aerial
  misc_feature: MA Experiment ID: 20000179 Result: Down-regulated in Transcription
  misc_feature: MA Experiment 20000179 PARAMETER Experiment Name: At_Germinating_Seeds_P Parameter: Age (hr) Value: 6 vs. 0
  misc_feature: MA Experiment 20000179 PARAMETER Experiment Name: At_Germinating_Seeds_P Parameter: Tissue Value: Germinating Seeds
  misc_feature: MA Experiment ID: 20000180 Result: Down-regulated in Transcription
  misc_feature: MA Experiment 20000180 PARAMETER Experiment Name: At_Germinating_Seeds_P Parameter: Age (hr) Value: 24 vs. 0
  misc_feature: MA Experiment 20000180 PARAMETER Experiment Name: At_Germinating_Seeds_P Parameter: Tissue Value: Germinating Seeds
  misc_feature: MA Experiment ID: 20000224 Result: Down-regulated in Transcription
tcgaatcttcttcttcttatttcttctataccgtcgtcgaaaagctttaccaaaatctcacgcccccgacgattcatcgggatttgagtttgcactaaacccacaatggtttcctatcgtgctaccacagagacgatttccctggctttagaagccaacagctcggaggctattacgatactgtaccaggttttggaagacccttcttcatctcctgaggctatacggatcaaggagcaagcgattacaaacctttgtgatcgattgactgaagagaagagaggtgaggatctccggaaactgttgaccaatttgaggcctttcttttccttaatccccaaggcgaaaactgcgaaaatcgtcagaggaatcattgatgctgtggcaaagattcctggaacaactgatctccagatcactctctgcaaagagatggtcgaatggacccgcgctgagaagcgtactttcctcaggcagcgagtagaggctaggcttgcagctcttttgatggagaacaaggagtatgttgaagctttggcgctgttgagtactttggtaaaagaggtagggagattagatgataagctccttctggtcgacatagacttgctggagagcaaacttcacttctcattgagaaacttacccaaggcaaaagctgcactcactgcagctaggacagctgctaacgctatatatgtcccaccagctcaacaaggcacgatagatctgcagagtgggattcttcatgctgaagagaaagactacaaaaccggatacagttacttctttgaagcctttgagtccttcaacgctctcggagatccgagagcggtttcagtttgaagtacatgttactgtgcaagatcatggttagccaagctgatgatgttgcaggaataatctcctcaaaggctggactacagtacgttggccctgacctggatgccatgaaagcagtcgctgatgctcactcgaagaggtccttgaagttgtttgagaacgctctcctcactacaaagcacagcttgaagatgacccaattgtccacaggcatctctcttctctctatgacacgcttctggagcaaaatctgtgtcgtttgatcgagcccttctcaagagttgagatagctcacattgctgagctcattggattgccgctcgaccatgtggaaaagaagctatctcagatgatactcgacaagaaatttgcaggtaccttggatcaaggagctggatgcctcatcatcttcgaagacccaaaggcagatgctatctactcggctaccctcgaaaccattgcaaacatggggaaggtcgtcgacagcctttatgtccggtctgccaaaatcatgtcctgagagagtgagtgagttggtcgtatgaatctcattctatcgttctttctttctggttttagatatcgtttggactcaaagaaactgatgtttctcaatggagaaagtaaacttgtctgaattgttcacattactcgttttgcttatgatcttattatgcc

SEQ ID NO: 25067 - protein, 246 aa, Arabidopsis thaliana
  peptide (1)..(246): Ceres Seq. ID no. 12738284
  misc_feature (9)..(240): Homolog of NCBI NO: 17553730 NR Description: Proteasome Regulatory Particle, Non-ATPase-like
  misc_feature (12)..(246): Homolog of NCBI NO: 17137740 NR Description: Proteasome p44.5 subunit CG10149-PB [Drosophila
  misc_feature (1)..(240): Homolog of NCBI NO: 40740134 NR Description: hypothetical protein AN4225.2 [Aspergillus
  misc_feature (21)..(242): Homolog of NCBI NO: 32415111 NR Description: hypothetical protein ( probable 26s proteasome
  misc_feature (2)..(242): Homolog of NCBI NO: 19114023 NR Description: 26S proteasome regulatory subunit
  misc_feature (15)..(245): Homolog of NCBI NO: 30185654 NR Description: Similar to proteasome (prosome, macropain) 26S
  misc_feature (110)..(244): Homolog of NCBI NO: 38093742 NR Description: putative proteosome subunit
  misc_feature (6)..(244): Homolog of NCBI NO: 38344536 NR Description: OSJNBa0027P08.4 [Oryza sativa (japonica
  misc_feature (1)..(244): Homolog of NCBI NO: 25332510 NR Description: 19S proteosome subunit 9 [imported] - Arabidopsis
  misc_feature (1)..(244): Homolog of NCBI NO: 15218845 NR Description: 26S proteasome regulatory subunit (RPN6), putative
MVSYRATTETISLALEANSSEAITILYQVLEDPSSSPEAIRIKEQAITNLCDRLTEEKRGEDLRKLLTNLRPFFSLIPKAKTAKIVRGIIDAVAKIPGTTDLQITLCKEMVEWTRAEKRTFLRQRVEARLAALLMENKEYVEALALLSTLVKEVGRLDDKLLLVDIDLLESKLHFSLRNLPKAKAALTAARTAANAIYVPPAQQGTIDLQSGILHAEEKDYKTGYSYFFEAFESFNALGDPRAVSV

SEQ ID NO: 25068 - protein, 137 aa, Arabidopsis thaliana
  peptide (1)..(137): Ceres Seq. ID no. 12738285
  misc_feature (1)..(131): Homolog of NCBI NO: 17553730 NR Description: Proteasome Regulatory Particle, Non-ATPase-like
  misc_feature (1)..(137): Homolog of NCBI NO: 17137740 NR Description: Proteasome p44.5 subunit CG10149-PB [Drosophila
  misc_feature (1)..(131): Homolog of NCBI NO: 40740134 NR Description: hypothetical protein AN4225.2 [Aspergillus
  misc_feature (1)..(133): Homolog of NCBI NO: 32415111 NR Description: hypothetical protein ( probable 26s proteasome
  misc_feature (1)..(133): Homolog of NCBI NO: 19114023 NR Description: 26S proteasome regulatory subunit
  misc_feature (1)..(136): Homolog of NCBI NO: 30185654 NR Description: Similar to proteasome (prosome, macropain) 26S
  misc_feature (1)..(135): Homolog of NCBI NO: 38093742 NR Description: putative proteosome subunit
  misc_feature (1)..(135): Homolog of NCBI NO: 38344536 NR Description: OSJNBa0027P08.4 [Oryza sativa (japonica
  misc_feature (1)..(135): Homolog of NCBI NO: 25332510 NR Description: 19S proteosome subunit 9 [imported] - Arabidopsis
  misc_feature (1)..(135): Homolog of NCBI NO: 15218845 NR Description: 26S proteasome regulatory subunit (RPN6), putative
MVEWTRAEKRTFLRQRVEARLAALLMENKEYVEALALLSTLVKEVGRLDDKLLLVDIDLLESKLHFSLRNLPKAKAALTAARTAANAIYVPPAQQGTIDLQSGILHAEEKDYKTGYSYFFEAFESFNALGDPRAVSV

SEQ ID NO: 25069 - DNA, 1119 bp, Arabidopsis thaliana
  misc_feature (1)..(1119): Ceres Seq. ID no. 12335788
  misc_feature: MA Experiment ID: 108433 Result: Down-regulated in Transcription
  misc_feature: MA Experiment 108433 PARAMETER Experiment Name: At_rhl_Mutant2_cDNA_P Parameter: Age (day) Value: 7
  misc_feature: MA Experiment 108433 PARAMETER Experiment Name: At_rhl_Mutant2_cDNA_P Parameter: Organism Value: A. thaliana
  misc_feature: MA Experiment 108433 PARAMETER Experiment Name: At_rhl_Mutant2_cDNA_P Parameter: Plant Line Value: rhl Mutant vs. wt landsburg
  misc_feature: MA Experiment 108433 PARAMETER Experiment Name: At_rhl_Mutant2_cDNA_P Parameter: Tissue Value: Roots
  misc_feature: MA Experiment ID: 108434 Result: Up-regulated in Transcription
  misc_feature: MA Experiment 108434 PARAMETER Experiment Name: At_Root_Tips_cDNA_P Parameter: Tissue Value: Root Tips
  misc_feature: MA Experiment ID: 108435 Result: Up-regulated in Transcription
  misc_feature: MA Experiment 108435 PARAMETER Experiment Name: At_stm_Mutants_cDNA_P Parameter: Plant Line Value: wt Landsburg vs stm
  misc_feature: MA Experiment 108435 PARAMETER Experiment Name: At_stm_Mutants_cDNA_P Parameter: Tissue Value: Shoot Apical Meristem Region
  misc_feature: MA Experiment ID: 108461 Result: Up-regulated in Transcription
  misc_feature: MA Experiment 108461 PARAMETER Experiment Name: At_Germinating_Seeds_cDNA_P Parameter: Age (day) Value: 1 vs. 0
  misc_feature: MA Experiment 108461 PARAMETER Experiment Name: At_Germinating_Seeds_cDNA_P Parameter: Tissue Value: Germinating Seeds
  misc_feature: MA Experiment ID: 108462 Result: Up-regulated in Transcription
  misc_feature: MA Experiment 108462 PARAMETER Experiment Name: At_Germinating_Seeds_cDNA_P Parameter: Age (day) Value: 2 vs. 0
  misc_feature: MA Experiment 108462 PARAMETER Experiment Name: At_Germinating_Seeds_cDNA_P Parameter: Tissue Value: Germinating Seeds
  misc_feature: MA Experiment ID: 108464 Result: Up-regulated in Transcription
  misc_feature: MA Experiment 108464 PARAMETER Experiment Name: At_Germinating_Seeds_cDNA_P Parameter: Age (day) Value: 4 vs. 0
  misc_feature: MA Experiment 108464 PARAMETER Experiment Name: At_Germinating_Seeds_cDNA_P Parameter: Tissue Value: Germinating Seeds
  misc_feature: MA Experiment ID: 108573 Result: Down-regulated in Transcription
  misc_feature: MA Experiment 108573 PARAMETER Experiment Name: At_Drought_cDNA_P Parameter: Timepoint (hr) Value: 6
  misc_feature: MA Experiment 108573 PARAMETER Experiment Name: At_Drought_cDNA_P Parameter: Tissue Value: Aerial
  misc_feature: MA Experiment 108573 PARAMETER Experiment Name: At_Drought_cDNA_P Parameter: Treatment Value: Drought vs. No Drought
  misc_feature: MA Experiment ID: 108577 Result: Down-regulated in Transcription
  misc_feature: MA Experiment 108577 PARAMETER Experiment Name: At_42deg_Heat_cDNA_P Parameter: Temperature (deg C) Value: 42 vs. 22
  misc_feature: MA Experiment 108577 PARAMETER Experiment Name: At_42deg_Heat_cDNA_P Parameter: Timepoint (hr) Value: 6
  misc_feature: MA Experiment 108577 PARAMETER Experiment Name: At_42deg_Heat_cDNA_P Parameter: Tissue Value: Aerial
  misc_feature: MA Experiment ID: 108585 Result: Down-regulated in Transcription
  misc_feature: MA Experiment 108585 PARAMETER Experiment Name: At_5mM_NaNP_cDNA_P Parameter: Timepoint (hr) Value: 6
  misc_feature: MA Experiment 108585 PARAMETER Experiment Name: At_5mM_NaNP_cDNA_P Parameter: Tissue Value: Aerial
  misc_feature: MA Experiment 108585 PARAMETER Experiment Name: At_5mM_NaNP_cDNA_P Parameter: Treatment Value: null
  misc_feature: MA Experiment ID: 20000113 Result: Down-regulated in Transcription
  misc_feature: MA Experiment 20000113 PARAMETER Experiment Name: At_42deg_Heat_cDNA_P Parameter: Temperature (deg C) Value: 42 vs. 22
  misc_feature: MA Experiment 20000113 PARAMETER Experiment Name: At_42deg_Heat_cDNA_P Parameter: Timepoint (hr) Value: 8
  misc_feature: MA Experiment 20000113 PARAMETER Experiment Name: At_42deg_Heat_cDNA_P Parameter: Tissue Value: Aerial
  misc_feature: MA Experiment ID: 20000144 Result: Down-regulated in Transcription
  misc_feature: MA Experiment 20000144 PARAMETER Experiment Name: At_42deg_Heat_cDNA_P Parameter: Temperature (deg C) Value: 42 vs. 22
  misc_feature: MA Experiment 20000144 PARAMETER Experiment Name: At_42deg_Heat_cDNA_P Parameter: Timepoint (hr) Value: 1
  misc_feature: MA Experiment 20000144 PARAMETER Experiment Name: At_42deg_Heat_cDNA_P Parameter: Tissue Value: Aerial
  misc_feature: MA Experiment ID: 20000286 Result: Up-regulated in Transcription
  misc_feature: MA Experiment 20000286 PARAMETER Experiment Name: At_Open_Flower_P Parameter: Age (day) Value: 21
  misc_feature: MA Experiment 20000286 PARAMETER Experiment Name: At_Open_Flower_P Parameter: Plant Line Value: WS
  misc_feature: MA Experiment 20000286 PARAMETER Experiment Name: At_Open_Flower_P Parameter: Tissue Value: Half Open vs. Whole Plant
  misc_feature: MA Experiment ID: 20001247 Result: Down-regulated in Transcription
  misc_feature: MA Experiment 20001247 PARAMETER Experiment Name: At_Far-red-induction_P Parameter: Age (day) Value: 7
  misc_feature: MA Experiment 20001247 PARAMETER Experiment Name: At_Far-red-induction_P Parameter: Light Value: Far-red vs. White
  misc_feature: MA Experiment 20001247 PARAMETER Experiment Name: At_Far-red-induction_P Parameter: Organism Value: A. thaliana
  misc_feature: MA Experiment 20001247 PARAMETER Experiment Name: At_Far-red-induction_P Parameter: Plant Line Value: Columbia
  misc_feature: MA Experiment 20001247 PARAMETER Experiment Name: At_Far-red-induction_P Parameter: Timepoint (hr) Value: 1
  misc_feature: MA Experiment 20001247 PARAMETER Experiment Name: At_Far-red-induction_P Parameter: Tissue Value: Whole Plant
attattcccctaacgaatttcaaatcaaaatctctctctttctcttatctctaatggcgttgaggaacattgaaaacgctcttccgatctcacaggaacgacctaagaagctggccaaactctcaaagcaaccggagattggtctaaatgacgaaaacaaccctgtcgctgtggctgaatcgaccgtcgaatacgttgcttctgagaatctcaaaccattttcagatcctgaatcttctgtccagagattacttgaagaattagcatcaaaggattggattaaagtatgtgaatcattgaacaacacaaggagatttgcaattcatcactcttctctgttgctaccaattctagaaaagcttatagttgtgatggtgaaggcgatgaagaatcctagaagtgcattgtgcaagacttcgattatgacttgttctgatatcttcactgcttatggagaaaagttgctggaaggacctcatttgaaatctatggacgatctgctgttgcagttgctgatgaaagcttcacaagacaagaagtttgtgtgtgaagaagcagagaaagcgctgaacacgatggttaactcggtggctcgcttgccgcttctgcgtaagcttcagagttatgtccgtcacagtaaccctcgtgtcagggccaaagctgctgtgtctacttccaactgcgtttctaaaatggaggtaaatgaaatggaagaatttgggatggttctgctcgcacaaatggctgcggatcagttgagtgacaagttgccagaggcaagggaagctgcaaggagtatggtgaactcgcttttcgagaaatttacatggaatgaagaagaagacgaagaaggaagcaagcaagaagcttggaagaagttttgtgagaagaatgtaacagggctcaatgcacaagccatgatcaagattgttgcatctcaataaatttctgaagatgaaatgttgttctctctgattcatgtaaaatacgtttttacatgataaaaacaatcttttttttatttctactggatctgtcctctcaattccaatgttactaccataatacgccagaggctcagtggttctttaagcttcatgaaaaattgttgttgtggct

SEQ ID NO: 25070 - protein, 313 aa, Arabidopsis thaliana
  peptide (1)..(313): Ceres Seq. ID no. 12335789
  misc_feature (63)..(267): Homolog of NCBI NO: 34865276 NR Description: similar to KIAA0423 [Rattus norvegicus]
  misc_feature (62)..(232): Homolog of NCBI NO: 15229670 NR Description: unknown protein; protein id: At3g18530.1
  misc_feature (62)..(241): Homolog of NCBI NO: 9294314 NR Description: gb|AAF24615.1~gene_id:K24M9.2~similar to unknown
  misc_feature (30)..(309): Homolog of NCBI NO: 15241493 NR Description: putative protein
  misc_feature (62)..(309): Homolog of NCBI NO: 18395821 NR Description: expressed protein
  misc_feature (62)..(309): Homolog of NCBI NO: 21537265 NR Description: unknown [Arabidopsis thaliana]
  misc_feature (18)..(84): Homolog of NCBI NO: 7485173 NR Description: hypothetical protein - Arabidopsis thaliana
  misc_feature (119)..(313): Homolog of NCBI NO: 7485173 NR Description: hypothetical protein - Arabidopsis thaliana
  misc_feature (18)..(313): Homolog of NCBI NO: 18414533 NR Description: expressed protein
  misc_feature (18)..(313): Homolog of NCBI NO: 21593517 NR Description: unknown [Arabidopsis thaliana]
YSPNEFQIKISLFLLSLMALRNIENALPISQERPKKLAKLSKQPEIGLNDENNPVAVAESTVEYVASENLKPFSDPESSVQRLLEELASKDWIKVCESLNNTRRFAIHHSSLLLPILEKLIVVMVKAMKNPRSALCKTSIMTCSDIFTAYGEKLLEGPHLKSMDDLLLQLLMKASQDKKFVCEEAEKALNTMVNSVARLPLLRKLQSYVRHSNPRVRAKAAVSTSNCVSKMEVNEMEEFGMVLLAQMAADQLSDKLPEAREAARSMVNSLFEKFTWNEEEDEEGSKQEAWKKFCEKNVTGLNAQAMIKIVASQ

SEQ ID NO: 25071 - protein, 296 aa, Arabidopsis thaliana
  peptide (1)..(296): Ceres Seq. ID no. 12335790
  misc_feature (46)..(250): Homolog of NCBI NO: 34865276 NR Description: similar to KIAA0423 [Rattus norvegicus]
  misc_feature (45)..(215): Homolog of NCBI NO: 15229670 NR Description: unknown protein; protein id: At3g18530.1
  misc_feature (45)..(224): Homolog of NCBI NO: 9294314 NR Description: gb|AAF24615.1~gene_id:K24M9.2~similar to unknown
  misc_feature (13)..(292): Homolog of NCBI NO: 15241493 NR Description: putative protein
  misc_feature (45)..(292): Homolog of NCBI NO: 18395821 NR Description: expressed protein
  misc_feature (45)..(292): Homolog of NCBI NO: 21537265 NR Description: unknown [Arabidopsis thaliana]
  misc_feature (1)..(67): Homolog of NCBI NO: 7485173 NR Description: hypothetical protein - Arabidopsis thaliana
  misc_feature (102)..(296): Homolog of NCBI NO: 7485173 NR Description: hypothetical protein - Arabidopsis thaliana
  misc_feature (1)..(296): Homolog of NCBI NO: 18414533 NR Description: expressed protein
  misc_feature (1)..(296): Homolog of NCBI NO: 21593517 NR Description: unknown [Arabidopsis thaliana]
MALRNIENALPISQERPKKLAKLSKQPEIGLNDENNPVAVAESTVEYVASENLKPFSDPESSVQRLLEELASKDWIKVCESLNNTRRFAIHHSSLLLPILEKLIVVMVKAMKNPRSALCKTSIMTCSDIFTAYGEKLLEGPHLKSMDDLLLQLLMKASQDKKFVCEEAEKALNTMVNSVARLPLLRKLQSYVRHSNPRVRAKAAVSTSNCVSKMEVNEMEEFGMVLLAQMAADQLSDKLPEAREAARSMVNSLFEKFTWNEEEDEEGSKQEAWKKFCEKNVTGLNAQAMIKIVASQ

SEQ ID NO: 25072 - protein, 190 aa, Arabidopsis thaliana
  peptide (1)..(190): Ceres Seq. ID no. 12335791
  misc_feature (1)..(190): Homolog of NCBI NO: 7485173 NR Description: hypothetical protein - Arabidopsis thaliana
  misc_feature (1)..(190): Homolog of NCBI NO: 18414533 NR Description: expressed protein
  misc_feature (1)..(190): Homolog of NCBI NO: 21593517 NR Description: unknown [Arabidopsis thaliana]
  misc_feature (1)..(141): Homolog of NCBI NO: 40807213 NR Description: Unknown (protein for IMAGE:6161345) [Homo sapiens]
  misc_feature (1)..(144): Homolog of NCBI NO: 34865276 NR Description: similar to KIAA0423 [Rattus norvegicus]
  misc_feature (1)..(109): Homolog of NCBI NO: 15229670 NR Description: unknown protein; protein id: At3g18530.1
  misc_feature (1)..(118): Homolog of NCBI NO: 9294314 NR Description: gb|AAF24615.1~gene_id:K24M9.2~similar to unknown
  misc_feature (1)..(186): Homolog of NCBI NO: 15241493 NR Description: putative protein
  misc_feature (1)..(186): Homolog of NCBI NO: 18395821 NR Description: expressed protein
  misc_feature (1)..(186): Homolog of NCBI NO: 21537265 NR Description: unknown [Arabidopsis thaliana]
MVKAMKNPRSALCKTSIMTCSDIFTAYGEKLLEGPHLKSMDDLLLQLLMKASQDKKFVCEEAEKALNTMVNSVARLPLLRKLQSYVRHSNPRVRAKAAVSTSNCVSKMEVNEMEEFGMVLLAQMAADQLSDKLPEAREAARSMVNSLFEKFTWNEEEDEEGSKQEAWKKFCEKNVTGLNAQAMIKIVASQ

SEQ ID NO: 25073 - DNA, 1305 bp, Arabidopsis thaliana
  misc_feature (1)..(1305): Ceres Seq. ID no. 12357654
  misc_feature: MA Experiment ID: 108461 Result: Up-regulated in Transcription
  misc_feature: MA Experiment 108461 PARAMETER Experiment Name: At_Germinating_Seeds_cDNA_P Parameter: Age (day) Value: 1 vs. 0
  misc_feature: MA Experiment 108461 PARAMETER Experiment Name: At_Germinating_Seeds_cDNA_P Parameter: Tissue Value: Germinating Seeds
  misc_feature: MA Experiment ID: 108462 Result: Up-regulated in Transcription
  misc_feature: MA Experiment 108462 PARAMETER Experiment Name: At_Germinating_Seeds_cDNA_P Parameter: Age (day) Value: 2 vs. 0
  misc_feature: MA Experiment 108462 PARAMETER Experiment Name: At_Germinating_Seeds_cDNA_P Parameter: Tissue Value: Germinating Seeds
  misc_feature: MA Experiment ID: 108463 Result: Up-regulated in Transcription
  misc_feature: MA Experiment 108463 PARAMETER Experiment Name: At_Germinating_Seeds_cDNA_P Parameter: Age (day) Value: 3 vs. 0
  misc_feature: MA Experiment 108463 PARAMETER Experiment Name: At_Germinating_Seeds_cDNA_P Parameter: Tissue Value: Germinating Seeds
  misc_feature: MA Experiment ID: 108464 Result: Up-regulated in Transcription
  misc_feature: MA Experiment 108464 PARAMETER Experiment Name: At_Germinating_Seeds_cDNA_P Parameter: Age (day) Value: 4 vs. 0
  misc_feature: MA Experiment 108464 PARAMETER Experiment Name: At_Germinating_Seeds_cDNA_P Parameter: Tissue Value: Germinating Seeds
  misc_feature: MA Experiment ID: 108473 Result: Down-regulated in Transcription
  misc_feature: MA Experiment 108473 PARAMETER Experiment Name: At_Drought_Flowers_cDNA_P Parameter: Timepoint (hr) Value: 7 d
  misc_feature: MA Experiment 108473 PARAMETER Experiment Name: At_Drought_Flowers_cDNA_P Parameter: Tissue Value: Flower
  misc_feature: MA Experiment 108473 PARAMETER Experiment Name: At_Drought_Flowers_cDNA_P Parameter: Treatment Value: Drought vs. No Drought
  misc_feature: MA Experiment ID: 108501 Result: Down-regulated in Transcription
  misc_feature: MA Experiment 108501 PARAMETER Experiment Name: At_ap2_floral_buds_cDNA_P Parameter: Plant Line Value: ap2 (Ler.)
  misc_feature: MA Experiment 108501 PARAMETER Experiment Name: At_ap2_floral_buds_cDNA_P Parameter: Tissue Value: Closed Flower
  misc_feature: MA Experiment ID: 108572 Result: Up-regulated in Transcription
  misc_feature: MA Experiment 108572 PARAMETER Experiment Name: At_Drought_cDNA_P Parameter: Timepoint (hr) Value: 1
  misc_feature: MA Experiment 108572 PARAMETER Experiment Name: At_Drought_cDNA_P Parameter: Tissue Value: Aerial
  misc_feature: MA Experiment 108572 PARAMETER Experiment Name: At_Drought_cDNA_P Parameter: Treatment Value: Drought vs. No Drought
  misc_feature: MA Experiment ID: 108574 Result: Up-regulated in Transcription
  misc_feature: MA Experiment 108574 PARAMETER Experiment Name: At_Wounding__cDNA_P Parameter: Timepoint (hr) Value: 1
  misc_feature: MA Experiment 108574 PARAMETER Experiment Name: At_Wounding__cDNA_P Parameter: Tissue Value: Aerial
  misc_feature: MA Experiment 108574 PARAMETER Experiment Name: At_Wounding__cDNA_P Parameter: Treatment Value: Wounding vs. No Wounding
  misc_feature: MA Experiment ID: 108576 Result: Down-regulated in Transcription
  misc_feature: MA Experiment 108576 PARAMETER Experiment Name: At_42deg_Heat_cDNA_P Parameter: Temperature (deg C) Value: 42 vs. 22
  misc_feature: MA Experiment 108576 PARAMETER Experiment Name: At_42deg_Heat_cDNA_P Parameter: Timepoint (hr) Value: 1
  misc_feature: MA Experiment 108576 PARAMETER Experiment Name: At_42deg_Heat_cDNA_P Parameter: Tissue Value: Aerial
  misc_feature: MA Experiment ID: 108577 Result: Down-regulated in Transcription
  misc_feature: MA Experiment 108577 PARAMETER Experiment Name: At_42deg_Heat_cDNA_P Parameter: Temperature (deg C) Value: 42 vs. 22
  misc_feature: MA Experiment 108577 PARAMETER Experiment Name: At_42deg_Heat_cDNA_P Parameter: Timepoint (hr) Value: 6
  misc_feature: MA Experiment 108577 PARAMETER Experiment Name: At_42deg_Heat_cDNA_P Parameter: Tissue Value: Aerial
  misc_feature: MA Experiment ID: 108595 Result: Down-regulated in Transcription
  misc_feature: MA Experiment 108595 PARAMETER Experiment Name: At_Ler-pi_Ovule_cDNA_P Parameter: Plant Line Value: null
  misc_feature: MA Experiment ID: 108605 Result: Up-regulated in Transcription
  misc_feature: MA Experiment 108605 PARAMETER Experiment Name: At_100uM_ABA_cDNA_P Parameter: Timepoint (hr) Value: 6
  misc_feature: MA Experiment 108605 PARAMETER Experiment Name: At_100uM_ABA_cDNA_P Parameter: Tissue Value: Aerial
  misc_feature: MA Experiment 108605 PARAMETER Experiment Name: At_100uM_ABA_cDNA_P Parameter: Treatment Value: 100uM ABA vs. No Treatment
  misc_feature: MA Experiment ID: 108607 Result: Up-regulated in Transcription
  misc_feature: MA Experiment 108607 PARAMETER Experiment Name: At_100uM_ABA_cDNA_P Parameter: Timepoint (hr) Value: 4
  misc_feature: MA Experiment 108607 PARAMETER Experiment Name: At_100uM_ABA_cDNA_P Parameter: Tissue Value: Aerial
  misc_feature: MA Experiment 108607 PARAMETER Experiment Name: At_100uM_ABA_cDNA_P Parameter: Treatment Value: 100uM ABA vs. No Treatment
  misc_feature: MA Experiment ID: 20000093 Result: Down-regulated in Transcription
  misc_feature: MA Experiment 20000093 PARAMETER Experiment Name: At_42deg_Heat_cDNA_P Parameter: Temperature (deg C) Value: 42 vs. 22
  misc_feature: MA Experiment 20000093 PARAMETER Experiment Name: At_42deg_Heat_cDNA_P Parameter: Timepoint (hr) Value: 0.5
  misc_feature: MA Experiment 20000093 PARAMETER Experiment Name: At_42deg_Heat_cDNA_P Parameter: Tissue Value: Aerial
  misc_feature: MA Experiment ID: 20000111 Result: Down-regulated in Transcription
  misc_feature: MA Experiment 20000111 PARAMETER Experiment Name: At_42deg_Heat_cDNA_P Parameter: Temperature (deg C) Value: 42 vs. 22
  misc_feature: MA Experiment 20000111 PARAMETER Experiment Name: At_42deg_Heat_cDNA_P Parameter: Timepoint (hr) Value: 6
  misc_feature: MA Experiment 20000111 PARAMETER Experiment Name: At_42deg_Heat_cDNA_P Parameter: Tissue Value: Aerial
  misc_feature: MA Experiment ID: 20000112 Result: Down-regulated in Transcription
  misc_feature: MA Experiment 20000112 PARAMETER Experiment Name: At_42deg_Heat_cDNA_P Parameter: Temperature (deg C) Value: 42 vs. 22
  misc_feature: MA Experiment 20000112 PARAMETER Experiment Name: At_42deg_Heat_cDNA_P Parameter: Timepoint (hr) Value: 2
  misc_feature: MA Experiment 20000112 PARAMETER Experiment Name: At_42deg_Heat_cDNA_P Parameter: Tissue Value: Aerial
  misc_feature: MA Experiment ID: 20000113 Result: Down-regulated in Transcription
  misc_feature: MA Experiment 20000113 PARAMETER Experiment Name: At_42deg_Heat_cDNA_P Parameter: Temperature (deg C) Value: 42 vs. 22
  misc_feature: MA Experiment 20000113 PARAMETER Experiment Name: At_42deg_Heat_cDNA_P Parameter: Timepoint (hr) Value: 8
  misc_feature: MA Experiment 20000113 PARAMETER Experiment Name: At_42deg_Heat_cDNA_P Parameter: Tissue Value: Aerial
  misc_feature: MA Experiment ID: 20000144 Result: Down-regulated in Transcription
  misc_feature: MA Experiment 20000144 PARAMETER Experiment Name: At_42deg_Heat_cDNA_P Parameter: Temperature (deg C) Value: 42 vs. 22
  misc_feature: MA Experiment 20000144 PARAMETER Experiment Name: At_42deg_Heat_cDNA_P Parameter: Timepoint (hr) Value: 1
  misc_feature: MA Experiment 20000144 PARAMETER Experiment Name: At_42deg_Heat_cDNA_P Parameter: Tissue Value: Aerial
  misc_feature: MA Experiment ID: 20000180 Result: Up-regulated in Transcription
  misc_feature: MA Experiment 20000180 PARAMETER Experiment Name: At_Germinating_Seeds_P Parameter: Age (hr) Value: 24 vs. 0
  misc_feature: MA Experiment 20000180 PARAMETER Experiment Name: At_Germinating_Seeds_P Parameter: Tissue Value: Germinating Seeds
  misc_feature: MA Experiment ID: 20000185 Result: Down-regulated in Transcription
  misc_feature: MA Experiment 20000185 PARAMETER Experiment Name: At_Roots__P Parameter: Age (day) Value: 7 vs. 21
  misc_feature: MA Experiment 20000185 PARAMETER Experiment Name: At_Roots__P Parameter: Organism Value: A. thaliana
  misc_feature: MA Experiment 20000185 PARAMETER Experiment Name: At_Roots__P Parameter: Tissue Value: Roots vs. Whole Plant
  misc_feature: MA Experiment ID: 20000267 Result: Up-regulated in Transcription
  misc_feature: MA Experiment 20000267 PARAMETER Experiment Name: At_Drought_P Parameter: Age (day) Value: 7
  misc_feature: MA Experiment 20000267 PARAMETER Experiment Name: At_Drought_P Parameter: Organism Value: A. thaliana
  misc_feature: MA Experiment 20000267 PARAMETER Experiment Name: At_Drought_P Parameter: Plant Line Value: WS
  misc_feature: MA Experiment 20000267 PARAMETER Experiment Name: At_Drought_P Parameter: Timepoint (hr) Value: 6
  misc_feature: MA Experiment 20000267 PARAMETER Experiment Name: At_Drought_P Parameter: Tissue Value: Whole Plant
  misc_feature: MA Experiment 20000267 PARAMETER Experiment Name: At_Drought_P Parameter: Treatment Value: Drought vs. No Drought
  misc_feature: MA Experiment ID: 20000286 Result: Up-regulated in Transcription
  misc_feature: MA Experiment 20000286 PARAMETER Experiment Name: At_Open_Flower_P Parameter: Age (day) Value: 21
  misc_feature: MA Experiment 20000286 PARAMETER Experiment Name: At_Open_Flower_P Parameter: Plant Line Value: WS
  misc_feature: MA Experiment 20000286 PARAMETER Experiment Name: At_Open_Flower_P Parameter: Tissue Value: Half Open vs. Whole Plant
  misc_feature: MA Experiment ID: 20000436 Result: Up-regulated in Transcription
  misc_feature: MA Experiment 20000436 PARAMETER Experiment Name: At_Drought_P Parameter: Age (day) Value: 7
  misc_feature: MA Experiment 20000436 PARAMETER Experiment Name: At_Drought_P Parameter: Organism Value: A. thaliana
  misc_feature: MA Experiment 20000436 PARAMETER Experiment Name: At_Drought_P Parameter: Plant Line Value: WS
  misc_feature: MA Experiment 20000436 PARAMETER Experiment Name: At_Drought_P Parameter: Timepoint (hr) Value: 12
  misc_feature: MA Experiment 20000436 PARAMETER Experiment Name: At_Drought_P Parameter: Tissue Value: Whole Plant
  misc_feature: MA Experiment 20000436 PARAMETER Experiment Name: At_Drought_P Parameter: Treatment Value: Drought vs. No Drought
  misc_feature: MA Experiment ID: 20000794 Result: Down-regulated in Transcription
  misc_feature: MA Experiment 20000794 PARAMETER Experiment Name: At_Petals_P Parameter: Age (day) Value: 23-25 days
  misc_feature: MA Experiment 20000794 PARAMETER Experiment Name: At_Petals_P Parameter: Plant Line Value: WS
  misc_feature: MA Experiment 20000794 PARAMETER Experiment Name: At_Petals_P Parameter: Tissue Value: Petals vs. Whole plant
  misc_feature: MA Experiment ID: 20001248 Result: Down-regulated in Transcription
  misc_feature: MA Experiment 20001248 PARAMETER Experiment Name: At_Far-red-induction_P Parameter: Age (day) Value: 7
  misc_feature: MA Experiment 20001248 PARAMETER Experiment Name: At_Far-red-induction_P Parameter: Light Value: Far-red vs. White
  misc_feature: MA Experiment 20001248 PARAMETER Experiment Name: At_Far-red-induction_P Parameter: Organism Value: A. thaliana
  misc_feature: MA Experiment 20001248 PARAMETER Experiment Name: At_Far-red-induction_P Parameter: Plant Line Value: Columbia
  misc_feature: MA Experiment 20001248 PARAMETER Experiment Name: At_Far-red-induction_P Parameter: Timepoint (hr) Value: 4
  misc_feature: MA Experiment 20001248 PARAMETER Experiment Name: At_Far-red-induction_P Parameter: Tissue Value: Whole Plant
  misc_feature: MA Experiment ID: 20001554 Result: Up-regulated in Transcription
  misc_feature: MA Experiment 20001554 PARAMETER Experiment Name: At_Drought_Soil_Dry_P Parameter: Age (day) Value: 21
  misc_feature: MA Experiment 20001554 PARAMETER Experiment Name: At_Drought_Soil_Dry_P Parameter: Organism Value: A. thaliana
  misc_feature: MA Experiment 20001554 PARAMETER Experiment Name: At_Drought_Soil_Dry_P Parameter: Plant Line Value: WS
  misc_feature: MA Experiment 20001554 PARAMETER Experiment Name: At_Drought_Soil_Dry_P Parameter: Post Timepoint (hr) Value: None
  misc_feature: MA Experiment 20001554 PARAMETER Experiment Name: At_Drought_Soil_Dry_P Parameter: Post-Treatment Value: None
  misc_feature: MA Experiment 20001554 PARAMETER Experiment Name: At_Drought_Soil_Dry_P Parameter: Timepoint (day) Value: 7
  misc_feature: MA Experiment 20001554 PARAMETER Experiment Name: At_Drought_Soil_Dry_P Parameter: Treatment Value: Drought vs. No Drought
  misc_feature: MA Experiment ID: 20001911 Result: Down-regulated in Transcription
  misc_feature: MA Experiment 20001911 PARAMETER Experiment Name: At_Drought_Reproduction_P Parameter: Age (day) Value: 40
  misc_feature: MA Experiment 20001911 PARAMETER Experiment Name: At_Drought_Reproduction_P Parameter: Organism Value: A. thaliana
  misc_feature: MA Experiment 20001911 PARAMETER Experiment Name: At_Drought_Reproduction_P Parameter: Plant Line Value: WS
  misc_feature: MA Experiment 20001911 PARAMETER Experiment Name: At_Drought_Reproduction_P Parameter: Timepoint (day) Value: 10
  misc_feature: MA Experiment 20001911 PARAMETER Experiment Name: At_Drought_Reproduction_P Parameter: Tissue Value: Flowers
  misc_feature: MA Experiment 20001911 PARAMETER Experiment Name: At_Drought_Reproduction_P Parameter: Treatment Value: Drought vs. No Drought
aatggaatcacactatcacaatcataaccacaaaaacaaacactatgggacacctcaaaagtctcttcactattcttttcctaatagctatgtcgtcaaccgtaacatttgccggtaaaatacccgcgatcatcgtgtttggcgactcttccgttgatgccgggaacaacaactatatcccaactgttgctagaagcaactttgagccatatggacgggactttgttggtggaaagccgaccggacggttttgtaacggaaagattgcgacggattttatgtccgaagccttagggcttaaaccaatcattccggcatacttggatccttcttataacatttcagactttgcaacaggtgttacctttgcttctgctgccactggctatgacaacgccacttctgatgttctgtcggtactacctctatggaaacaacttgaatactacaaagaataccaaacaaaacttaaagcataccaaggaaaagacagagccacagagactatagaaagctctctctacctcataagcatagggaccaacgatttcctcgagaattactttgtctttccgggccgttcttcgcaatattccgtcagtctttaccaagattttctagccggaatcgcgaaagaatttgtgaagaagttgcatggacttggtgctagaaagatctcactaggtgggttacctccaatgggatgcatgcctttagagagagccaccaacattggcactggaggtgagtgcgtaggacggtacaacgacatagccgtccagttcaacagcaagcttgataagatggttgagaagctgaacaaagagcttcctggttccaacctcgttttctcaaatccatatgagccatttatgcggatcatcaagaacccttcctcctttgggttcgaggtggtgggagcggcatgctgcgcgacagggatgttcgagatgggatatggttgtcaaaggaataacccatttacatgtacaaacgcagacaagtatgtgttttgggactcatttcacccaacacagaagactaatcacatcatggccaatgctctcatgaacagcacattccctcacttcctctaaatgatttttatgtttgtgtgtggaaactaaatagatataagagtaatattattattagggattgcttttgatatgcactctgtatgtatttatatttaagtagattttgctcttgtgttagttagcgaaacctacgtttcttttctagattatggtgtgcctatttatgtagcttattttatcctctttagttattctcaatatatcc

SEQ ID NO: 25074 - protein, 364 aa, Arabidopsis thaliana
  peptide (1)..(364): Ceres Seq. ID no. 12357655
  misc_feature (43)..(355): Pfam Name: GDSL-like Lipase/Acylhydrolase Pfam Description: GDSL-like Lipase/Acylhydrolase
  misc_feature (39)..(356): Homolog of NCBI NO: 37534726 NR Description: putative anter-specific proline-rich protein
  misc_feature (15)..(360): Homolog of NCBI NO: 15228189 NR Description: putative APG protein
  misc_feature (21)..(356): Homolog of NCBI NO: 10638955 NR Description: putative proline-rich protein APG isolog [Cicer
  misc_feature (21)..(364): Homolog of NCBI NO: 26449364 NR Description: putative family II lipase EXL3 [Arabidopsis
  misc_feature (21)..(364): Homolog of NCBI NO: 15222901 NR Description: family II extracellular lipase 3 (EXL3)
  misc_feature (62)..(353): Homolog of NCBI NO: 15224201 NR Description: putative APG isolog protein; protein id:
  misc_feature (39)..(363): Homolog of NCBI NO: 7485330 NR Description: hypothetical protein F10M23.130 - Arabidopsis
  misc_feature (39)..(363): Homolog of NCBI NO: 18416824 NR Description: putative APG protein
  misc_feature (15)..(364): Homolog of NCBI NO: 15228157 NR Description: putative GDSL-motif lipase/hydrolase
  misc_feature (15)..(364): Homolog of NCBI NO: 21593518 NR Description: putative GDSL-motif lipase/hydrolase [Arabidopsis
WNHTITIITTKTNTMGHLKSLFTILFLIAMSSTVTFAGKIPAIIVFGDSSVDAGNNNYIPTVARSNFEPYGRDFVGGKPTGRFCNGKIATDFMSEALGLKPIIPAYLDPSYNISDFATGVTFASAATGYDNATSDVLSVLPLWKQLEYYKEYQTKLKAYQGKDRATETIESSLYLISIGTNDFLENYFVFPGRSSQYSVSLYQDFLAGIAKEFVKKLHGLGARKISLGGLPPMGCMPLERATNIGTGGECVGRYNDIAVQFNSKLDKMVEKLNKELPGSNLVFSNPYEPFMRIIKNPSSFGFEVVGAACCATGMFEMGYGCQRNNPFTCTNADKYVFWDSFHPTQKTNHIMANALMNSTFPHFL

SEQ ID NO: 25075 - protein, 350 aa, Arabidopsis thaliana
  peptide (1)..(350): Ceres Seq. ID no. 12357656
  misc_feature (29)..(341): Pfam Name: GDSL-like Lipase/Acylhydrolase Pfam Description: GDSL-like Lipase/Acylhydrolase
  misc_feature (25)..(342): Homolog of NCBI NO: 37534726 NR Description: putative anter-specific proline-rich protein
  misc_feature (1)..(346): Homolog of NCBI NO: 15228189 NR Description: putative APG protein
  misc_feature (7)..(342): Homolog of NCBI NO: 10638955 NR Description: putative proline-rich protein APG isolog [Cicer
  misc_feature (7)..(350): Homolog of NCBI NO: 26449364 NR Description: putative family II lipase EXL3 [Arabidopsis
  misc_feature (7)..(350): Homolog of NCBI NO: 15222901 NR Description: family II extracellular lipase 3 (EXL3)
  misc_feature (48)..(339): Homolog of NCBI NO: 15224201 NR Description: putative APG isolog protein; protein id:
  misc_feature (25)..(349): Homolog of NCBI NO: 7485330 NR Description: hypothetical protein F10M23.130 - Arabidopsis
  misc_feature (25)..(349): Homolog of NCBI NO: 18416824 NR Description: putative APG protein
  misc_feature (1)..(350): Homolog of NCBI NO: 15228157 NR Description: putative GDSL-motif lipase/hydrolase
  misc_feature (1)..(350): Homolog of NCBI NO: 21593518 NR Description: putative GDSL-motif lipase/hydrolase [Arabidopsis
MGHLKSLFTILFLIAMSSTVTFAGKIPAIIVFGDSSVDAGNNNYIPTVARSNFEPYGRDFVGGKPTGRFCNGKIATDFMSEALGLKPIIPAYLDPSYNISDFATGVTFASAATGYDNATSDVLSVLPLWKQLEYYKEYQTKLKAYQGKDRATETIESSLYLISIGTNDFLENYFVFPGRSSQYSVSLYQDFLAGIAKEFVKKLHGLGARKISLGGLPPMGCMPLERATNIGTGGECVGRYNDIAVQFNSKLDKMVEKLNKELPGSNLVFSNPYEPFMRIIKNPSSFGFEVVGAACCATGMFEMGYGCQRNNPFTCTNADKYVFWDSFHPTQKTNHIMANALMNSTFPHFL

SEQ ID NO: 25076 - protein, 335 aa, Arabidopsis thaliana
  peptide (1)..(335): Ceres Seq. ID no. 12357657
  misc_feature (14)..(326): Pfam Name: GDSL-like Lipase/Acylhydrolase Pfam Description: GDSL-like Lipase/Acylhydrolase
  misc_feature (10)..(327): Homolog of NCBI NO: 37534726 NR Description: putative anter-specific proline-rich protein
  misc_feature (1)..(331): Homolog of NCBI NO: 15228189 NR Description: putative APG protein
  misc_feature (1)..(327): Homolog of NCBI NO: 10638955 NR Description: putative proline-rich protein APG isolog [Cicer
  misc_feature (1)..(335): Homolog of NCBI NO: 26449364 NR Description: putative family II lipase EXL3 [Arabidopsis
  misc_feature (1)..(335): Homolog of NCBI NO: 15222901 NR Description: family II extracellular lipase 3 (EXL3)
  misc_feature (33)..(324): Homolog of NCBI NO: 15224201 NR Description: putative APG isolog protein; protein id:
  misc_feature (10)..(334): Homolog of NCBI NO: 7485330 NR Description: hypothetical protein F10M23.130 - Arabidopsis
  misc_feature (10)..(334): Homolog of NCBI NO: 18416824 NR Description: putative APG protein
  misc_feature (1)..(335): Homolog of NCBI NO: 15228157 NR Description: putative GDSL-motif lipase/hydrolase
  misc_feature (1)..(335): Homolog of NCBI NO: 21593518 NR Description: putative GDSL-motif lipase/hydrolase [Arabidopsis
MSSTVTFAGKIPAIIVFGDSSVDAGNNNYIPTVARSNFEPYGRDFVGGKPTGRFCNGKIATDFMSEALGLKPIIPAYLDPSYNISDFATGVTFASAATGYDNATSDVLSVLPLWKQLEYYKEYQTKLKAYQGKDRATETIESSLYLISIGTNDFLENYFVFPGRSSQYSVSLYQDFLAGIAKEFVKKLHGLGARKISLGGLPPMGCMPLERATNIGTGGECVGRYNDIAVQFNSKLDKMVEKLNKELPGSNLVFSNPYEPFMRIIKNPSSFGFEVVGAACCATGMFEMGYGCQRNNPFTCTNADKYVFWDSFHPTQKTNHIMANALMNSTFPHFL

SEQ ID NO: 25077 - DNA, 1041 bp, Arabidopsis thaliana
  misc_feature (1)..(1041): Ceres Seq. ID no. 13500158
  misc_feature: MA Experiment ID: 108461 Result: Up-regulated in Transcription
  misc_feature: MA Experiment 108461 PARAMETER Experiment Name: At_Germinating_Seeds_cDNA_P Parameter: Age (day) Value: 1 vs. 0
  misc_feature: MA Experiment 108461 PARAMETER Experiment Name: At_Germinating_Seeds_cDNA_P Parameter: Tissue Value: Germinating Seeds
  misc_feature: MA Experiment ID: 108462 Result: Up-regulated in Transcription
  misc_feature: MA Experiment 108462 PARAMETER Experiment Name: At_Germinating_Seeds_cDNA_P Parameter: Age (day) Value: 2 vs. 0
  misc_feature: MA Experiment 108462 PARAMETER Experiment Name: At_Germinating_Seeds_cDNA_P Parameter: Tissue Value: Germinating Seeds
  misc_feature: MA Experiment ID: 108463 Result: Up-regulated in Transcription
  misc_feature: MA Experiment 108463 PARAMETER Experiment Name: At_Germinating_Seeds_cDNA_P Parameter: Age (day) Value: 3 vs. 0
  misc_feature: MA Experiment 108463 PARAMETER Experiment Name: At_Germinating_Seeds_cDNA_P Parameter: Tissue Value: Germinating Seeds
  misc_feature: MA Experiment ID: 108464 Result: Up-regulated in Transcription
  misc_feature: MA Experiment 108464 PARAMETER Experiment Name: At_Germinating_Seeds_cDNA_P Parameter: Age (day) Value: 4 vs. 0
  misc_feature: MA Experiment 108464 PARAMETER Experiment Name: At_Germinating_Seeds_cDNA_P Parameter: Tissue Value: Germinating Seeds
  misc_feature: MA Experiment ID: 108473 Result: Down-regulated in Transcription
  misc_feature: MA Experiment 108473 PARAMETER Experiment Name: At_Drought_Flowers_cDNA_P Parameter: Timepoint (hr) Value: 7 d
  misc_feature: MA Experiment 108473 PARAMETER Experiment Name: At_Drought_Flowers_cDNA_P Parameter: Tissue Value: Flower
  misc_feature: MA Experiment 108473 PARAMETER Experiment Name: At_Drought_Flowers_cDNA_P Parameter: Treatment Value: Drought vs. No Drought
  misc_feature: MA Experiment ID: 108561 Result: Down-regulated in Transcription
  misc_feature: MA Experiment 108561 PARAMETER Experiment Name: At_100uM_ABA_cDNA_P Parameter: Timepoint (hr) Value: 6
  misc_feature: MA Experiment 108561 PARAMETER Experiment Name: At_100uM_ABA_cDNA_P Parameter: Tissue Value: Aerial
  misc_feature: MA Experiment 108561 PARAMETER Experiment Name: At_100uM_ABA_cDNA_P Parameter: Treatment Value: 100uM ABA vs. No Treatment
  misc_feature: MA Experiment ID: 108572 Result: Down-regulated in Transcription
  misc_feature: MA Experiment 108572 PARAMETER Experiment Name: At_Drought_cDNA_P Parameter: Timepoint (hr) Value: 1
  misc_feature: MA Experiment 108572 PARAMETER Experiment Name: At_Drought_cDNA_P Parameter: Tissue Value: Aerial
  misc_feature: MA Experiment 108572 PARAMETER Experiment Name: At_Drought_cDNA_P Parameter: Treatment Value: Drought vs. No Drought
  misc_feature: MA Experiment ID: 108576 Result: Down-regulated in Transcription
  misc_feature: MA Experiment 108576 PARAMETER Experiment Name: At_42deg_Heat_cDNA_P Parameter: Temperature (deg C) Value: 42 vs. 22
  misc_feature: MA Experiment 108576 PARAMETER Experiment Name: At_42deg_Heat_cDNA_P Parameter: Timepoint (hr) Value: 1
  misc_feature: MA Experiment 108576 PARAMETER Experiment Name: At_42deg_Heat_cDNA_P Parameter: Tissue Value: Aerial
  misc_feature: MA Experiment ID: 108595 Result: Down-regulated in Transcription
  misc_feature: MA Experiment 108595 PARAMETER Experiment Name: At_Ler-pi_Ovule_cDNA_P Parameter: Plant Line Value: null
  misc_feature: MA Experiment ID: 108607 Result: Down-regulated in Transcription
  misc_feature: MA Experiment 108607 PARAMETER Experiment Name: At_100uM_ABA_cDNA_P Parameter: Timepoint (hr) Value: 4
  misc_feature: MA Experiment 108607 PARAMETER Experiment Name: At_100uM_ABA_cDNA_P Parameter: Tissue Value: Aerial
  misc_feature: MA Experiment 108607 PARAMETER Experiment Name: At_100uM_ABA_cDNA_P Parameter: Treatment Value: 100uM ABA vs. No Treatment
  misc_feature: MA Experiment ID: 108608 Result: Down-regulated in Transcription
  misc_feature: MA Experiment 108608 PARAMETER Experiment Name: At_100uM_ABA_cDNA_P Parameter: Timepoint (hr) Value: 1
  misc_feature: MA Experiment 108608 PARAMETER Experiment Name: At_100uM_ABA_cDNA_P Parameter: Tissue Value: Aerial
  misc_feature: MA Experiment 108608 PARAMETER Experiment Name: At_100uM_ABA_cDNA_P Parameter: Treatment Value: 100uM ABA vs. No Treatment
  misc_feature: MA Experiment ID: 108668 Result: Down-regulated in Transcription
  misc_feature: MA Experiment 108668 PARAMETER Experiment Name: At_2mM_SA_cDNA_P Parameter: Plant Line Value: WS
  misc_feature: MA Experiment 108668 PARAMETER Experiment Name: At_2mM_SA_cDNA_P Parameter: Timepoint (hr) Value: 6
  misc_feature: MA Experiment 108668 PARAMETER Experiment Name: At_2mM_SA_cDNA_P Parameter: Treatment Value: 2mM SA vs. No Treatment
  misc_feature: MA Experiment ID: 20000069 Result: Down-regulated in Transcription
  misc_feature: MA Experiment 20000069 PARAMETER Experiment Name: At_100uM_ABA_Mutants_cDNA_P Parameter: Plant Line Value: CS23
  misc_feature: MA Experiment 20000069 PARAMETER Experiment Name: At_100uM_ABA_Mutants_cDNA_P Parameter: Timepoint (hr) Value: 6
  misc_feature: MA Experiment 20000069 PARAMETER Experiment Name: At_100uM_ABA_Mutants_cDNA_P Parameter: Tissue Value: Aerial
  misc_feature: MA Experiment 20000069 PARAMETER Experiment Name: At_100uM_ABA_Mutants_cDNA_P Parameter: Treatment Value: 100uM ABA vs. No Treatment
  misc_feature: MA Experiment ID: 20000070 Result: Down-regulated in Transcription
  misc_feature: MA Experiment 20000070 PARAMETER Experiment Name: At_100uM_ABA_Mutants_cDNA_P Parameter: Plant Line Value: CS24
  misc_feature: MA Experiment 20000070 PARAMETER Experiment Name: At_100uM_ABA_Mutants_cDNA_P Parameter: Timepoint (hr) Value: 6
  misc_feature: MA Experiment 20000070 PARAMETER Experiment Name: At_100uM_ABA_Mutants_cDNA_P Parameter: Tissue Value: Aerial
  misc_feature: MA Experiment 20000070 PARAMETER Experiment Name: At_100uM_ABA_Mutants_cDNA_P Parameter: Treatment Value: 100uM ABA vs. No Treatment
  misc_feature: MA Experiment ID: 20000071 Result: Down-regulated in Transcription
  misc_feature: MA Experiment 20000071 PARAMETER Experiment Name: At_100uM_ABA_Mutants_cDNA_P Parameter: Plant Line Value: CS8104
  misc_feature: MA Experiment 20000071 PARAMETER Experiment Name: At_100uM_ABA_Mutants_cDNA_P Parameter: Timepoint (hr) Value: 6
  misc_feature: MA Experiment 20000071 PARAMETER Experiment Name: At_100uM_ABA_Mutants_cDNA_P Parameter: Tissue Value: Aerial
  misc_feature: MA Experiment 20000071 PARAMETER Experiment Name: At_100uM_ABA_Mutants_cDNA_P Parameter: Treatment Value: 100uM ABA vs. No Treatment
  misc_feature: MA Experiment ID: 20000072 Result: Down-regulated in Transcription
  misc_feature: MA Experiment 20000072 PARAMETER Experiment Name: At_100uM_ABA_Mutants_cDNA_P Parameter: Plant Line Value: CS8105
  misc_feature: MA Experiment 20000072 PARAMETER Experiment Name: At_100uM_ABA_Mutants_cDNA_P Parameter: Timepoint (hr) Value: 6
  misc_feature: MA Experiment 20000072 PARAMETER Experiment Name: At_100uM_ABA_Mutants_cDNA_P Parameter: Tissue Value: Aerial
  misc_feature: MA Experiment 20000072 PARAMETER Experiment Name: At_100uM_ABA_Mutants_cDNA_P Parameter: Treatment Value: 100uM ABA vs. No Treatment
  misc_feature: MA Experiment ID: 20000086 Result: Down-regulated in Transcription
  misc_feature: MA Experiment 20000086 PARAMETER Experiment Name: At_100uM_ABA_Mutants_cDNA_P Parameter: Plant Line Value: CS22
  misc_feature: MA Experiment 20000086 PARAMETER Experiment Name: At_100uM_ABA_Mutants_cDNA_P Parameter: Timepoint (hr) Value: 6
  misc_feature: MA Experiment 20000086 PARAMETER Experiment Name: At_100uM_ABA_Mutants_cDNA_P Parameter: Tissue Value: Aerial
  misc_feature: MA Experiment 20000086 PARAMETER Experiment Name: At_100uM_ABA_Mutants_cDNA_P Parameter: Treatment Value: 100uM ABA vs. No Treatment
  misc_feature: MA Experiment ID: 20000087 Result: Down-regulated in Transcription
  misc_feature: MA Experiment 20000087 PARAMETER Experiment Name: At_100uM_ABA_Mutants_cDNA_P Parameter: Plant Line Value: WS
  misc_feature: MA Experiment 20000087 PARAMETER Experiment Name: At_100uM_ABA_Mutants_cDNA_P Parameter: Timepoint (hr) Value: 6
  misc_feature: MA Experiment 20000087 PARAMETER Experiment Name: At_100uM_ABA_Mutants_cDNA_P Parameter: Tissue Value: Aerial
  misc_feature: MA Experiment 20000087 PARAMETER Experiment Name: At_100uM_ABA_Mutants_cDNA_P Parameter: Treatment Value: 100uM ABA vs. No Treatment
  misc_feature: MA Experiment ID: 20000088 Result: Down-regulated in Transcription
  misc_feature: MA Experiment 20000088 PARAMETER Experiment Name: At_100uM_ABA_Mutants_cDNA_P Parameter: Plant Line Value: Landsberg
  misc_feature: MA Experiment 20000088 PARAMETER Experiment Name: At_100uM_ABA_Mutants_cDNA_P Parameter: Timepoint (hr) Value: 6
  misc_feature: MA Experiment 20000088 PARAMETER Experiment Name: At_100uM_ABA_Mutants_cDNA_P Parameter: Tissue Value: Aerial
  misc_feature: MA Experiment 20000088 PARAMETER Experiment Name: At_100uM_ABA_Mutants_cDNA_P Parameter: Treatment Value: 100uM ABA vs. No Treatment
  misc_feature: MA Experiment ID: 20000090 Result: Down-regulated in Transcription
  misc_feature: MA Experiment ID: 20000112 Result: Down-regulated in Transcription
  misc_feature: MA Experiment 20000112 PARAMETER Experiment Name: At_42deg_Heat_cDNA_P Parameter: Temperature (deg C) Value: 42 vs. 22
  misc_feature: MA Experiment 20000112 PARAMETER Experiment Name: At_42deg_Heat_cDNA_P Parameter: Timepoint (hr) Value: 2
  misc_feature: MA Experiment 20000112 PARAMETER Experiment Name: At_42deg_Heat_cDNA_P Parameter: Tissue Value: Aerial
  misc_feature: MA Experiment ID: 20000117 Result: Down-regulated in Transcription
  misc_feature: MA Experiment 20000117 PARAMETER Experiment Name: At_100uM_ABA_Mutants_cDNA_P Parameter: Plant Line Value: Columbia
  misc_feature: MA Experiment 20000117 PARAMETER Experiment Name: At_100uM_ABA_Mutants_cDNA_P Parameter: Timepoint (hr) Value: 6
  misc_feature: MA Experiment 20000117 PARAMETER Experiment Name: At_100uM_ABA_Mutants_cDNA_P Parameter: Tissue Value: Aerial
  misc_feature: MA Experiment 20000117 PARAMETER Experiment Name: At_100uM_ABA_Mutants_cDNA_P Parameter: Treatment Value: 100uM ABA vs. No Treatment
  misc_feature: MA Experiment ID: 20000144 Result: Down-regulated in Transcription
  misc_feature: MA Experiment 20000144 PARAMETER Experiment Name: At_42deg_Heat_cDNA_P Parameter: Temperature (deg C) Value: 42 vs. 22
  misc_feature: MA Experiment 20000144 PARAMETER Experiment Name: At_42deg_Heat_cDNA_P Parameter: Timepoint (hr) Value: 1
  misc_feature: MA Experiment 20000144 PARAMETER Experiment Name: At_42deg_Heat_cDNA_P Parameter: Tissue Value: Aerial
  misc_feature: MA Experiment ID: 20000166 Result: Down-regulated in Transcription
  misc_feature: MA Experiment 20000166 PARAMETER Experiment Name: At_100uM_ABA_P Parameter: Age (day) Value: 14
  misc_feature: MA Experiment 20000166 PARAMETER Experiment Name: At_100uM_ABA_P Parameter: Organism Value: A. thaliana
  misc_feature: MA Experiment 20000166 PARAMETER Experiment Name: At_100uM_ABA_P Parameter: Plant Line Value: WS
  misc_feature: MA Experiment 20000166 PARAMETER Experiment Name: At_100uM_ABA_P Parameter: Timepoint (hr) Value: 1
  misc_feature: MA Experiment 20000166 PARAMETER Experiment Name: At_100uM_ABA_P Parameter: Tissue Value: Aerial
  misc_feature: MA Experiment 20000166 PARAMETER Experiment Name: At_100uM_ABA_P Parameter: Treatment Value: 100uM ABA vs. No Treatment
  misc_feature: MA Experiment ID: 20000179 Result: Up-regulated in Transcription
  misc_feature: MA Experiment 20000179 PARAMETER Experiment Name: At_Germinating_Seeds_P Parameter: Age (hr) Value: 6 vs. 0
  misc_feature: MA Experiment 20000179 PARAMETER Experiment Name: At_Germinating_Seeds_P Parameter: Tissue Value: Germinating Seeds
  misc_feature: MA Experiment ID: 20000180 Result: Up-regulated in Transcription
  misc_feature: MA Experiment 20000180 PARAMETER Experiment Name: At_Germinating_Seeds_P Parameter: Age (hr) Value: 24 vs. 0
  misc_feature: MA Experiment 20000180 PARAMETER Experiment Name: At_Germinating_Seeds_P Parameter: Tissue Value: Germinating Seeds
  misc_feature: MA Experiment ID: 20000182 Result: Down-regulated in Transcription
  misc_feature: MA Experiment 20000182 PARAMETER Experiment Name: At_2mM_SA_P Parameter: Age (day) Value: 14
  misc_feature: MA Experiment 20000182 PARAMETER Experiment Name: At_2mM_SA_P Parameter: Organism Value: A. thaliana
  misc_feature: MA Experiment 20000182 PARAMETER Experiment Name: At_2mM_SA_P Parameter: Plant Line Value: WS
  misc_feature: MA Experiment 20000182 PARAMETER Experiment Name: At_2mM_SA_P Parameter: Timepoint (hr) Value: 6
  misc_feature: MA Experiment 20000182 PARAMETER Experiment Name: At_2mM_SA_P Parameter: Tissue Value: Aerial
  misc_feature: MA Experiment 20000182 PARAMETER Experiment Name: At_2mM_SA_P Parameter: Treatment Value: 2mM SA vs. No Treatment
  misc_feature: MA Experiment ID: 20000184 Result: Up-regulated in Transcription
  misc_feature: MA Experiment 20000184 PARAMETER Experiment Name: At_Shoots__P Parameter: Age (day) Value: 7
  misc_feature: MA Experiment 20000184 PARAMETER Experiment Name: At_Shoots__P Parameter: Tissue Value: Shoots vs. Whole Plant
  misc_feature: MA Experiment ID: 20000224 Result: Down-regulated in Transcription
  misc_feature: MA Experiment ID: 20000227 Result: Up-regulated in Transcription
  misc_feature: MA Experiment 20000227 PARAMETER Experiment Name: At_Root-Tips-vs-Tops_P Parameter: Tissue Value: Root Tips vs. Root Tops
  misc_feature: MA Experiment ID: 20000234 Result: Down-regulated in Transcription
  misc_feature: MA Experiment 20000234 PARAMETER Experiment Name: At_Siliques_P Parameter: Age (day) Value: 21
  misc_feature: MA Experiment 20000234 PARAMETER Experiment Name: At_Siliques_P Parameter: Organism Value: A. thaliana
  misc_feature: MA Experiment 20000234 PARAMETER Experiment Name: At_Siliques_P Parameter: Plant Line Value: WS
  misc_feature: MA Experiment 20000234 PARAMETER Experiment Name: At_Siliques_P Parameter: Tissue Value: Less Than 5mm Siliques vs. Whole Plant
  misc_feature: MA Experiment ID: 20000264 Result: Down-regulated in Transcription
  misc_feature: MA Experiment 20000264 PARAMETER Experiment Name: At_Open_Flower_P Parameter: Age (day) Value: 21
  misc_feature: MA Experiment 20000264 PARAMETER Experiment Name: At_Open_Flower_P Parameter: Plant Line Value: WS
  misc_feature: MA Experiment 20000264 PARAMETER Experiment Name: At_Open_Flower_P Parameter: Tissue Value: Open Flower vs. Whole Plant
  misc_feature: MA Experiment ID: 20000265 Result: Down-regulated in Transcription
  misc_feature: MA Experiment 20000265 PARAMETER Experiment Name: At_Open_Flower_P Parameter: Age (day) Value: 21
  misc_feature: MA Experiment 20000265 PARAMETER Experiment Name: At_Open_Flower_P Parameter: Plant Line Value: WS
  misc_feature: MA Experiment 20000265 PARAMETER Experiment Name: At_Open_Flower_P Parameter: Tissue Value: Closed Flower vs. Whole Plant
  misc_feature: MA Experiment ID: 20000268 Result: Down-regulated in Transcription
  misc_feature: MA Experiment 20000268 PARAMETER Experiment Name: At_100mM_NaCl__P Parameter: Age (day) Value: 14
  misc_feature: MA Experiment 20000268 PARAMETER Experiment Name: At_100mM_NaCl__P Parameter: Organism Value: A. thaliana
  misc_feature: MA Experiment 20000268 PARAMETER Experiment Name: At_100mM_NaCl__P Parameter: Plant Line Value: WS
  misc_feature: MA Experiment 20000268 PARAMETER Experiment Name: At_100mM_NaCl__P Parameter: Timepoint (hr) Value: 6
  misc_feature: MA Experiment 20000268 PARAMETER Experiment Name: At_100mM_NaCl__P Parameter: Tissue Value: Whole Plant
  misc_feature: MA Experiment 20000268 PARAMETER Experiment Name: At_100mM_NaCl__P Parameter: Treatment Value: 100mM NaCl vs. No Treatment
  misc_feature: MA Experiment ID: 20000286 Result: Down-regulated in Transcription
  misc_feature: MA Experiment 20000286 PARAMETER Experiment Name: At_Open_Flower_P Parameter: Age (day) Value: 21
  misc_feature: MA Experiment 20000286 PARAMETER Experiment Name: At_Open_Flower_P Parameter: Plant Line Value: WS
  misc_feature: MA Experiment 20000286 PARAMETER Experiment Name: At_Open_Flower_P Parameter: Tissue Value: Half Open vs. Whole Plant
  misc_feature: MA Experiment ID: 20000308 Result: Down-regulated in Transcription
  misc_feature: MA Experiment 20000308 PARAMETER Experiment Name: At_100mM_NaCl__P Parameter: Age (day) Value: 17
  misc_feature: MA Experiment 20000308 PARAMETER Experiment Name: At_100mM_NaCl__P Parameter: Organism Value: A. thaliana
  misc_feature: MA Experiment 20000308 PARAMETER Experiment Name: At_100mM_NaCl__P Parameter: Plant Line Value: WS
  misc_feature: MA Experiment 20000308 PARAMETER Experiment Name: At_100mM_NaCl__P Parameter: Timepoint (hr) Value: 72
  misc_feature: MA Experiment 20000308 PARAMETER Experiment Name: At_100mM_NaCl__P Parameter: Tissue Value: Whole Plant
  misc_feature: MA Experiment 20000308 PARAMETER Experiment Name: At_100mM_NaCl__P Parameter: Treatment Value: 100mM NaCl vs. No Treatment
  misc_feature: MA Experiment ID: 20000437 Result: Down-regulated in Transcription
  misc_feature: MA Experiment 20000437 PARAMETER Experiment Name: At_Drought_P Parameter: Age (day) Value: 8
  misc_feature: MA Experiment 20000437 PARAMETER Experiment Name: At_Drought_P Parameter: Organism Value: A. thaliana
  misc_feature: MA Experiment 20000437 PARAMETER Experiment Name: At_Drought_P Parameter: Plant Line Value: WS
  misc_feature: MA Experiment 20000437 PARAMETER Experiment Name: At_Drought_P Parameter: Timepoint (hr) Value: 24
  misc_feature: MA Experiment 20000437 PARAMETER Experiment Name: At_Drought_P Parameter: Tissue Value: Whole Plant
  misc_feature: MA Experiment 20000437 PARAMETER Experiment Name: At_Drought_P Parameter: Treatment Value: Drought vs. No Drought
  misc_feature: MA Experiment ID: 20000441 Result: Up-regulated in Transcription
  misc_feature: MA Experiment 20000441 PARAMETER Experiment Name: At_1uM_BR-BRZ__P Parameter: Tissue Value: Shoot Apices
  misc_feature: MA Experiment 20000441 PARAMETER Experiment Name: At_1uM_BR-BRZ__P Parameter: Treatment Value: 1uM BR vs. No Treatment
  misc_feature: MA Experiment ID: 20000443 Result: Up-regulated in Transcription
  misc_feature: MA Experiment 20000443 PARAMETER Experiment Name: At_1uM_BR-BRZ__P Parameter: Tissue Value: Shoot Apices
  misc_feature: MA Experiment 20000443 PARAMETER Experiment Name: At_1uM_BR-BRZ__P Parameter: Treatment Value: 1uM BRZ vs. No Treatment
  misc_feature: MA Experiment ID: 20000452 Result: Down-regulated in Transcription
  misc_feature: MA Experiment 20000452 PARAMETER Experiment Name: At_CS6879_Shoots-Roots_P Parameter: Age (day) Value: 14
  misc_feature: MA Experiment 20000452 PARAMETER Experiment Name: At_CS6879_Shoots-Roots_P Parameter: Organism Value: A. thaliana
  misc_feature: MA Experiment 20000452 PARAMETER Experiment Name: At_CS6879_Shoots-Roots_P Parameter: Plant Line Value: CS6879 vs. WS
  misc_feature: MA Experiment 20000452 PARAMETER Experiment Name: At_CS6879_Shoots-Roots_P Parameter: Tissue Value: Shoots
  misc_feature: MA Experiment ID: 20000453 Result: Down-regulated in Transcription
  misc_feature: MA Experiment 20000453 PARAMETER Experiment Name: At_100uM_ABA_P Parameter: Age (day) Value: 15
  misc_feature: MA Experiment 20000453 PARAMETER Experiment Name: At_100uM_ABA_P Parameter: Organism Value: A. thaliana
  misc_feature: MA Experiment 20000453 PARAMETER Experiment Name: At_100uM_ABA_P Parameter: Plant Line Value: WS
  misc_feature: MA Experiment 20000453 PARAMETER Experiment Name: At_100uM_ABA_P Parameter: Timepoint (hr) Value: 24
  misc_feature: MA Experiment 20000453 PARAMETER Experiment Name: At_100uM_ABA_P Parameter: Tissue Value: Aerial
  misc_feature: MA Experiment 20000453 PARAMETER Experiment Name: At_100uM_ABA_P Parameter: Treatment Value: 100uM ABA vs. No Treatment
  misc_feature: MA Experiment ID: 20000455 Result: Down-regulated in Transcription
  misc_feature: MA Experiment 20000455 PARAMETER Experiment Name: At_100uM_ABA_P Parameter: Age (day) Value: 16
  misc_feature: MA Experiment 20000455 PARAMETER Experiment Name: At_100uM_ABA_P Parameter: Organism Value: A. thaliana
  misc_feature: MA Experiment 20000455 PARAMETER Experiment Name: At_100uM_ABA_P Parameter: Plant Line Value: WS
  misc_feature: MA Experiment 20000455 PARAMETER Experiment Name: At_100uM_ABA_P Parameter: Timepoint (hr) Value: 48
  misc_feature: MA Experiment 20000455 PARAMETER Experiment Name: At_100uM_ABA_P Parameter: Tissue Value: Aerial
  misc_feature: MA Experiment 20000455 PARAMETER Experiment Name: At_100uM_ABA_P Parameter: Treatment Value: 100uM ABA vs. No Treatment
  misc_feature: MA Experiment ID: 20000606 Result: Up-regulated in Transcription
  misc_feature: MA Experiment 20000606 PARAMETER Experiment Name: At_CS8548_Mutant_P Parameter: Age (day) Value: 14
  misc_feature: MA Experiment 20000606 PARAMETER Experiment Name: At_CS8548_Mutant_P Parameter: Plant Line Value: CS8548 vs. wt
  misc_feature: MA Experiment 20000606 PARAMETER Experiment Name: At_CS8548_Mutant_P Parameter: Tissue Value: Whole Plant
  misc_feature: MA Experiment ID: 20000794 Result: Down-regulated in Transcription
  misc_feature: MA Experiment 20000794 PARAMETER Experiment Name: At_Petals_P Parameter: Age (day) Value: 23-25 days
  misc_feature: MA Experiment 20000794 PARAMETER Experiment Name: At_Petals_P Parameter: Plant Line Value: WS
  misc_feature: MA Experiment 20000794 PARAMETER Experiment Name: At_Petals_P Parameter: Tissue Value: Petals vs. Whole plant
  misc_feature: MA Experiment ID: 20001450 Result: Up-regulated in Transcription
  misc_feature: MA Experiment 20001450 PARAMETER Experiment Name: At_Far-red-induction_P Parameter: Age (day) Value: 7
  misc_feature: MA Experiment 20001450 PARAMETER Experiment Name: At_Far-red-induction_P Parameter: Light Value: Far-red vs. White
  misc_feature: MA Experiment 20001450 PARAMETER Experiment Name: At_Far-red-induction_P Parameter: Organism Value: A. thaliana
  misc_feature: MA Experiment 20001450 PARAMETER Experiment Name: At_Far-red-induction_P Parameter: Plant Line Value: Columbia
  misc_feature: MA Experiment 20001450 PARAMETER Experiment Name: At_Far-red-induction_P Parameter: Timepoint (hr) Value: 8
  misc_feature: MA Experiment 20001450 PARAMETER Experiment Name: At_Far-red-induction_P Parameter: Tissue Value: Whole Plant
  misc_feature: MA Experiment ID: 20001451 Result: Up-regulated in Transcription
  misc_feature: MA Experiment 20001451 PARAMETER Experiment Name: At_Far-red-induction_P Parameter: Age (day) Value: 7
  misc_feature: MA Experiment 20001451 PARAMETER Experiment Name: At_Far-red-induction_P Parameter: Light Value: Far-red vs. White
  misc_feature: MA Experiment 20001451 PARAMETER Experiment Name: At_Far-red-induction_P Parameter: Organism Value: A. thaliana
  misc_feature: MA Experiment 20001451 PARAMETER Experiment Name: At_Far-red-induction_P Parameter: Plant Line Value: Columbia
  misc_feature: MA Experiment 20001451 PARAMETER Experiment Name: At_Far-red-induction_P Parameter: Timepoint (hr) Value: 24
  misc_feature: MA Experiment 20001451 PARAMETER Experiment Name: At_Far-red-induction_P Parameter: Tissue Value: Whole Plant
  misc_feature: MA Experiment ID: 20001554 Result: Down-regulated in Transcription
  misc_feature: MA Experiment 20001554 PARAMETER Experiment Name: At_Drought_Soil_Dry_P Parameter: Age (day) Value: 21
  misc_feature: MA Experiment 20001554 PARAMETER Experiment Name: At_Drought_Soil_Dry_P Parameter: Organism Value: A. thaliana
  misc_feature: MA Experiment 20001554 PARAMETER Experiment Name: At_Drought_Soil_Dry_P Parameter: Plant Line Value: WS
  misc_feature: MA Experiment 20001554 PARAMETER Experiment Name: At_Drought_Soil_Dry_P Parameter: Post Timepoint (hr) Value: None
  misc_feature: MA Experiment 20001554 PARAMETER Experiment Name: At_Drought_Soil_Dry_P Parameter: Post-Treatment Value: None
  misc_feature: MA Experiment 20001554 PARAMETER Experiment Name: At_Drought_Soil_Dry_P Parameter: Timepoint (day) Value: 7
  misc_feature: MA Experiment 20001554 PARAMETER Experiment Name: At_Drought_Soil_Dry_P Parameter: Treatment Value: Drought vs. No Drought
  misc_feature: MA Experiment ID: 20001555 Result: Down-regulated in Transcription
  misc_feature: MA Experiment 20001555 PARAMETER Experiment Name: At_Drought_Soil_Dry_P Parameter: Age (day) Value: 24
  misc_feature: MA Experiment 20001555 PARAMETER Experiment Name: At_Drought_Soil_Dry_P Parameter: Organism Value: A. thaliana
  misc_feature: MA Experiment 20001555 PARAMETER Experiment Name: At_Drought_Soil_Dry_P Parameter: Plant Line Value: WS
  misc_feature: MA Experiment 20001555 PARAMETER Experiment Name: At_Drought_Soil_Dry_P Parameter: Post Timepoint (hr) Value: None
  misc_feature: MA Experiment 20001555 PARAMETER Experiment Name: At_Drought_Soil_Dry_P Parameter: Post-Treatment Value: None
  misc_feature: MA Experiment 20001555 PARAMETER Experiment Name: At_Drought_Soil_Dry_P Parameter: Timepoint (day) Value: 10
  misc_feature: MA Experiment 20001555 PARAMETER Experiment Name: At_Drought_Soil_Dry_P Parameter: Treatment Value: Drought vs. No Drought
  misc_feature: MA Experiment ID: 20001556 Result: Down-regulated in Transcription
  misc_feature: MA Experiment 20001556 PARAMETER Experiment Name: At_Drought_Soil_Dry_P Parameter: Age (day) Value: 26
  misc_feature: MA Experiment 20001556 PARAMETER Experiment Name: At_Drought_Soil_Dry_P Parameter: Organism Value: A. thaliana
  misc_feature: MA Experiment 20001556 PARAMETER Experiment Name: At_Drought_Soil_Dry_P Parameter: Plant Line Value: WS
  misc_feature: MA Experiment 20001556 PARAMETER Experiment Name: At_Drought_Soil_Dry_P Parameter: Post Timepoint (hr) Value: None
  misc_feature: MA Experiment 20001556 PARAMETER Experiment Name: At_Drought_Soil_Dry_P Parameter: Post-Treatment Value: None
  misc_feature: MA Experiment 20001556 PARAMETER Experiment Name: At_Drought_Soil_Dry_P Parameter: Timepoint (day) Value: 12
  misc_feature: MA Experiment 20001556 PARAMETER Experiment Name: At_Drought_Soil_Dry_P Parameter: Treatment Value: Drought vs. No Drought
  misc_feature: MA Experiment ID: 20001557 Result: Up-regulated in Transcription
  misc_feature: MA Experiment 20001557 PARAMETER Experiment Name: At_Drought_Soil_Dry_P Parameter: Age (day) Value: 27
  misc_feature: MA Experiment 20001557 PARAMETER Experiment Name: At_Drought_Soil_Dry_P Parameter: Organism Value: A. thaliana
  misc_feature: MA Experiment 20001557 PARAMETER Experiment Name: At_Drought_Soil_Dry_P Parameter: Plant Line Value: WS
  misc_feature: MA Experiment 20001557 PARAMETER Experiment Name: At_Drought_Soil_Dry_P Parameter: Post Timepoint (hr) Value: 3
  misc_feature: MA Experiment 20001557 PARAMETER Experiment Name: At_Drought_Soil_Dry_P Parameter: Post-Treatment Value: Re-Water vs. No Drought
  misc_feature: MA Experiment 20001557 PARAMETER Experiment Name: At_Drought_Soil_Dry_P Parameter: Timepoint (day) Value: 13
  misc_feature: MA Experiment 20001557 PARAMETER Experiment Name: At_Drought_Soil_Dry_P Parameter: Treatment Value: Drought vs. No Drought
  misc_feature: MA Experiment ID: 20001558 Result: Up-regulated in Transcription
  misc_feature: MA Experiment 20001558 PARAMETER Experiment Name: At_Drought_Soil_Dry_P Parameter: Age (day) Value: 27
  misc_feature: MA Experiment 20001558 PARAMETER Experiment Name: At_Drought_Soil_Dry_P Parameter: Organism Value: A. thaliana
  misc_feature: MA Experiment 20001558 PARAMETER Experiment Name: At_Drought_Soil_Dry_P Parameter: Plant Line Value: WS
  misc_feature: MA Experiment 20001558 PARAMETER Experiment Name: At_Drought_Soil_Dry_P Parameter: Post Timepoint (hr) Value: 6
  misc_feature: MA Experiment 20001558 PARAMETER Experiment Name: At_Drought_Soil_Dry_P Parameter: Post-Treatment Value: Re-Water vs. No Drought
  misc_feature: MA Experiment 20001558 PARAMETER Experiment Name: At_Drought_Soil_Dry_P Parameter: Timepoint (day) Value: 13
  misc_feature: MA Experiment 20001558 PARAMETER Experiment Name: At_Drought_Soil_Dry_P Parameter: Treatment Value: Drought vs. No Drought
  misc_feature: MA Experiment ID: 20001560 Result: Up-regulated in Transcription
  misc_feature: MA Experiment 20001560 PARAMETER Experiment Name: At_Drought_Soil_Dry_P Parameter: Age (day) Value: 28
  misc_feature: MA Experiment 20001560 PARAMETER Experiment Name: At_Drought_Soil_Dry_P Parameter: Organism Value: A. thaliana
  misc_feature: MA Experiment 20001560 PARAMETER Experiment Name: At_Drought_Soil_Dry_P Parameter: Plant Line Value: WS
  misc_feature: MA Experiment 20001560 PARAMETER Experiment Name: At_Drought_Soil_Dry_P Parameter: Post Timepoint (hr) Value: None
  misc_feature: MA Experiment 20001560 PARAMETER Experiment Name: At_Drought_Soil_Dry_P Parameter: Post-Treatment Value: None
  misc_feature: MA Experiment 20001560 PARAMETER Experiment Name: At_Drought_Soil_Dry_P Parameter: Timepoint (day) Value: 14
  misc_feature: MA Experiment 20001560 PARAMETER Experiment Name: At_Drought_Soil_Dry_P Parameter: Treatment Value: Drought vs. No Drought
  misc_feature: MA Experiment ID: 20001757 Result: Up-regulated in Transcription
  misc_feature: MA Experiment 20001757 PARAMETER Experiment Name: At_50mM_NH4NO3_L-to-H_P Parameter: Timepoint (hr) Value: 6
  misc_feature: MA Experiment 20001757 PARAMETER Experiment Name: At_50mM_NH4NO3_L-to-H_P Parameter: Tissue Value: Leaf
  misc_feature: MA Experiment 20001757 PARAMETER Experiment Name: At_50mM_NH4NO3_L-to-H_P Parameter: Treatment Value: 50mM NH4NO3 vs 100mM Mannitol
  misc_feature: MA Experiment ID: 20001768 Result: Down-regulated in Transcription
  misc_feature: MA Experiment 20001768 PARAMETER Experiment Name: At_Far-red-enriched-adult_P Parameter: Age (day) Value: 28
  misc_feature: MA Experiment 20001768 PARAMETER Experiment Name: At_Far-red-enriched-adult_P Parameter: Light Value: Far-red enriched vs. White
  misc_feature: MA Experiment 20001768 PARAMETER Experiment Name: At_Far-red-enriched-adult_P Parameter: Organism Value: A. thaliana
  misc_feature: MA Experiment 20001768 PARAMETER Experiment Name: At_Far-red-enriched-adult_P Parameter: Plant Line Value: Columbia
  misc_feature: MA Experiment 20001768 PARAMETER Experiment Name: At_Far-red-enriched-adult_P Parameter: Timepoint (hr) Value: 1
  misc_feature: MA Experiment 20001768 PARAMETER Experiment Name: At_Far-red-enriched-adult_P Parameter: Tissue Value: Aerial
  misc_feature: MA Experiment ID: 20001904 Result: Down-regulated in Transcription
  misc_feature: MA Experiment 20001904 PARAMETER Experiment Name: At_Drought_Reproduction_P Parameter: Age (day) Value: 37
  misc_feature: MA Experiment 20001904 PARAMETER Experiment Name: At_Drought_Reproduction_P Parameter: Organism Value: A. thaliana
  misc_feature: MA Experiment 20001904 PARAMETER Experiment Name: At_Drought_Reproduction_P Parameter: Plant Line Value: WS
  misc_feature: MA Experiment 20001904 PARAMETER Experiment Name: At_Drought_Reproduction_P Parameter: Timepoint (day) Value: 7
  misc_feature: MA Experiment 20001904 PARAMETER Experiment Name: At_Drought_Reproduction_P Parameter: Tissue Value: Rosettes
  misc_feature: MA Experiment 20001904 PARAMETER Experiment Name: At_Drought_Reproduction_P Parameter: Treatment Value: Drought vs. No Drought
  misc_feature: MA Experiment ID: 20001905 Result: Down-regulated in Transcription
  misc_feature: MA Experiment 20001905 PARAMETER Experiment Name: At_Drought_Reproduction_P Parameter: Age (day) Value: 40
  misc_feature: MA Experiment 20001905 PARAMETER Experiment Name: At_Drought_Reproduction_P Parameter: Organism Value: A. thaliana
  misc_feature: MA Experiment 20001905 PARAMETER Experiment Name: At_Drought_Reproduction_P Parameter: Plant Line Value: WS
  misc_feature: MA Experiment 20001905 PARAMETER Experiment Name: At_Drought_Reproduction_P Parameter: Timepoint (day) Value: 10
  misc_feature: MA Experiment 20001905 PARAMETER Experiment Name: At_Drought_Reproduction_P Parameter: Tissue Value: Rosettes
  misc_feature: MA Experiment 20001905 PARAMETER Experiment Name: At_Drought_Reproduction_P Parameter: Treatment Value: Drought vs. No Drought
  misc_feature: MA Experiment ID: 20001906 Result: Down-regulated in Transcription
  misc_feature: MA Experiment 20001906 PARAMETER Experiment Name: At_Drought_Reproduction_P Parameter: Age (day) Value: 35
  misc_feature: MA Experiment 20001906 PARAMETER Experiment Name: At_Drought_Reproduction_P Parameter: Organism Value: A. thaliana
  misc_feature: MA Experiment 20001906 PARAMETER Experiment Name: At_Drought_Reproduction_P Parameter: Plant Line Value: WS
  misc_feature: MA Experiment 20001906 PARAMETER Experiment Name: At_Drought_Reproduction_P Parameter: Timepoint (day) Value: 5
  misc_feature: MA Experiment 20001906 PARAMETER Experiment Name: At_Drought_Reproduction_P Parameter: Tissue Value: Siliques
  misc_feature: MA Experiment 20001906 PARAMETER Experiment Name: At_Drought_Reproduction_P Parameter: Treatment Value: Drought vs. No Drought
  misc_feature: MA Experiment ID: 20001907 Result: Down-regulated in Transcription
  misc_feature: MA Experiment 20001907 PARAMETER Experiment Name: At_Drought_Reproduction_P Parameter: Age (day) Value: 37
  misc_feature: MA Experiment 20001907 PARAMETER Experiment Name: At_Drought_Reproduction_P Parameter: Organism Value: A. thaliana
  misc_feature: MA Experiment 20001907 PARAMETER Experiment Name: At_Drought_Reproduction_P Parameter: Plant Line Value: WS
  misc_feature: MA Experiment 20001907 PARAMETER Experiment Name: At_Drought_Reproduction_P Parameter: Timepoint (day) Value: 7
  misc_feature: MA Experiment 20001907 PARAMETER Experiment Name: At_Drought_Reproduction_P Parameter: Tissue Value: Siliques
  misc_feature: MA Experiment 20001907 PARAMETER Experiment Name: At_Drought_Reproduction_P Parameter: Treatment Value: Drought vs. No Drought
  misc_feature: MA Experiment ID: 20001908 Result: Down-regulated in Transcription
  misc_feature: MA Experiment 20001908 PARAMETER Experiment Name: At_Drought_Reproduction_P Parameter: Age (day) Value: 40
  misc_feature: MA Experiment 20001908 PARAMETER Experiment Name: At_Drought_Reproduction_P Parameter: Organism Value: A. thaliana
  misc_feature: MA Experiment 20001908 PARAMETER Experiment Name: At_Drought_Reproduction_P Parameter: Plant Line Value: WS
  misc_feature: MA Experiment 20001908 PARAMETER Experiment Name: At_Drought_Reproduction_P Parameter: Timepoint (day) Value: 10
  misc_feature: MA Experiment 20001908 PARAMETER Experiment Name: At_Drought_Reproduction_P Parameter: Tissue Value: Siliques
  misc_feature: MA Experiment 20001908 PARAMETER Experiment Name: At_Drought_Reproduction_P Parameter: Treatment Value: Drought vs. No Drought
gatatatctctagtctagacattatttgtctacaaacgttttgtattgacttggccatctcattccaacaagatacaactcatcactccaaacattcaacttccatataaaccattcccttccgatctcactttccaaatcactcttcacactttaactaagcaaaccaataatggctaccactcgtctaactctagctcctctcctcctcatcgcagccgtactactcgcaaccaaggcaacggctcagccggcagcccccactccagagcctgctggtcccatcaacctcactgcgatcctcgaaaaaggtggtcaattcactactttcatccatcttctaaacatcactcaagtcggtagtcaagtgaacattcaagtcaatagttcatccgaaggtatgacggtgttcgcaccaacagacaatgcttttcaaaaccttaaacccggaaccctaaaccagttaagccctgacgatcaagttaaactcattctctaccacgttagccccaaatattacagtatggatgatctcctctccgtgagtaacccggttaggactcaagcttctggccgagacaacggtgtttacgggcttaacttcaccggccaaacaaaccaaatcaatgtctctactggttatgtggagacacgtattagcaattcgttgaggcaacaacgtcctctcgcagtttatgttgtcgacatggttttgttgcccggtgagatgttcggagagcacaagctttcgccgattgctcctgcccctaaatctaaatccggtggggttaccgatgactccggctccactaagaaggcagcgtcaccgtcggataagtcaggctccggtgagaagaaagtcggactagggtttggtcttggacttattgtcttatgtttgaaatttctcttttgaaaatttaatagcaaagatttgttttgctttctattgattttatcctgcgatgtgaggtataaatatgaaatttgttgattaagttccgtgaaataaaatgtgagatttttaataaaaaaaaaaaa

SEQ ID NO: 25078 - protein, 247 aa, Arabidopsis thaliana
  peptide (1)..(247): Ceres Seq. ID no. 13500159
  misc_feature (42)..(183): Pfam Name: Fasciclin domain Pfam Description: Fasciclin domain
  misc_feature (12)..(243): Homolog of NCBI NO: 30841338 NR Description: arabinogalactan protein [Gossypium hirsutum]
  misc_feature (1)..(226): Homolog of NCBI NO: 2129473 NR Description: arabinogalactan-like protein - loblolly pine
  misc_feature (1)..(236): Homolog of NCBI NO: 21553523 NR Description: arabinogalactan protein-like [Arabidopsis
  misc_feature (1)..(236): Homolog of NCBI NO: 15242651 NR Description: fasciclin-like arabinogalactan-protein (FLA11)
  misc_feature (11)..(243): Homolog of NCBI NO: 34910950 NR Description: putative arabinogalactan-like protein
  misc_feature (27)..(247): Homolog of NCBI NO: 25350183 NR Description: probable surface protein [imported] - Arabidopsis
  misc_feature (25)..(247): Homolog of NCBI NO: 18399381 NR Description: fasciclin-like arabinogalactan-protein (FLA6)
  misc_feature (1)..(246): Homolog of NCBI NO: 15241423 NR Description: fasciclin-like arabinogalactan-protein, putative
  misc_feature (1)..(247): Homolog of NCBI NO: 18379157 NR Description: fasciclin-like arabinogalactan-protein (FLA9)
  misc_feature (1)..(247): Homolog of NCBI NO: 24417458 NR Description: unknown [Arabidopsis thaliana]
MATTRLTLAPLLLIAAVLLATKATAQPAAPTPEPAGPINLTAILEKGGQFTTFIHLLNITQVGSQVNIQVNSSSEGMTVFAPTDNAFQNLKPGTLNQLSPDDQVKLILYHVSPKYYSMDDLLSVSNPVRTQASGRDNGVYGLNFTGQTNQINVSTGYVETRISNSLRQQRPLAVYVVDMVLLPGEMFGEHKLSPIAPAPKSKSGGVTDDSGSTKKAASPSDKSGSGEKKVGLGFGLGLIVLCLKFLF

SEQ ID NO: 25079 - protein, 171 aa, Arabidopsis thaliana
  peptide (1)..(171): Ceres Seq. ID no. 13500160
  misc_feature (1)..(107): Pfam Name: Fasciclin domain Pfam Description: Fasciclin domain
  misc_feature (1)..(167): Homolog of NCBI NO: 30841338 NR Description: arabinogalactan protein [Gossypium hirsutum]
  misc_feature (1)..(150): Homolog of NCBI NO: 2129473 NR Description: arabinogalactan-like protein - loblolly pine
  misc_feature (1)..(160): Homolog of NCBI NO: 21553523 NR Description: arabinogalactan protein-like [Arabidopsis
  misc_feature (1)..(160): Homolog of NCBI NO: 15242651 NR Description: fasciclin-like arabinogalactan-protein (FLA11)
  misc_feature (1)..(167): Homolog of NCBI NO: 34910950 NR Description: putative arabinogalactan-like protein
  misc_feature (1)..(171): Homolog of NCBI NO: 25350183 NR Description: probable surface protein [imported] - Arabidopsis
  misc_feature (1)..(171): Homolog of NCBI NO: 18399381 NR Description: fasciclin-like arabinogalactan-protein (FLA6)
  misc_feature (1)..(170): Homolog of NCBI NO: 15241423 NR Description: fasciclin-like arabinogalactan-protein, putative
  misc_feature (1)..(171): Homolog of NCBI NO: 18379157 NR Description: fasciclin-like arabinogalactan-protein (FLA9)
  misc_feature (1)..(171): Homolog of NCBI NO: 24417458 NR Description: unknown [Arabidopsis thaliana]
MTVFAPTDNAFQNLKPGTLNQLSPDDQVKLILYHVSPKYYSMDDLLSVSNPVRTQASGRDNGVYGLNFTGQTNQINVSTGYVETRISNSLRQQRPLAVYVVDMVLLPGEMFGEHKLSPIAPAPKSKSGGVTDDSGSTKKAASPSDKSGSGEKKVGLGFGLGLIVLCLKFLF

SEQ ID NO: 25080 - protein, 130 aa, Arabidopsis thaliana
  peptide (1)..(130): Ceres Seq. ID no. 13500161
  misc_feature (1)..(66): Pfam Name: Fasciclin domain Pfam Description: Fasciclin domain
  misc_feature (1)..(126): Homolog of NCBI NO: 30841338 NR Description: arabinogalactan protein [Gossypium hirsutum]
  misc_feature (1)..(109): Homolog of NCBI NO: 2129473 NR Description: arabinogalactan-like protein - loblolly pine
  misc_feature (1)..(119): Homolog of NCBI NO: 21553523 NR Description: arabinogalactan protein-like [Arabidopsis
  misc_feature (1)..(119): Homolog of NCBI NO: 15242651 NR Description: fasciclin-like arabinogalactan-protein (FLA11)
  misc_feature (1)..(126): Homolog of NCBI NO: 34910950 NR Description: putative arabinogalactan-like protein
  misc_feature (1)..(130): Homolog of NCBI NO: 25350183 NR Description: probable surface protein [imported] - Arabidopsis
  misc_feature (1)..(130): Homolog of NCBI NO: 18399381 NR Description: fasciclin-like arabinogalactan-protein (FLA6)
  misc_feature (1)..(129): Homolog of NCBI NO: 15241423 NR Description: fasciclin-like arabinogalactan-protein, putative
  misc_feature (1)..(130): Homolog of NCBI NO: 18379157 NR Description: fasciclin-like arabinogalactan-protein (FLA9)
  misc_feature (1)..(130): Homolog of NCBI NO: 24417458 NR Description: unknown [Arabidopsis thaliana]
MDDLLSVSNPVRTQASGRDNGVYGLNFTGQTNQINVSTGYVETRISNSLRQQRPLAVYVVDMVLLPGEMFGEHKLSPIAPAPKSKSGGVTDDSGSTKKAASPSDKSGSGEKKVGLGFGLGLIVLCLKFLF

SEQ ID NO: 25081 - DNA, 1571 bp, Arabidopsis thaliana
  misc_feature (1)..(1571): Ceres Seq. ID no. 13622128
  misc_feature: MA Experiment ID: 108461 Result: Up-regulated in Transcription
  misc_feature: MA Experiment 108461 PARAMETER Experiment Name: At_Germinating_Seeds_cDNA_P Parameter: Age (day) Value: 1 vs. 0
  misc_feature: MA Experiment 108461 PARAMETER Experiment Name: At_Germinating_Seeds_cDNA_P Parameter: Tissue Value: Germinating Seeds
  misc_feature: MA Experiment ID: 108462 Result: Up-regulated in Transcription
  misc_feature: MA Experiment 108462 PARAMETER Experiment Name: At_Germinating_Seeds_cDNA_P Parameter: Age (day) Value: 2 vs. 0
  misc_feature: MA Experiment 108462 PARAMETER Experiment Name: At_Germinating_Seeds_cDNA_P Parameter: Tissue Value: Germinating Seeds
  misc_feature: MA Experiment ID: 108464 Result: Up-regulated in Transcription
  misc_feature: MA Experiment 108464 PARAMETER Experiment Name: At_Germinating_Seeds_cDNA_P Parameter: Age (day) Value: 4 vs. 0
  misc_feature: MA Experiment 108464 PARAMETER Experiment Name: At_Germinating_Seeds_cDNA_P Parameter: Tissue Value: Germinating Seeds
  misc_feature: MA Experiment ID: 20000111 Result: Down-regulated in Transcription
  misc_feature: MA Experiment 20000111 PARAMETER Experiment Name: At_42deg_Heat_cDNA_P Parameter: Temperature (deg C) Value: 42 vs. 22
  misc_feature: MA Experiment 20000111 PARAMETER Experiment Name: At_42deg_Heat_cDNA_P Parameter: Timepoint (hr) Value: 6
  misc_feature: MA Experiment 20000111 PARAMETER Experiment Name: At_42deg_Heat_cDNA_P Parameter: Tissue Value: Aerial
  misc_feature: MA Experiment ID: 20000113 Result: Down-regulated in Transcription
  misc_feature: MA Experiment 20000113 PARAMETER Experiment Name: At_42deg_Heat_cDNA_P Parameter: Temperature (deg C) Value: 42 vs. 22
  misc_feature: MA Experiment 20000113 PARAMETER Experiment Name: At_42deg_Heat_cDNA_P Parameter: Timepoint (hr) Value: 8
  misc_feature: MA Experiment 20000113 PARAMETER Experiment Name: At_42deg_Heat_cDNA_P Parameter: Tissue Value: Aerial
  misc_feature: MA Experiment ID: 20000173 Result: Down-regulated in Transcription
  misc_feature: MA Experiment 20000173 PARAMETER Experiment Name: At_42deg_Heat_P Parameter: Age (day) Value: 14
  misc_feature: MA Experiment 20000173 PARAMETER Experiment Name: At_42deg_Heat_P Parameter: Organism Value: A. thaliana
  misc_feature: MA Experiment 20000173 PARAMETER Experiment Name: At_42deg_Heat_P Parameter: Plant Line Value: WS
  misc_feature: MA Experiment 20000173 PARAMETER Experiment Name: At_42deg_Heat_P Parameter: Temperature (deg C) Value: 42 vs. 22
  misc_feature: MA Experiment 20000173 PARAMETER Experiment Name: At_42deg_Heat_P Parameter: Timepoint (hr) Value: 6
  misc_feature: MA Experiment 20000173 PARAMETER Experiment Name: At_42deg_Heat_P Parameter: Tissue Value: Aerial
  misc_feature: MA Experiment ID: 20000179 Result: Up-regulated in Transcription
  misc_feature: MA Experiment 20000179 PARAMETER Experiment Name: At_Germinating_Seeds_P Parameter: Age (hr) Value: 6 vs. 0
  misc_feature: MA Experiment 20000179 PARAMETER Experiment Name: At_Germinating_Seeds_P Parameter: Tissue Value: Germinating Seeds
  misc_feature: MA Experiment ID: 20000180 Result: Up-regulated in Transcription
  misc_feature: MA Experiment 20000180 PARAMETER Experiment Name: At_Germinating_Seeds_P Parameter: Age (hr) Value: 24 vs. 0
  misc_feature: MA Experiment 20000180 PARAMETER Experiment Name: At_Germinating_Seeds_P Parameter: Tissue Value: Germinating Seeds
  misc_feature: MA Experiment ID: 20000227 Result: Up-regulated in Transcription
  misc_feature: MA Experiment 20000227 PARAMETER Experiment Name: At_Root-Tips-vs-Tops_P Parameter: Tissue Value: Root Tips vs. Root Tops
  misc_feature: MA Experiment ID: 20000437 Result: Up-regulated in Transcription
  misc_feature: MA Experiment 20000437 PARAMETER Experiment Name: At_Drought_P Parameter: Age (day) Value: 8
  misc_feature: MA Experiment 20000437 PARAMETER Experiment Name: At_Drought_P Parameter: Organism Value: A. thaliana
  misc_feature: MA Experiment 20000437 PARAMETER Experiment Name: At_Drought_P Parameter: Plant Line Value: WS
  misc_feature: MA Experiment 20000437 PARAMETER Experiment Name: At_Drought_P Parameter: Timepoint (hr) Value: 24
  misc_feature: MA Experiment 20000437 PARAMETER Experiment Name: At_Drought_P Parameter: Tissue Value: Whole Plant
  misc_feature: MA Experiment 20000437 PARAMETER Experiment Name: At_Drought_P Parameter: Treatment Value: Drought vs. No Drought
  misc_feature: MA Experiment ID: 20001248 Result: Up-regulated in Transcription
  misc_feature: MA Experiment 20001248 PARAMETER Experiment Name: At_Far-red-induction_P Parameter: Age (day) Value: 7
  misc_feature: MA Experiment 20001248 PARAMETER Experiment Name: At_Far-red-induction_P Parameter: Light Value: Far-red vs. White
  misc_feature: MA Experiment 20001248 PARAMETER Experiment Name: At_Far-red-induction_P Parameter: Organism Value: A. thaliana
  misc_feature: MA Experiment 20001248 PARAMETER Experiment Name: At_Far-red-induction_P Parameter: Plant Line Value: Columbia
  misc_feature: MA Experiment 20001248 PARAMETER Experiment Name: At_Far-red-induction_P Parameter: Timepoint (hr) Value: 4
  misc_feature: MA Experiment 20001248 PARAMETER Experiment Name: At_Far-red-induction_P Parameter: Tissue Value: Whole Plant
  misc_feature: MA Experiment ID: 20001558 Result: Down-regulated in Transcription
  misc_feature: MA Experiment 20001558 PARAMETER Experiment Name: At_Drought_Soil_Dry_P Parameter: Age (day) Value: 27
  misc_feature: MA Experiment 20001558 PARAMETER Experiment Name: At_Drought_Soil_Dry_P Parameter: Organism Value: A. thaliana
  misc_feature: MA Experiment 20001558 PARAMETER Experiment Name: At_Drought_Soil_Dry_P Parameter: Plant Line Value: WS
  misc_feature: MA Experiment 20001558 PARAMETER Experiment Name: At_Drought_Soil_Dry_P Parameter: Post Timepoint (hr) Value: 6
  misc_feature: MA Experiment 20001558 PARAMETER Experiment Name: At_Drought_Soil_Dry_P Parameter: Post-Treatment Value: Re-Water vs. No Drought
  misc_feature: MA Experiment 20001558 PARAMETER Experiment Name: At_Drought_Soil_Dry_P Parameter: Timepoint (day) Value: 13
  misc_feature: MA Experiment 20001558 PARAMETER Experiment Name: At_Drought_Soil_Dry_P Parameter: Treatment Value: Drought vs. No Drought
attttctgtcattttgatcagatccaagaaaccaaaagagtaaaacaaacacagagaagcttcttcttaaacgatgccgtactataccagagatgacaacgacgtcgacgatttcgatgagtttgatccaacgccgtacagtggtggttacgacatcacggtgatctacggccgtccgattccaccttccgatgagacttgttatcctctctcatctggtgtcgatgatgatttcgaatacgagagacctgaatttactcagatccatgagccttctgcttacggtgatgaagctcttaacacagagtacagtagctattctcgacccaagccacgacccgcatttcgacccgattcaggtggtggtggtcatgttcaaggtgaaagaccaaatcctggttatggatctgaatccggttatgggaggaaaccggaatctgagtacggatctggctatggtggacaaacggaggtggagtatggtcggagacctgagcagagttatggatctggttatggtggaaggacggagactgaatcggagtatggatctggtggtggtggaagaactgaggttgagtatggtaggagacctgaatcagggcttggatctggttatggtgggagatcggagtctgagtatgagcgtaagcctagctatggaaggtctgaggaacaagaagaaggttataggaagcctagctatggaagatctgaagaacaagaggaaggttacaggaagccaagttatggaagatctgaggagcaggaagaaggatatagaaagcctagctatggaagatctgaggaggaacaagaggaaggttataggaagcctagctatggaagatctgaggaacaagaggaaggaagttacaggaaacctagttatgggaggtctgatgatcaggtggagagttacattaagcctagctatggaagatctgaggaacaggaggagggaagttacaggaagcctagttatgggaggtctgaggaacaggaagaggggagttacaggaagcagcctagctatggccgtggcaatgacgatgatgatgatgagcagcgtaggaaccgttctggttctggtgatgatgaggaagggagctatggccgcaagaaatatggtggcaatgactctgatgaggatgaggagaagaagaagcaccgtcacaagcatcaccaccagaagcgtcgtgacgaagacgatgagtaaactaaaccctctctgtgctagagagtgtaatgagaatgtgtgtttgcttagcctcaaaaatctactaaataaagagctaagtcacatacctttctacataatatcttccgacgttggtgttgtgtttgtttgaatctctgtattattactacagagtcttcgtactggttcataataagacctttaagtggtattgggtcaccatgtaactgttgctactctgtttcgttttctatctatcgttttgtgttatgatttacttttctatccttatataattatgatgatcatttcgtgtaatatcagaatgttttttgcatgaattggaattagatggaaactttgtttaagg

SEQ ID NO: 25082 - protein, 386 aa, Arabidopsis thaliana
  peptide (1)..(386): Ceres Seq. ID no. 13622129
  misc_feature (1)..(386): Homolog of NCBI NO: 18421880 NR Description: expressed protein [Arabidopsis thaliana]
MRLVILSHLVSMMISNTRDLNLLRSMSLLLTVMKLLTQSTVAILDPSHDPHFDPIQVVVVMFKVKDQILVMDLNPVMGGNRNLSTDLAMVDKRRWSMVGDLSRVMDLVMVEGRRLNRSMDLVVVEELRLSMVGDLNQGLDLVMVGDRSLSMSVSLAMEGLRNKKKVIGSLAMEDLKNKRKVTGSQVMEDLRSRKKDIESLAMEDLRRNKRKVIGSLAMEDLRNKRKEVTGNLVMGGLMIRWRVTLSLAMEDLRNRRREVTGSLVMGGLRNRKRGVTGSSLAMAVAMTMMMMSSVGTVLVLVMMRKGAMAARNMVAMTLMRMRRRRSTVTSITTRSVVTKTMSKLNPLCARECNENVCLLSLKNLLNKELSHIPFYIISSDVGVVFV

SEQ ID NO: 25083 - protein, 381 aa, Arabidopsis thaliana
  peptide (1)..(381): Ceres Seq. ID no. 13622130
  misc_feature (87)..(345): Pfam Name: High molecular weight glutenin subunit Pfam Description: High molecular weight glutenin subunit
  misc_feature (55)..(381): Homolog of NCBI NO: 9837379 NR Description: retinitis pigmentosa GTPase regulator [Homo
  misc_feature (51)..(356): Homolog of NCBI NO: 15228587 NR Description: glycine-rich protein [Arabidopsis thaliana]
  misc_feature (69)..(359): Homolog of NCBI NO: 6323826 NR Description: DNA damage inducible
  misc_feature (69)..(359): Homolog of NCBI NO: 171388 NR Description: DDR48 stress protein
  misc_feature (97)..(327): Homolog of NCBI NO: 12580871 NR Description: hypothetical protein [Picea abies]
  misc_feature (1)..(246): Homolog of NCBI NO: 21928162 NR Description: AT3g29075/MXE2_1 [Arabidopsis thaliana]
  misc_feature (1)..(279): Homolog of NCBI NO: 15228587 NR Description: glycine-rich protein [Arabidopsis thaliana]
  misc_feature (6)..(380): Homolog of NCBI NO: 32352182 NR Description: hypothetical protein [Oryza sativa (japonica
  misc_feature (1)..(381): Homolog of NCBI NO: 24417262 NR Description: unknown [Arabidopsis thaliana]
  misc_feature (1)..(381): Homolog of NCBI NO: 9758332 NR Description: gene_id:MIJ24.6~ref|NP_013897.1~similar to
MPYYTRDDNDVDDFDEFDPTPYSGGYDITVIYGRPIPPSDETCYPLSSGVDDDFEYERPEFTQIHEPSAYGDEALNTEYSSYSRPKPRPAFRPDSGGGGHVQGERPNPGYGSESGYGRKPESEYGSGYGGQTEVEYGRRPEQSYGSGYGGRTETESEYGSGGGGRTEVEYGRRPESGLGSGYGGRSESEYERKPSYGRSEEQEEGYRKPSYGRSEEQEEGYRKPSYGRSEEQEEGYRKPSYGRSEEEQEEGYRKPSYGRSEEQEEGSYRKPSYGRSDDQVESYIKPSYGRSEEQEEGSYRKPSYGRSEEQEEGSYRKQPSYGRGNDDDDDEQRRNRSGSGDDEEGSYGRKKYGGNDSDEDEEKKKHRHKHHHQKRRDEDDE

SEQ ID NO: 25084 - protein, 375 aa, Arabidopsis thaliana
  peptide (1)..(375): Ceres Seq. ID no. 13622131
  misc_feature (1)..(375): Homolog of NCBI NO: 18421880 NR Description: expressed protein [Arabidopsis thaliana]
MMISNTRDLNLLRSMSLLLTVMKLLTQSTVAILDPSHDPHFDPIQVVVVMFKVKDQILVMDLNPVMGGNRNLSTDLAMVDKRRWSMVGDLSRVMDLVMVEGRRLNRSMDLVVVEELRLSMVGDLNQGLDLVMVGDRSLSMSVSLAMEGLRNKKKVIGSLAMEDLKNKRKVTGSQVMEDLRSRKKDIESLAMEDLRRNKRKVIGSLAMEDLRNKRKEVTGNLVMGGLMIRWRVTLSLAMEDLRNRRREVTGSLVMGGLRNRKRGVTGSSLAMAVAMTMMMMSSVGTVLVLVMMRKGAMAARNMVAMTLMRMRRRRSTVTSITTRSVVTKTMSKLNPLCARECNENVCLLSLKNLLNKELSHIPFYIISSDVGVVFV

SEQ ID NO: 25085 - DNA, 1071 bp, Arabidopsis thaliana
  misc_feature (1)..(1071): Ceres Seq. ID no. 12385269
  misc_feature: MA Experiment ID: 108434 Result: Down-regulated in Transcription
  misc_feature: MA Experiment 108434 PARAMETER Experiment Name: At_Root_Tips_cDNA_P Parameter: Tissue Value: Root Tips
  misc_feature: MA Experiment ID: 108435 Result: Down-regulated in Transcription
  misc_feature: MA Experiment 108435 PARAMETER Experiment Name: At_stm_Mutants_cDNA_P Parameter: Plant Line Value: wt Landsburg vs stm
  misc_feature: MA Experiment 108435 PARAMETER Experiment Name: At_stm_Mutants_cDNA_P Parameter: Tissue Value: Shoot Apical Meristem Region
  misc_feature: MA Experiment ID: 108461 Result: Up-regulated in Transcription
  misc_feature: MA Experiment 108461 PARAMETER Experiment Name: At_Germinating_Seeds_cDNA_P Parameter: Age (day) Value: 1 vs. 0
  misc_feature: MA Experiment 108461 PARAMETER Experiment Name: At_Germinating_Seeds_cDNA_P Parameter: Tissue Value: Germinating Seeds
  misc_feature: MA Experiment ID: 108462 Result: Up-regulated in Transcription
  misc_feature: MA Experiment 108462 PARAMETER Experiment Name: At_Germinating_Seeds_cDNA_P Parameter: Age (day) Value: 2 vs. 0
  misc_feature: MA Experiment 108462 PARAMETER Experiment Name: At_Germinating_Seeds_cDNA_P Parameter: Tissue Value: Germinating Seeds
  misc_feature: MA Experiment ID: 108464 Result: Up-regulated in Transcription
  misc_feature: MA Experiment 108464 PARAMETER Experiment Name: At_Germinating_Seeds_cDNA_P Parameter: Age (day) Value: 4 vs. 0
  misc_feature: MA Experiment 108464 PARAMETER Experiment Name: At_Germinating_Seeds_cDNA_P Parameter: Tissue Value: Germinating Seeds
  misc_feature: MA Experiment ID: 108488 Result: Up-regulated in Transcription
  misc_feature: MA Experiment ID: 108489 Result: Down-regulated in Transcription
  misc_feature: MA Experiment ID: 108594 Result: Down-regulated in Transcription
  misc_feature: MA Experiment 108594 PARAMETER Experiment Name: At_Ler-rhl_Root_cDNA_P Parameter: Plant Line Value: null
  misc_feature: MA Experiment ID: 20000180 Result: Up-regulated in Transcription
  misc_feature: MA Experiment 20000180 PARAMETER Experiment Name: At_Germinating_Seeds_P Parameter: Age (hr) Value: 24 vs. 0
  misc_feature: MA Experiment 20000180 PARAMETER Experiment Name: At_Germinating_Seeds_P Parameter: Tissue Value: Germinating Seeds
  misc_feature: MA Experiment ID: 20000185 Result: Down-regulated in Transcription
  misc_feature: MA Experiment 20000185 PARAMETER Experiment Name: At_Roots__P Parameter: Age (day) Value: 7 vs. 21
  misc_feature: MA Experiment 20000185 PARAMETER Experiment Name: At_Roots__P Parameter: Organism Value: A. thaliana
  misc_feature: MA Experiment 20000185 PARAMETER Experiment Name: At_Roots__P Parameter: Tissue Value: Roots vs. Whole Plant
  misc_feature: MA Experiment ID: 20000269 Result: Down-regulated in Transcription
  misc_feature: MA Experiment 20000269 PARAMETER Experiment Name: At_1mM_KNO3_L-vs-H_Roots_P Parameter: Age (day) Value: 7,10,12
  misc_feature: MA Experiment 20000269 PARAMETER Experiment Name: At_1mM_KNO3_L-vs-H_Roots_P Parameter: Organism Value: A. thaliana
  misc_feature: MA Experiment 20000269 PARAMETER Experiment Name: At_1mM_KNO3_L-vs-H_Roots_P Parameter: Plant Line Value: WS
  misc_feature: MA Experiment 20000269 PARAMETER Experiment Name: At_1mM_KNO3_L-vs-H_Roots_P Parameter: Timepoint (day) Value: 7,10,12
  misc_feature: MA Experiment 20000269 PARAMETER Experiment Name: At_1mM_KNO3_L-vs-H_Roots_P Parameter: Tissue Value: Roots
  misc_feature: MA Experiment 20000269 PARAMETER Experiment Name: At_1mM_KNO3_L-vs-H_Roots_P Parameter: Treatment Value: 1mM KNO3 vs. 50mM KNO3
  misc_feature: MA Experiment ID: 20000437 Result: Down-regulated in Transcription
  misc_feature: MA Experiment 20000437 PARAMETER Experiment Name: At_Drought_P Parameter: Age (day) Value: 8
  misc_feature: MA Experiment 20000437 PARAMETER Experiment Name: At_Drought_P Parameter: Organism Value: A. thaliana
  misc_feature: MA Experiment 20000437 PARAMETER Experiment Name: At_Drought_P Parameter: Plant Line Value: WS
  misc_feature: MA Experiment 20000437 PARAMETER Experiment Name: At_Drought_P Parameter: Timepoint (hr) Value: 24
  misc_feature: MA Experiment 20000437 PARAMETER Experiment Name: At_Drought_P Parameter: Tissue Value: Whole Plant
  misc_feature: MA Experiment 20000437 PARAMETER Experiment Name: At_Drought_P Parameter: Treatment Value: Drought vs. No Drought
  misc_feature: MA Experiment ID: 20000439 Result: Down-regulated in Transcription
  misc_feature: MA Experiment 20000439 PARAMETER Experiment Name: At_Roots__P Parameter: Age (day) Value: 14 vs. 21
  misc_feature: MA Experiment 20000439 PARAMETER Experiment Name: At_Roots__P Parameter: Organism Value: A. thaliana
  misc_feature: MA Experiment 20000439 PARAMETER Experiment Name: At_Roots__P Parameter: Tissue Value: Roots vs. Whole Plant
  misc_feature: MA Experiment ID: 20000794 Result: Down-regulated in Transcription
  misc_feature: MA Experiment 20000794 PARAMETER Experiment Name: At_Petals_P Parameter: Age (day) Value: 23-25 days
  misc_feature: MA Experiment 20000794 PARAMETER Experiment Name: At_Petals_P Parameter: Plant Line Value: WS
  misc_feature: MA Experiment 20000794 PARAMETER Experiment Name: At_Petals_P Parameter: Tissue Value: Petals vs. Whole plant
  misc_feature: MA Experiment ID: 20001557 Result: Down-regulated in Transcription
  misc_feature: MA Experiment 20001557 PARAMETER Experiment Name: At_Drought_Soil_Dry_P Parameter: Age (day) Value: 27
  misc_feature: MA Experiment 20001557 PARAMETER Experiment Name: At_Drought_Soil_Dry_P Parameter: Organism Value: A. thaliana
  misc_feature: MA Experiment 20001557 PARAMETER Experiment Name: At_Drought_Soil_Dry_P Parameter: Plant Line Value: WS
  misc_feature: MA Experiment 20001557 PARAMETER Experiment Name: At_Drought_Soil_Dry_P Parameter: Post Timepoint (hr) Value: 3
  misc_feature: MA Experiment 20001557 PARAMETER Experiment Name: At_Drought_Soil_Dry_P Parameter: Post-Treatment Value: Re-Water vs. No Drought
  misc_feature: MA Experiment 20001557 PARAMETER Experiment Name: At_Drought_Soil_Dry_P Parameter: Timepoint (day) Value: 13
  misc_feature: MA Experiment 20001557 PARAMETER Experiment Name: At_Drought_Soil_Dry_P Parameter: Treatment Value: Drought vs. No Drought
  misc_feature: MA Experiment ID: 20001757 Result: Up-regulated in Transcription
  misc_feature: MA Experiment 20001757 PARAMETER Experiment Name: At_50mM_NH4NO3_L-to-H_P Parameter: Timepoint (hr) Value: 6
  misc_feature: MA Experiment 20001757 PARAMETER Experiment Name: At_50mM_NH4NO3_L-to-H_P Parameter: Tissue Value: Leaf
  misc_feature: MA Experiment 20001757 PARAMETER Experiment Name: At_50mM_NH4NO3_L-to-H_P Parameter: Treatment Value: 50mM NH4NO3 vs 100mM Mannitol
  misc_feature: MA Experiment ID: 20001904 Result: Down-regulated in Transcription
  misc_feature: MA Experiment 20001904 PARAMETER Experiment Name: At_Drought_Reproduction_P Parameter: Age (day) Value: 37
  misc_feature: MA Experiment 20001904 PARAMETER Experiment Name: At_Drought_Reproduction_P Parameter: Organism Value: A. thaliana
  misc_feature: MA Experiment 20001904 PARAMETER Experiment Name: At_Drought_Reproduction_P Parameter: Plant Line Value: WS
  misc_feature: MA Experiment 20001904 PARAMETER Experiment Name: At_Drought_Reproduction_P Parameter: Timepoint (day) Value: 7
  misc_feature: MA Experiment 20001904 PARAMETER Experiment Name: At_Drought_Reproduction_P Parameter: Tissue Value: Rosettes
  misc_feature: MA Experiment 20001904 PARAMETER Experiment Name: At_Drought_Reproduction_P Parameter: Treatment Value: Drought vs. No Drought
  misc_feature: MA Experiment ID: 20001906 Result: Down-regulated in Transcription
  misc_feature: MA Experiment 20001906 PARAMETER Experiment Name: At_Drought_Reproduction_P Parameter: Age (day) Value: 35
  misc_feature: MA Experiment 20001906 PARAMETER Experiment Name: At_Drought_Reproduction_P Parameter: Organism Value: A. thaliana
  misc_feature: MA Experiment 20001906 PARAMETER Experiment Name: At_Drought_Reproduction_P Parameter: Plant Line Value: WS
  misc_feature: MA Experiment 20001906 PARAMETER Experiment Name: At_Drought_Reproduction_P Parameter: Timepoint (day) Value: 5
  misc_feature: MA Experiment 20001906 PARAMETER Experiment Name: At_Drought_Reproduction_P Parameter: Tissue Value: Siliques
  misc_feature: MA Experiment 20001906 PARAMETER Experiment Name: At_Drought_Reproduction_P Parameter: Treatment Value: Drought vs. No Drought
  misc_feature: MA Experiment ID: 20001908 Result: Down-regulated in Transcription
  misc_feature: MA Experiment 20001908 PARAMETER Experiment Name: At_Drought_Reproduction_P Parameter: Age (day) Value: 40
  misc_feature: MA Experiment 20001908 PARAMETER Experiment Name: At_Drought_Reproduction_P Parameter: Organism Value: A. thaliana
  misc_feature: MA Experiment 20001908 PARAMETER Experiment Name: At_Drought_Reproduction_P Parameter: Plant Line Value: WS
  misc_feature: MA Experiment 20001908 PARAMETER Experiment Name: At_Drought_Reproduction_P Parameter: Timepoint (day) Value: 10
  misc_feature: MA Experiment 20001908 PARAMETER Experiment Name: At_Drought_Reproduction_P Parameter: Tissue Value: Siliques
  misc_feature: MA Experiment 20001908 PARAMETER Experiment Name: At_Drought_Reproduction_P Parameter: Treatment Value: Drought vs. No Drought
accttataggagcagtttcgtctcttcctcgttctttcacttagctcttcctagtgttaaaccagagtaaagcttgaaactttggactaaaagaatggcgtctttgggtgtgtcggaaatgcttggtactccccttaacttcagggcagtttcaagatcgtctgctccgttggcatcaagcccatccacgttcaagactgttgctctcttctctaagaaaaagccagctcctgctaagtccaaggctgtctctgagactagcgatgagctcgccaagtggtatggtcctgacaggagaattttcttgcctgatggtcttttggatagatcagagatcccagagtacttaaacggtgaagttgctggagattatggttatgacccatttggtcttggaaagaagcctgagaactttgctaaataccaagcttttgaattgatccatgcgagatgggctatgttaggagcagctggtttcatcattcctgaagctttaaacaaatatggcgctaactgtggccctgaagctgtctggtttaagactggtgctttgcttcttgatggaaacacattgaactactttggcaagaacatccctatcaaccttgttctcgccgtagttgctgaggttgttctcctcggtggagccgagtactacagaatcaccaacggattggatttcgaggacaagctacacccaggaggtccatttgatcctctaggccttgctaaggaccctgagcaaggagctcttctcaaagtcaaagagatcaagaacgggagattagccatgtttgcgatgctcggtttctttatccaagcgtatgttaccggagaaggtcctgttgagaaccttgcaaagcatctcagtgatccttttggaaacaacttgcttaccgtcatcgctggaactgccgagagagctcccactctctaagccatttctactttttttaagagcttccaaaatgtacactttgttcgattggaactccttttgacaatgttaaaaaaacttccatctgaattttccttgatatatttcaatggtgctttatcatgcttctaagc

SEQ ID NO: 25086 - protein, 280 aa, Arabidopsis thaliana
  peptide (1)..(280): Ceres Seq. ID no. 12385270
  misc_feature (80)..(244): Pfam Name: Chlorophyll A-B binding protein Pfam Description: Chlorophyll A-B binding protein
  misc_feature (80)..(244): Pfam Name: Chlorophyll A-B binding protein Pfam Description: Chlorophyll A-B binding protein
  misc_feature (110)..(280): Homolog of NCBI NO: 15487754 NR Description: ASCAB9 [Centromadia pungens]
  misc_feature (2)..(280): Homolog of NCBI NO: 322391 NR Description: chlorophyll a/b-binding protein Lhcb5 - Scotch
  misc_feature (1)..(280): Homolog of NCBI NO: 7443226 NR Description: chlorophyll a/b-binding protein CP26 precursor -
  misc_feature (1)..(280): Homolog of NCBI NO: 100573 NR Description: chlorophyll a/b-binding protein CP29 precursor -
  misc_feature (1)..(280): Homolog of NCBI NO: 7443227 NR Description: chlorophyll a/b-binding protein CP26 precursor -
  misc_feature (110)..(280): Homolog of NCBI NO: 15487754 NR Description: ASCAB9 [Centromadia pungens]
  misc_feature (1)..(280): Homolog of NCBI NO: 7443226 NR Description: chlorophyll a/b-binding protein CP26 precursor -
  misc_feature (1)..(280): Homolog of NCBI NO: 7443227 NR Description: chlorophyll a/b-binding protein CP26 precursor -
  misc_feature (1)..(280): Homolog of NCBI NO: 15235029 NR Description: light-harvesting chlorophyll a/b binding protein
  misc_feature (1)..(280): Homolog of NCBI NO: 21593520 NR Description: chlorophyll a/b-binding protein-like [Arabidopsis
  misc_feature (3)..(280): Homolog of NCBI NO: 1644289 NR Description: chlorophyll a/b-binding protein CP26 in PS II
  misc_feature (3)..(280): Homolog of NCBI NO: 100200 NR Description: chlorophyll a/b-binding protein type I precursor
  misc_feature (3)..(280): Homolog of NCBI NO: 19184 NR Description: Type I (26 kD) CP29 polypeptide [Lycopersicon
  misc_feature (1)..(280): Homolog of NCBI NO: 100573 NR Description: chlorophyll a/b-binding protein CP29 precursor -
  misc_feature (2)..(280): Homolog of NCBI NO: 322391 NR Description: chlorophyll a/b-binding protein Lhcb5 - Scotch
  misc_feature (3)..(280): Homolog of NCBI NO: 19184 NR Description: Type I (26 kD) CP29 polypeptide [Lycopersicon
  misc_feature (3)..(280): Homolog of NCBI NO: 100200 NR Description: chlorophyll a/b-binding protein type I precursor
  misc_feature (3)..(280): Homolog of NCBI NO: 1644289 NR Description: chlorophyll a/b-binding protein CP26 in PS II
  misc_feature (1)..(280): Homolog of NCBI NO: 21593520 NR Description: chlorophyll a/b-binding protein-like [Arabidopsis
  misc_feature (1)..(280): Homolog of NCBI NO: 15235029 NR Description: light-harvesting chlorophyll a/b binding protein
MASLGVSEMLGTPLNFRAVSRSSAPLASSPSTFKTVALFSKKKPAPAKSKAVSETSDELAKWYGPDRRIFLPDGLLDRSEIPEYLNGEVAGDYGYDPFGLGKKPENFAKYQAFELIHARWAMLGAAGFIIPEALNKYGANCGPEAVWFKTGALLLDGNTLNYFGKNIPINLVLAVVAEVVLLGGAEYYRITNGLDFEDKLHPGGPFDPLGLAKDPEQGALLKVKEIKNGRLAMFAMLGFFIQAYVTGEGPVENLAKHLSDPFGNNLLTVIAGTAERAPTL

SEQ ID NO: 25087 - protein, 272 aa, Arabidopsis thaliana
  peptide (1)..(272): Ceres Seq. ID no. 12385271
  misc_feature (72)..(236): Pfam Name: Chlorophyll A-B binding protein Pfam Description: Chlorophyll A-B binding protein
  misc_feature (72)..(236): Pfam Name: Chlorophyll A-B binding protein Pfam Description: Chlorophyll A-B binding protein
  misc_feature (102)..(272): Homolog of NCBI NO: 15487754 NR Description: ASCAB9 [Centromadia pungens]
  misc_feature (1)..(272): Homolog of NCBI NO: 322391 NR Description: chlorophyll a/b-binding protein Lhcb5 - Scotch
  misc_feature (1)..(272): Homolog of NCBI NO: 7443226 NR Description: chlorophyll a/b-binding protein CP26 precursor -
  misc_feature (1)..(272): Homolog of NCBI NO: 100573 NR Description: chlorophyll a/b-binding protein CP29 precursor -
  misc_feature (1)..(272): Homolog of NCBI NO: 7443227 NR Description: chlorophyll a/b-binding protein CP26 precursor -
  misc_feature (102)..(272): Homolog of NCBI NO: 15487754 NR Description: ASCAB9 [Centromadia pungens]
  misc_feature (1)..(272): Homolog of NCBI NO: 7443226 NR Description: chlorophyll a/b-binding protein CP26 precursor -
  misc_feature (1)..(272): Homolog of NCBI NO: 7443227 NR Description: chlorophyll a/b-binding protein CP26 precursor -
  misc_feature (1)..(272): Homolog of NCBI NO: 15235029 NR Description: light-harvesting chlorophyll a/b binding protein
  misc_feature (1)..(272): Homolog of NCBI NO: 21593520 NR Description: chlorophyll a/b-binding protein-like [Arabidopsis
  misc_feature (1)..(272): Homolog of NCBI NO: 1644289 NR Description: chlorophyll a/b-binding protein CP26 in PS II
  misc_feature (1)..(272): Homolog of NCBI NO: 100200 NR Description: chlorophyll a/b-binding protein type I precursor
  misc_feature (1)..(272): Homolog of NCBI NO: 19184 NR Description: Type I (26 kD) CP29 polypeptide [Lycopersicon
  misc_feature (1)..(272): Homolog of NCBI NO: 100573 NR Description: chlorophyll a/b-binding protein CP29 precursor -
  misc_feature (1)..(272): Homolog of NCBI NO: 322391 NR Description: chlorophyll a/b-binding protein Lhcb5 - Scotch
  misc_feature (1)..(272): Homolog of NCBI NO: 19184 NR Description: Type I (26 kD) CP29 polypeptide [Lycopersicon
  misc_feature (1)..(272): Homolog of NCBI NO: 100200 NR Description: chlorophyll a/b-binding protein type I precursor
  misc_feature (1)..(272): Homolog of NCBI NO: 1644289 NR Description: chlorophyll a/b-binding protein CP26 in PS II
  misc_feature (1)..(272): Homolog of NCBI NO: 21593520 NR Description: chlorophyll a/b-binding protein-like [Arabidopsis
  misc_feature (1)..(272): Homolog of NCBI NO: 15235029 NR Description: light-harvesting chlorophyll a/b binding protein
MLGTPLNFRAVSRSSAPLASSPSTFKTVALFSKKKPAPAKSKAVSETSDELAKWYGPDRRIFLPDGLLDRSEIPEYLNGEVAGDYGYDPFGLGKKPENFAKYQAFELIHARWAMLGAAGFIIPEALNKYGANCGPEAVWFKTGALLLDGNTLNYFGKNIPINLVLAVVAEVVLLGGAEYYRITNGLDFEDKLHPGGPFDPLGLAKDPEQGALLKVKEIKNGRLAMFAMLGFFIQAYVTGEGPVENLAKHLSDPFGNNLLTVIAGTAERAPTL

SEQ ID NO: 25088 - protein, 159 aa, Arabidopsis thaliana
  peptide (1)..(159): Ceres Seq. ID no. 12385272
  misc_feature (1)..(123): Pfam Name: Chlorophyll A-B binding protein Pfam Description: Chlorophyll A-B binding protein
  misc_feature (1)..(123): Pfam Name: Chlorophyll A-B binding protein Pfam Description: Chlorophyll A-B binding protein
  misc_feature (1)..(159): Homolog of NCBI NO: 15487754 NR Description: ASCAB9 [Centromadia pungens]
  misc_feature (1)..(159): Homolog of NCBI NO: 322391 NR Description: chlorophyll a/b-binding protein Lhcb5 - Scotch
  misc_feature (1)..(159): Homolog of NCBI NO: 7443226 NR Description: chlorophyll a/b-binding protein CP26 precursor -
  misc_feature (1)..(159): Homolog of NCBI NO: 100573 NR Description: chlorophyll a/b-binding protein CP29 precursor -
  misc_feature (1)..(159): Homolog of NCBI NO: 7443227 NR Description: chlorophyll a/b-binding protein CP26 precursor -
  misc_feature (1)..(159): Homolog of NCBI NO: 15487754 NR Description: ASCAB9 [Centromadia pungens]
  misc_feature (1)..(159): Homolog of NCBI NO: 7443226 NR Description: chlorophyll a/b-binding protein CP26 precursor -
  misc_feature (1)..(159): Homolog of NCBI NO: 7443227 NR Description: chlorophyll a/b-binding protein CP26 precursor -
  misc_feature (1)..(159): Homolog of NCBI NO: 15235029 NR Description: light-harvesting chlorophyll a/b binding protein
  misc_feature (1)..(159): Homolog of NCBI NO: 21593520 NR Description: chlorophyll a/b-binding protein-like [Arabidopsis
  misc_feature (1)..(159): Homolog of NCBI NO: 1644289 NR Description: chlorophyll a/b-binding protein CP26 in PS II
  misc_feature (1)..(159): Homolog of NCBI NO: 100200 NR Description: chlorophyll a/b-binding protein type I precursor
  misc_feature (1)..(159): Homolog of NCBI NO: 19184 NR Description: Type I (26 kD) CP29 polypeptide [Lycopersicon
  misc_feature (1)..(159): Homolog of NCBI NO: 100573 NR Description: chlorophyll a/b-binding protein CP29 precursor -
  misc_feature (1)..(159): Homolog of NCBI NO: 322391 NR Description: chlorophyll a/b-binding protein Lhcb5 - Scotch
  misc_feature (1)..(159): Homolog of NCBI NO: 19184 NR Description: Type I (26 kD) CP29 polypeptide [Lycopersicon
  misc_feature (1)..(159): Homolog of NCBI NO: 100200 NR Description: chlorophyll a/b-binding protein type I precursor
  misc_feature (1)..(159): Homolog of NCBI NO: 1644289 NR Description: chlorophyll a/b-binding protein CP26 in PS II
  misc_feature (1)..(159): Homolog of NCBI NO: 21593520 NR Description: chlorophyll a/b-binding protein-like [Arabidopsis
  misc_feature (1)..(159): Homolog of NCBI NO: 15235029 NR Description: light-harvesting chlorophyll a/b binding protein
MLGAAGFIIPEALNKYGANCGPEAVWFKTGALLLDGNTLNYFGKNIPINLVLAVVAEVVLLGGAEYYRITNGLDFEDKLHPGGPFDPLGLAKDPEQGALLKVKEIKNGRLAMFAMLGFFIQAYVTGEGPVENLAKHLSDPFGNNLLTVIAGTAERAPTL

SEQ ID NO: 25089 - DNA, 939 bp, Arabidopsis thaliana
  misc_feature (1)..(939): Ceres Seq. ID no. 12322431
  misc_feature: MA Experiment ID: 108435 Result: Down-regulated in Transcription
  misc_feature: MA Experiment 108435 PARAMETER Experiment Name: At_stm_Mutants_cDNA_P Parameter: Plant Line Value: wt Landsburg vs stm
  misc_feature: MA Experiment 108435 PARAMETER Experiment Name: At_stm_Mutants_cDNA_P Parameter: Tissue Value: Shoot Apical Meristem Region
  misc_feature: MA Experiment ID: 108463 Result: Down-regulated in Transcription
  misc_feature: MA Experiment 108463 PARAMETER Experiment Name: At_Germinating_Seeds_cDNA_P Parameter: Age (day) Value: 3 vs. 0
  misc_feature: MA Experiment 108463 PARAMETER Experiment Name: At_Germinating_Seeds_cDNA_P Parameter: Tissue Value: Germinating Seeds
  misc_feature: MA Experiment ID: 108488 Result: Up-regulated in Transcription
  misc_feature: MA Experiment ID: 108573 Result: Up-regulated in Transcription
  misc_feature: MA Experiment 108573 PARAMETER Experiment Name: At_Drought_cDNA_P Parameter: Timepoint (hr) Value: 6
  misc_feature: MA Experiment 108573 PARAMETER Experiment Name: At_Drought_cDNA_P Parameter: Tissue Value: Aerial
  misc_feature: MA Experiment 108573 PARAMETER Experiment Name: At_Drought_cDNA_P Parameter: Treatment Value: Drought vs. No Drought
  misc_feature: MA Experiment ID: 20000068 Result: Down-regulated in Transcription
  misc_feature: MA Experiment ID: 20000071 Result: Down-regulated in Transcription
  misc_feature: MA Experiment 20000071 PARAMETER Experiment Name: At_100uM_ABA_Mutants_cDNA_P Parameter: Plant Line Value: CS8104
  misc_feature: MA Experiment 20000071 PARAMETER Experiment Name: At_100uM_ABA_Mutants_cDNA_P Parameter: Timepoint (hr) Value: 6
  misc_feature: MA Experiment 20000071 PARAMETER Experiment Name: At_100uM_ABA_Mutants_cDNA_P Parameter: Tissue Value: Aerial
  misc_feature: MA Experiment 20000071 PARAMETER Experiment Name: At_100uM_ABA_Mutants_cDNA_P Parameter: Treatment Value: 100uM ABA vs. No Treatment
  misc_feature: MA Experiment ID: 20000072 Result: Down-regulated in Transcription
  misc_feature: MA Experiment 20000072 PARAMETER Experiment Name: At_100uM_ABA_Mutants_cDNA_P Parameter: Plant Line Value: CS8105
  misc_feature: MA Experiment 20000072 PARAMETER Experiment Name: At_100uM_ABA_Mutants_cDNA_P Parameter: Timepoint (hr) Value: 6
  misc_feature: MA Experiment 20000072 PARAMETER Experiment Name: At_100uM_ABA_Mutants_cDNA_P Parameter: Tissue Value: Aerial
  misc_feature: MA Experiment 20000072 PARAMETER Experiment Name: At_100uM_ABA_Mutants_cDNA_P Parameter: Treatment Value: 100uM ABA vs. No Treatment
  misc_feature: MA Experiment ID: 20000117 Result: Down-regulated in Transcription
  misc_feature: MA Experiment 20000117 PARAMETER Experiment Name: At_100uM_ABA_Mutants_cDNA_P Parameter: Plant Line Value: Columbia
  misc_feature: MA Experiment 20000117 PARAMETER Experiment Name: At_100uM_ABA_Mutants_cDNA_P Parameter: Timepoint (hr) Value: 6
  misc_feature: MA Experiment 20000117 PARAMETER Experiment Name: At_100uM_ABA_Mutants_cDNA_P Parameter: Tissue Value: Aerial
  misc_feature: MA Experiment 20000117 PARAMETER Experiment Name: At_100uM_ABA_Mutants_cDNA_P Parameter: Treatment Value: 100uM ABA vs. No Treatment
  misc_feature: MA Experiment ID: 20000180 Result: Up-regulated in Transcription
  misc_feature: MA Experiment 20000180 PARAMETER Experiment Name: At_Germinating_Seeds_P Parameter: Age (hr) Value: 24 vs. 0
  misc_feature: MA Experiment 20000180 PARAMETER Experiment Name: At_Germinating_Seeds_P Parameter: Tissue Value: Germinating Seeds
  misc_feature: MA Experiment ID: 20000184 Result: Up-regulated in Transcription
  misc_feature: MA Experiment 20000184 PARAMETER Experiment Name: At_Shoots__P Parameter: Age (day) Value: 7
  misc_feature: MA Experiment 20000184 PARAMETER Experiment Name: At_Shoots__P Parameter: Tissue Value: Shoots vs. Whole Plant
  misc_feature: MA Experiment ID: 20000185 Result: Down-regulated in Transcription
  misc_feature: MA Experiment 20000185 PARAMETER Experiment Name: At_Roots__P Parameter: Age (day) Value: 7 vs. 21
  misc_feature: MA Experiment 20000185 PARAMETER Experiment Name: At_Roots__P Parameter: Organism Value: A. thaliana
  misc_feature: MA Experiment 20000185 PARAMETER Experiment Name: At_Roots__P Parameter: Tissue Value: Roots vs. Whole Plant
  misc_feature: MA Experiment ID: 20000264 Result: Down-regulated in Transcription
  misc_feature: MA Experiment 20000264 PARAMETER Experiment Name: At_Open_Flower_P Parameter: Age (day) Value: 21
  misc_feature: MA Experiment 20000264 PARAMETER Experiment Name: At_Open_Flower_P Parameter: Plant Line Value: WS
  misc_feature: MA Experiment 20000264 PARAMETER Experiment Name: At_Open_Flower_P Parameter: Tissue Value: Open Flower vs. Whole Plant
  misc_feature: MA Experiment ID: 20000269 Result: Up-regulated in Transcription
  misc_feature: MA Experiment 20000269 PARAMETER Experiment Name: At_1mM_KNO3_L-vs-H_Roots_P Parameter: Age (day) Value: 7,10,12
  misc_feature: MA Experiment 20000269 PARAMETER Experiment Name: At_1mM_KNO3_L-vs-H_Roots_P Parameter: Organism Value: A. thaliana
  misc_feature: MA Experiment 20000269 PARAMETER Experiment Name: At_1mM_KNO3_L-vs-H_Roots_P Parameter: Plant Line Value: WS
  misc_feature: MA Experiment 20000269 PARAMETER Experiment Name: At_1mM_KNO3_L-vs-H_Roots_P Parameter: Timepoint (day) Value: 7,10,12
  misc_feature: MA Experiment 20000269 PARAMETER Experiment Name: At_1mM_KNO3_L-vs-H_Roots_P Parameter: Tissue Value: Roots
  misc_feature: MA Experiment 20000269 PARAMETER Experiment Name: At_1mM_KNO3_L-vs-H_Roots_P Parameter: Treatment Value: 1mM KNO3 vs. 50mM KNO3
  misc_feature: MA Experiment ID: 20000286 Result: Down-regulated in Transcription
  misc_feature: MA Experiment 20000286 PARAMETER Experiment Name: At_Open_Flower_P Parameter: Age (day) Value: 21
  misc_feature: MA Experiment 20000286 PARAMETER Experiment Name: At_Open_Flower_P Parameter: Plant Line Value: WS
  misc_feature: MA Experiment 20000286 PARAMETER Experiment Name: At_Open_Flower_P Parameter: Tissue Value: Half Open vs. Whole Plant
  misc_feature: MA Experiment ID: 20000436 Result: Down-regulated in Transcription
  misc_feature: MA Experiment 20000436 PARAMETER Experiment Name: At_Drought_P Parameter: Age (day) Value: 7
  misc_feature: MA Experiment 20000436 PARAMETER Experiment Name: At_Drought_P Parameter: Organism Value: A. thaliana
  misc_feature: MA Experiment 20000436 PARAMETER Experiment Name: At_Drought_P Parameter: Plant Line Value: WS
  misc_feature: MA Experiment 20000436 PARAMETER Experiment Name: At_Drought_P Parameter: Timepoint (hr) Value: 12
  misc_feature: MA Experiment 20000436 PARAMETER Experiment Name: At_Drought_P Parameter: Tissue Value: Whole Plant
  misc_feature: MA Experiment 20000436 PARAMETER Experiment Name: At_Drought_P Parameter: Treatment Value: Drought vs. No Drought
  misc_feature: MA Experiment ID: 20000437 Result: Down-regulated in Transcription
  misc_feature: MA Experiment 20000437 PARAMETER Experiment Name: At_Drought_P Parameter: Age (day) Value: 8
  misc_feature: MA Experiment 20000437 PARAMETER Experiment Name: At_Drought_P Parameter: Organism Value: A. thaliana
  misc_feature: MA Experiment 20000437 PARAMETER Experiment Name: At_Drought_P Parameter: Plant Line Value: WS
  misc_feature: MA Experiment 20000437 PARAMETER Experiment Name: At_Drought_P Parameter: Timepoint (hr) Value: 24
  misc_feature: MA Experiment 20000437 PARAMETER Experiment Name: At_Drought_P Parameter: Tissue Value: Whole Plant
  misc_feature: MA Experiment 20000437 PARAMETER Experiment Name: At_Drought_P Parameter: Treatment Value: Drought vs. No Drought
  misc_feature: MA Experiment ID: 20000439 Result: Down-regulated in Transcription
  misc_feature: MA Experiment 20000439 PARAMETER Experiment Name: At_Roots__P Parameter: Age (day) Value: 14 vs. 21
  misc_feature: MA Experiment 20000439 PARAMETER Experiment Name: At_Roots__P Parameter: Organism Value: A. thaliana
  misc_feature: MA Experiment 20000439 PARAMETER Experiment Name: At_Roots__P Parameter: Tissue Value: Roots vs. Whole Plant
  misc_feature: MA Experiment ID: 20000445 Result: Down-regulated in Transcription
  misc_feature: MA Experiment 20000445 PARAMETER Experiment Name: At_100uM_NAA__P Parameter: Age (day) Value: 14
  misc_feature: MA Experiment 20000445 PARAMETER Experiment Name: At_100uM_NAA__P Parameter: Organism Value: A. thaliana
  misc_feature: MA Experiment 20000445 PARAMETER Experiment Name: At_100uM_NAA__P Parameter: Plant Line Value: WS
  misc_feature: MA Experiment 20000445 PARAMETER Experiment Name: At_100uM_NAA__P Parameter: Timepoint (hr) Value: 6
  misc_feature: MA Experiment 20000445 PARAMETER Experiment Name: At_100uM_NAA__P Parameter: Tissue Value: Aerial
  misc_feature: MA Experiment 20000445 PARAMETER Experiment Name: At_100uM_NAA__P Parameter: Treatment Value: 100uM NAA vs. No Treatment
  misc_feature: MA Experiment ID: 20000527 Result: Up-regulated in Transcription
  misc_feature: MA Experiment 20000527 PARAMETER Experiment Name: At_10percent_PEG_P Parameter: Age (day) Value: 20
  misc_feature: MA Experiment 20000527 PARAMETER Experiment Name: At_10percent_PEG_P Parameter: Organism Value: A. thaliana
  misc_feature: MA Experiment 20000527 PARAMETER Experiment Name: At_10percent_PEG_P Parameter: Plant Line Value: WS
  misc_feature: MA Experiment 20000527 PARAMETER Experiment Name: At_10percent_PEG_P Parameter: Timepoint (day) Value: 20
  misc_feature: MA Experiment 20000527 PARAMETER Experiment Name: At_10percent_PEG_P Parameter: Tissue Value: Whole Plant
  misc_feature: MA Experiment 20000527 PARAMETER Experiment Name: At_10percent_PEG_P Parameter: Treatment Value: 10percent PEG vs. No Treatment
  misc_feature: MA Experiment ID: 20000574 Result: Up-regulated in Transcription
  misc_feature: MA Experiment 20000574 PARAMETER Experiment Name: At_100uM_ABA_Mutants__P Parameter: Organism Value: A. thaliana
  misc_feature: MA Experiment 20000574 PARAMETER Experiment Name: At_100uM_ABA_Mutants__P Parameter: Plant Line Value: CS23 vs. Ler wt
  misc_feature: MA Experiment 20000574 PARAMETER Experiment Name: At_100uM_ABA_Mutants__P Parameter: Timepoint (hr) Value: N/A
  misc_feature: MA Experiment 20000574 PARAMETER Experiment Name: At_100uM_ABA_Mutants__P Parameter: Tissue Value: Whole Plant
  misc_feature: MA Experiment 20000574 PARAMETER Experiment Name: At_100uM_ABA_Mutants__P Parameter: Treatment Value: None
  misc_feature: MA Experiment ID: 20000576 Result: Up-regulated in Transcription
  misc_feature: MA Experiment 20000576 PARAMETER Experiment Name: At_100uM_ABA_Mutants__P Parameter: Organism Value: A. thaliana
  misc_feature: MA Experiment 20000576 PARAMETER Experiment Name: At_100uM_ABA_Mutants__P Parameter: Plant Line Value: CS23
  misc_feature: MA Experiment 20000576 PARAMETER Experiment Name: At_100uM_ABA_Mutants__P Parameter: Timepoint (hr) Value: 6
  misc_feature: MA Experiment 20000576 PARAMETER Experiment Name: At_100uM_ABA_Mutants__P Parameter: Tissue Value: Whole Plant
  misc_feature: MA Experiment 20000576 PARAMETER Experiment Name: At_100uM_ABA_Mutants__P Parameter: Treatment Value: 1uM ABA vs. No Treatment
  misc_feature: MA Experiment ID: 20000794 Result: Down-regulated in Transcription
  misc_feature: MA Experiment 20000794 PARAMETER Experiment Name: At_Petals_P Parameter: Age (day) Value: 23-25 days
  misc_feature: MA Experiment 20000794 PARAMETER Experiment Name: At_Petals_P Parameter: Plant Line Value: WS
  misc_feature: MA Experiment 20000794 PARAMETER Experiment Name: At_Petals_P Parameter: Tissue Value: Petals vs. Whole plant
  misc_feature: MA Experiment ID: 20001553 Result: Down-regulated in Transcription
  misc_feature: MA Experiment 20001553 PARAMETER Experiment Name: At_Drought_Soil_Dry_P Parameter: Age (day) Value: 19
  misc_feature: MA Experiment 20001553 PARAMETER Experiment Name: At_Drought_Soil_Dry_P Parameter: Organism Value: A. thaliana
  misc_feature: MA Experiment 20001553 PARAMETER Experiment Name: At_Drought_Soil_Dry_P Parameter: Plant Line Value: WS
  misc_feature: MA Experiment 20001553 PARAMETER Experiment Name: At_Drought_Soil_Dry_P Parameter: Post Timepoint (hr) Value: None
  misc_feature: MA Experiment 20001553 PARAMETER Experiment Name: At_Drought_Soil_Dry_P Parameter: Post-Treatment Value: None
  misc_feature: MA Experiment 20001553 PARAMETER Experiment Name: At_Drought_Soil_Dry_P Parameter: Timepoint (day) Value: 5
  misc_feature: MA Experiment 20001553 PARAMETER Experiment Name: At_Drought_Soil_Dry_P Parameter: Treatment Value: Drought vs. No Drought
  misc_feature: MA Experiment ID: 20001560 Result: Up-regulated in Transcription
  misc_feature: MA Experiment 20001560 PARAMETER Experiment Name: At_Drought_Soil_Dry_P Parameter: Age (day) Value: 28
  misc_feature: MA Experiment 20001560 PARAMETER Experiment Name: At_Drought_Soil_Dry_P Parameter: Organism Value: A. thaliana
  misc_feature: MA Experiment 20001560 PARAMETER Experiment Name: At_Drought_Soil_Dry_P Parameter: Plant Line Value: WS
  misc_feature: MA Experiment 20001560 PARAMETER Experiment Name: At_Drought_Soil_Dry_P Parameter: Post Timepoint (hr) Value: None
  misc_feature: MA Experiment 20001560 PARAMETER Experiment Name: At_Drought_Soil_Dry_P Parameter: Post-Treatment Value: None
  misc_feature: MA Experiment 20001560 PARAMETER Experiment Name: At_Drought_Soil_Dry_P Parameter: Timepoint (day) Value: 14
  misc_feature: MA Experiment 20001560 PARAMETER Experiment Name: At_Drought_Soil_Dry_P Parameter: Treatment Value: Drought vs. No Drought
  misc_feature: MA Experiment ID: 20001757 Result: Up-regulated in Transcription
  misc_feature: MA Experiment 20001757 PARAMETER Experiment Name: At_50mM_NH4NO3_L-to-H_P Parameter: Timepoint (hr) Value: 6
  misc_feature: MA Experiment 20001757 PARAMETER Experiment Name: At_50mM_NH4NO3_L-to-H_P Parameter: Tissue Value: Leaf
  misc_feature: MA Experiment 20001757 PARAMETER Experiment Name: At_50mM_NH4NO3_L-to-H_P Parameter: Treatment Value: 50mM NH4NO3 vs 100mM Mannitol
atttttgtgcctactcatttcctccaaacgtcaaacatagcagcagccatggctgccaccaacacaatcctcgcattctcatctccttctcgtcttctcattcctccttcctccaatccttcaactctccgttcctctttccgcggcgtctctctcaacaacaacaatctccaccgtctccaatctgtttccttcgccgttaaagctccgtcgaaagcgttgacagttgtttccgcggcgaagaaggctgttgcagtgcttaaaggtacttctgatgtcgaaggagttgttactttgacccaagatgactcaggtcctacaactgtgaatgttcgtatcactggtctcactccagggcctcatggatttcatctccatgagtttggtgatacaactaatggatgtatctcaacaggaccacatttcaaccctaacaacatgacacacggagctccagaagatgagtgccgtcatgcgggtgacctgggaaacataaatgccaatgccgatggcgtggcagaaacaacaatagtggacaatcagattcctctgactggtcctaattctgttgttggaagagcctttgtggttcacgagcttaaggatgacctcggaaagggtggccatgagcttagtctgaccactggaaacgcaggcgggagattggcatgtggtgtgattggcttgacgccgctctaagtcagaggctaagcaagtactcttatgtctactgtgttgatcttgtctgtttgaacagatgtaagaatcttagcaaataatgtttggcttaataaactttgatgtttatgttcattgcatcaatttttctctttttgaatttgtgacagtgatgtgtttacttttgatacaactttgtgtttgatcgtttaagtacattttggtttatttagcatcctttttattcagttcaagattgtg

SEQ ID NO: 25090 - protein, 232 aa, Arabidopsis thaliana
  peptide (1)..(232): Ceres Seq. ID no. 12322432
  misc_feature (80)..(231): Pfam Name: Copper/zinc superoxide dismutase (SODC) Pfam Description: Copper/zinc superoxide dismutase (SODC)
  misc_feature (17)..(232): Homolog of NCBI NO: 33327349 NR Description: superoxidase dismutase [Lycopersicon esculentum]
  misc_feature (30)..(232): Homolog of NCBI NO: 134683 NR Description: Superoxide dismutase [Cu-Zn], chloroplast
  misc_feature (17)..(232): Homolog of NCBI NO: 134682 NR Description: Superoxide dismutase [Cu-Zn], chloroplast
  misc_feature (30)..(232): Homolog of NCBI NO: 20900 NR Description: Cu/Zn superoxide dismutase II [Pisum sativum]
  misc_feature (19)..(232): Homolog of NCBI NO: 134686 NR Description: Superoxide dismutase [Cu-Zn], chloroplast
  misc_feature (19)..(232): Homolog of NCBI NO: 3914999 NR Description: Superoxide dismutase [Cu-Zn], chloroplast
  misc_feature (17)..(230): Homolog of NCBI NO: 25285791 NR Description: probable copper/zinc superoxide dismutase
  misc_feature (17)..(232): Homolog of NCBI NO: 5689611 NR Description: copper/zinc superoxide dismutase [Arabidopsis
  misc_feature (17)..(232): Homolog of NCBI NO: 11358868 NR Description: superoxide dismutase (EC 1.15.1.1) (Cu-Zn)
  misc_feature (17)..(232): Homolog of NCBI NO: 18401659 NR Description: copper/zinc superoxide dismutase (CSD2)
IFVPTHFLQTSNIAAAMAATNTILAFSSPSRLLIPPSSNPSTLRSSFRGVSLNNNNLHRLQSVSFAVKAPSKALTVVSAAKKAVAVLKGTSDVEGVVTLTQDDSGPTTVNVRITGLTPGPHGFHLHEFGDTTNGCISTGPHFNPNNMTHGAPEDECRHAGDLGNINANADGVAETTIVDNQIPLTGPNSVVGRAFVVHELKDDLGKGGHELSLTTGNAGGRLACGVIGLTPL

SEQ ID NO: 25091 - protein, 216 aa, Arabidopsis thaliana
  peptide (1)..(216): Ceres Seq. ID no. 12322433
  misc_feature (64)..(215): Pfam Name: Copper/zinc superoxide dismutase (SODC) Pfam Description: Copper/zinc superoxide dismutase (SODC)
  misc_feature (1)..(216): Homolog of NCBI NO: 33327349 NR Description: superoxidase dismutase [Lycopersicon esculentum]
  misc_feature (14)..(216): Homolog of NCBI NO: 134683 NR Description: Superoxide dismutase [Cu-Zn], chloroplast
  misc_feature (1)..(216): Homolog of NCBI NO: 134682 NR Description: Superoxide dismutase [Cu-Zn], chloroplast
  misc_feature (14)..(216): Homolog of NCBI NO: 20900 NR Description: Cu/Zn superoxide dismutase II [Pisum sativum]
  misc_feature (3)..(216): Homolog of NCBI NO: 134686 NR Description: Superoxide dismutase [Cu-Zn], chloroplast
  misc_feature (3)..(216): Homolog of NCBI NO: 3914999 NR Description: Superoxide dismutase [Cu-Zn], chloroplast
  misc_feature (1)..(214): Homolog of NCBI NO: 25285791 NR Description: probable copper/zinc superoxide dismutase
  misc_feature (1)..(216): Homolog of NCBI NO: 5689611 NR Description: copper/zinc superoxide dismutase [Arabidopsis
  misc_feature (1)..(216): Homolog of NCBI NO: 11358868 NR Description: superoxide dismutase (EC 1.15.1.1) (Cu-Zn)
  misc_feature (1)..(216): Homolog of NCBI NO: 18401659 NR Description: copper/zinc superoxide dismutase (CSD2)
MAATNTILAFSSPSRLLIPPSSNPSTLRSSFRGVSLNNNNLHRLQSVSFAVKAPSKALTVVSAAKKAVAVLKGTSDVEGVVTLTQDDSGPTTVNVRITGLTPGPHGFHLHEFGDTTNGCISTGPHFNPNNMTHGAPEDECRHAGDLGNINANADGVAETTIVDNQIPLTGPNSVVGRAFVVHELKDDLGKGGHELSLTTGNAGGRLACGVIGLTPL

SEQ ID NO: 25092 - DNA, 1210 bp, Arabidopsis thaliana
  misc_feature (1)..(1210): Ceres Seq. ID no. 12370351
  misc_feature: MA Experiment ID: 108434 Result: Up-regulated in Transcription
  misc_feature: MA Experiment 108434 PARAMETER Experiment Name: At_Root_Tips_cDNA_P Parameter: Tissue Value: Root Tips
  misc_feature: MA Experiment ID: 108461 Result: Up-regulated in Transcription
  misc_feature: MA Experiment 108461 PARAMETER Experiment Name: At_Germinating_Seeds_cDNA_P Parameter: Age (day) Value: 1 vs. 0
  misc_feature: MA Experiment 108461 PARAMETER Experiment Name: At_Germinating_Seeds_cDNA_P Parameter: Tissue Value: Germinating Seeds
  misc_feature: MA Experiment ID: 108462 Result: Up-regulated in Transcription
  misc_feature: MA Experiment 108462 PARAMETER Experiment Name: At_Germinating_Seeds_cDNA_P Parameter: Age (day) Value: 2 vs. 0
  misc_feature: MA Experiment 108462 PARAMETER Experiment Name: At_Germinating_Seeds_cDNA_P Parameter: Tissue Value: Germinating Seeds
  misc_feature: MA Experiment ID: 108579 Result: Down-regulated in Transcription
  misc_feature: MA Experiment 108579 PARAMETER Experiment Name: At_4deg_Cold_cDNA_P Parameter: Temperature (deg C) Value: 4 vs. 22
  misc_feature: MA Experiment 108579 PARAMETER Experiment Name: At_4deg_Cold_cDNA_P Parameter: Timepoint (hr) Value: 6
  misc_feature: MA Experiment 108579 PARAMETER Experiment Name: At_4deg_Cold_cDNA_P Parameter: Tissue Value: Aerial
  misc_feature: MA Experiment ID: 20000112 Result: Down-regulated in Transcription
  misc_feature: MA Experiment 20000112 PARAMETER Experiment Name: At_42deg_Heat_cDNA_P Parameter: Temperature (deg C) Value: 42 vs. 22
  misc_feature: MA Experiment 20000112 PARAMETER Experiment Name: At_42deg_Heat_cDNA_P Parameter: Timepoint (hr) Value: 2
  misc_feature: MA Experiment 20000112 PARAMETER Experiment Name: At_42deg_Heat_cDNA_P Parameter: Tissue Value: Aerial
  misc_feature: MA Experiment ID: 20000113 Result: Down-regulated in Transcription
  misc_feature: MA Experiment 20000113 PARAMETER Experiment Name: At_42deg_Heat_cDNA_P Parameter: Temperature (deg C) Value: 42 vs. 22
  misc_feature: MA Experiment 20000113 PARAMETER Experiment Name: At_42deg_Heat_cDNA_P Parameter: Timepoint (hr) Value: 8
  misc_feature: MA Experiment 20000113 PARAMETER Experiment Name: At_42deg_Heat_cDNA_P Parameter: Tissue Value: Aerial
  misc_feature: MA Experiment ID: 20000144 Result: Down-regulated in Transcription
  misc_feature: MA Experiment 20000144 PARAMETER Experiment Name: At_42deg_Heat_cDNA_P Parameter: Temperature (deg C) Value: 42 vs. 22
  misc_feature: MA Experiment 20000144 PARAMETER Experiment Name: At_42deg_Heat_cDNA_P Parameter: Timepoint (hr) Value: 1
  misc_feature: MA Experiment 20000144 PARAMETER Experiment Name: At_42deg_Heat_cDNA_P Parameter: Tissue Value: Aerial
  misc_feature: MA Experiment ID: 20000171 Result: Down-regulated in Transcription
  misc_feature: MA Experiment 20000171 PARAMETER Experiment Name: At_42deg_Heat_P Parameter: Age (day) Value: 14
  misc_feature: MA Experiment 20000171 PARAMETER Experiment Name: At_42deg_Heat_P Parameter: Organism Value: A. thaliana
  misc_feature: MA Experiment 20000171 PARAMETER Experiment Name: At_42deg_Heat_P Parameter: Plant Line Value: WS
  misc_feature: MA Experiment 20000171 PARAMETER Experiment Name: At_42deg_Heat_P Parameter: Temperature (deg C) Value: 42 vs. 22
  misc_feature: MA Experiment 20000171 PARAMETER Experiment Name: At_42deg_Heat_P Parameter: Timepoint (hr) Value: 1
  misc_feature: MA Experiment 20000171 PARAMETER Experiment Name: At_42deg_Heat_P Parameter: Tissue Value: Aerial
  misc_feature: MA Experiment ID: 20000179 Result: Up-regulated in Transcription
  misc_feature: MA Experiment 20000179 PARAMETER Experiment Name: At_Germinating_Seeds_P Parameter: Age (hr) Value: 6 vs. 0
  misc_feature: MA Experiment 20000179 PARAMETER Experiment Name: At_Germinating_Seeds_P Parameter: Tissue Value: Germinating Seeds
  misc_feature: MA Experiment ID: 20000180 Result: Up-regulated in Transcription
  misc_feature: MA Experiment 20000180 PARAMETER Experiment Name: At_Germinating_Seeds_P Parameter: Age (hr) Value: 24 vs. 0
  misc_feature: MA Experiment 20000180 PARAMETER Experiment Name: At_Germinating_Seeds_P Parameter: Tissue Value: Germinating Seeds
  misc_feature: MA Experiment ID: 20000184 Result: Up-regulated in Transcription
  misc_feature: MA Experiment 20000184 PARAMETER Experiment Name: At_Shoots__P Parameter: Age (day) Value: 7
  misc_feature: MA Experiment 20000184 PARAMETER Experiment Name: At_Shoots__P Parameter: Tissue Value: Shoots vs. Whole Plant
  misc_feature: MA Experiment ID: 20000227 Result: Up-regulated in Transcription
  misc_feature: MA Experiment 20000227 PARAMETER Experiment Name: At_Root-Tips-vs-Tops_P Parameter: Tissue Value: Root Tips vs. Root Tops
  misc_feature: MA Experiment ID: 20000451 Result: Up-regulated in Transcription
  misc_feature: MA Experiment 20000451 PARAMETER Experiment Name: At_CS6879_Shoots-Roots_P Parameter: Age (day) Value: 14
  misc_feature: MA Experiment 20000451 PARAMETER Experiment Name: At_CS6879_Shoots-Roots_P Parameter: Organism Value: A. thaliana
  misc_feature: MA Experiment 20000451 PARAMETER Experiment Name: At_CS6879_Shoots-Roots_P Parameter: Plant Line Value: CS6879 vs. WS
  misc_feature: MA Experiment 20000451 PARAMETER Experiment Name: At_CS6879_Shoots-Roots_P Parameter: Tissue Value: Roots
  misc_feature: MA Experiment ID: 20000794 Result: Down-regulated in Transcription
  misc_feature: MA Experiment 20000794 PARAMETER Experiment Name: At_Petals_P Parameter: Age (day) Value: 23-25 days
  misc_feature: MA Experiment 20000794 PARAMETER Experiment Name: At_Petals_P Parameter: Plant Line Value: WS
  misc_feature: MA Experiment 20000794 PARAMETER Experiment Name: At_Petals_P Parameter: Tissue Value: Petals vs. Whole plant
  misc_feature: MA Experiment ID: 20001555 Result: Down-regulated in Transcription
  misc_feature: MA Experiment 20001555 PARAMETER Experiment Name: At_Drought_Soil_Dry_P Parameter: Age (day) Value: 24
  misc_feature: MA Experiment 20001555 PARAMETER Experiment Name: At_Drought_Soil_Dry_P Parameter: Organism Value: A. thaliana
  misc_feature: MA Experiment 20001555 PARAMETER Experiment Name: At_Drought_Soil_Dry_P Parameter: Plant Line Value: WS
  misc_feature: MA Experiment 20001555 PARAMETER Experiment Name: At_Drought_Soil_Dry_P Parameter: Post Timepoint (hr) Value: None
  misc_feature: MA Experiment 20001555 PARAMETER Experiment Name: At_Drought_Soil_Dry_P Parameter: Post-Treatment Value: None
  misc_feature: MA Experiment 20001555 PARAMETER Experiment Name: At_Drought_Soil_Dry_P Parameter: Timepoint (day) Value: 10
  misc_feature: MA Experiment 20001555 PARAMETER Experiment Name: At_Drought_Soil_Dry_P Parameter: Treatment Value: Drought vs. No Drought
  misc_feature: MA Experiment ID: 20001560 Result: Up-regulated in Transcription
  misc_feature: MA Experiment 20001560 PARAMETER Experiment Name: At_Drought_Soil_Dry_P Parameter: Age (day) Value: 28
  misc_feature: MA Experiment 20001560 PARAMETER Experiment Name: At_Drought_Soil_Dry_P Parameter: Organism Value: A. thaliana
  misc_feature: MA Experiment 20001560 PARAMETER Experiment Name: At_Drought_Soil_Dry_P Parameter: Plant Line Value: WS
  misc_feature: MA Experiment 20001560 PARAMETER Experiment Name: At_Drought_Soil_Dry_P Parameter: Post Timepoint (hr) Value: None
  misc_feature: MA Experiment 20001560 PARAMETER Experiment Name: At_Drought_Soil_Dry_P Parameter: Post-Treatment Value: None
  misc_feature: MA Experiment 20001560 PARAMETER Experiment Name: At_Drought_Soil_Dry_P Parameter: Timepoint (day) Value: 14
  misc_feature: MA Experiment 20001560 PARAMETER Experiment Name: At_Drought_Soil_Dry_P Parameter: Treatment Value: Drought vs. No Drought
  misc_feature: MA Experiment ID: 20001911 Result: Down-regulated in Transcription
  misc_feature: MA Experiment 20001911 PARAMETER Experiment Name: At_Drought_Reproduction_P Parameter: Age (day) Value: 40
  misc_feature: MA Experiment 20001911 PARAMETER Experiment Name: At_Drought_Reproduction_P Parameter: Organism Value: A. thaliana
  misc_feature: MA Experiment 20001911 PARAMETER Experiment Name: At_Drought_Reproduction_P Parameter: Plant Line Value: WS
  misc_feature: MA Experiment 20001911 PARAMETER Experiment Name: At_Drought_Reproduction_P Parameter: Timepoint (day) Value: 10
  misc_feature: MA Experiment 20001911 PARAMETER Experiment Name: At_Drought_Reproduction_P Parameter: Tissue Value: Flowers
  misc_feature: MA Experiment 20001911 PARAMETER Experiment Name: At_Drought_Reproduction_P Parameter: Treatment Value: Drought vs. No Drought
aacagatttcgtaacggacaaagttcccaattctttttttttgcataataagatctgaaatcggagatagaaaaaaaaatcacatttttatttccgccggaacaaaaagcgatggttcagtgtagcaacaatctcctcggaatcctcaatttcttcacattcctcctctcaatcccaattctctccgccgggatctggctcggcaaaaatgcagcaaccgaatgcgaacgtttcctcgacaaaccaatggtcgtactcggaatcttcctcatgttcgtctcaatcgccggactcgtcggtgcttgttgccgtgtctcttgcctcctctggctttacctcttcgctatgttcctcctcattctcctcggcttctgtttcacaatcttcgctttcgcagtcacaaaccgcggcgccggtgaggttatatcggatcgagggtataaagagtatcatgtcgccgattactctaattggttgcagaaacgtgtcaacaatgctaagaattgggaacggatcaggagttgtttgatgtactctgacgtttgctccacttatcgtactcgttatgccagcattaacgttgaagatttctacaaatctaatcttaatgctcttcagtctggttgttgtaagccgtccaatgactgtaacttcacctatgtgaacccgactacttggacaaagactcctggtccatacaaaaacgaggactgtaatgtgtgggacaacaaaccaggaactctctgctacgactgtgaagcctgcaaggctggtctgcttgacaacatcaagaactcatggaaaaaggtggctaaggtcaacattgtcttcctcatattcctcattatcgtctactctgttggttgttgtgcgttcaggaacaacaggaaacgcagttggtaatagattctaatgcgttgaaaccaagactaaggccagagaagatatctgaagtgtcatcatcttactgtcaagtaagttaaagcagcatttaagacaactcgttgatcgcttgtcttgtgtgtgggggattgcaatttcaatgtattttctctcttaaatttgcaacataatgagttacaaaagcacttgcttgtgcttctatttcgactcttttgtgtgttgagtagcttatacatctgttgagacgagtgagatttgtaaaagaagttccatttcactttgcgttattatcattttcatattcttc

SEQ ID NO: 25093 - protein, 263 aa, Arabidopsis thaliana
  peptide (1)..(263): Ceres Seq. ID no. 12370352
  misc_feature (4)..(244): Pfam Name: Tetraspanin family Pfam Description: Tetraspanin family
  misc_feature (5)..(257): Homolog of NCBI NO: 17979386 NR Description: putative senescence-associated protein 5
  misc_feature (6)..(260): Homolog of NCBI NO: 15238641 NR Description: senescence-associated protein - like; protein id:
  misc_feature (2)..(260): Homolog of NCBI NO: 15231187 NR Description: putative protein
  misc_feature (79)..(260): Homolog of NCBI NO: 30682205 NR Description: senescence-associated protein family [Arabidopsis
  misc_feature (5)..(260): Homolog of NCBI NO: 29367553 NR Description: senescence-associated protein-like protein
  misc_feature (1)..(260): Homolog of NCBI NO: 3551954 NR Description: senescence-associated protein 5 [Hemerocallis
  misc_feature (1)..(260): Homolog of NCBI NO: 21537169 NR Description: senescence-associated protein-like protein
  misc_feature (1)..(260): Homolog of NCBI NO: 15234743 NR Description: senescence-associated protein homolog
  misc_feature (1)..(260): Homolog of NCBI NO: 20197174 NR Description: hypothetical protein [Arabidopsis thaliana]
  misc_feature (1)..(263): Homolog of NCBI NO: 15234374 NR Description: senescence-associated protein -like
MVQCSNNLLGILNFFTFLLSIPILSAGIWLGKNAATECERFLDKPMVVLGIFLMFVSIAGLVGACCRVSCLLWLYLFAMFLLILLGFCFTIFAFAVTNRGAGEVISDRGYKEYHVADYSNWLQKRVNNAKNWERIRSCLMYSDVCSTYRTRYASINVEDFYKSNLNALQSGCCKPSNDCNFTYVNPTTWTKTPGPYKNEDCNVWDNKPGTLCYDCEACKAGLLDNIKNSWKKVAKVNIVFLIFLIIVYSVGCCAFRNNRKRSW

SEQ ID NO: 25094 - protein, 218 aa, Arabidopsis thaliana
  peptide (1)..(218): Ceres Seq. ID no. 12370353
  misc_feature (1)..(199): Pfam Name: Tetraspanin family Pfam Description: Tetraspanin family
  misc_feature (1)..(212): Homolog of NCBI NO: 17979386 NR Description: putative senescence-associated protein 5
  misc_feature (1)..(215): Homolog of NCBI NO: 15238641 NR Description: senescence-associated protein - like; protein id:
  misc_feature (1)..(215): Homolog of NCBI NO: 15231187 NR Description: putative protein
  misc_feature (34)..(215): Homolog of NCBI NO: 30682205 NR Description: senescence-associated protein family [Arabidopsis
  misc_feature (1)..(215): Homolog of NCBI NO: 29367553 NR Description: senescence-associated protein-like protein
  misc_feature (1)..(215): Homolog of NCBI NO: 3551954 NR Description: senescence-associated protein 5 [Hemerocallis
  misc_feature (1)..(215): Homolog of NCBI NO: 21537169 NR Description: senescence-associated protein-like protein
  misc_feature (1)..(215): Homolog of NCBI NO: 15234743 NR Description: senescence-associated protein homolog
  misc_feature (1)..(215): Homolog of NCBI NO: 20197174 NR Description: hypothetical protein [Arabidopsis thaliana]
  misc_feature (1)..(218): Homolog of NCBI NO: 15234374 NR Description: senescence-associated protein -like
MVVLGIFLMFVSIAGLVGACCRVSCLLWLYLFAMFLLILLGFCFTIFAFAVTNRGAGEVISDRGYKEYHVADYSNWLQKRVNNAKNWERIRSCLMYSDVCSTYRTRYASINVEDFYKSNLNALQSGCCKPSNDCNFTYVNPTTWTKTPGPYKNEDCNVWDNKPGTLCYDCEACKAGLLDNIKNSWKKVAKVNIVFLIFLIIVYSVGCCAFRNNRKRSW

SEQ ID NO: 25095 - protein, 210 aa, Arabidopsis thaliana
  peptide (1)..(210): Ceres Seq. ID no. 12370354
  misc_feature (1)..(191): Pfam Name: Tetraspanin family Pfam Description: Tetraspanin family
  misc_feature (1)..(204): Homolog of NCBI NO: 17979386 NR Description: putative senescence-associated protein 5
  misc_feature (1)..(207): Homolog of NCBI NO: 15238641 NR Description: senescence-associated protein - like; protein id:
  misc_feature (1)..(207): Homolog of NCBI NO: 15231187 NR Description: putative protein
  misc_feature (26)..(207): Homolog of NCBI NO: 30682205 NR Description: senescence-associated protein family [Arabidopsis
  misc_feature (1)..(207): Homolog of NCBI NO: 29367553 NR Description: senescence-associated protein-like protein
  misc_feature (1)..(207): Homolog of NCBI NO: 3551954 NR Description: senescence-associated protein 5 [Hemerocallis
  misc_feature (1)..(207): Homolog of NCBI NO: 21537169 NR Description: senescence-associated protein-like protein
  misc_feature (1)..(207): Homolog of NCBI NO: 15234743 NR Description: senescence-associated protein homolog
  misc_feature (1)..(207): Homolog of NCBI NO: 20197174 NR Description: hypothetical protein [Arabidopsis thaliana]
  misc_feature (1)..(210): Homolog of NCBI NO: 15234374 NR Description: senescence-associated protein -like
MFVSIAGLVGACCRVSCLLWLYLFAMFLLILLGFCFTIFAFAVTNRGAGEVISDRGYKEYHVADYSNWLQKRVNNAKNWERIRSCLMYSDVCSTYRTRYASINVEDFYKSNLNALQSGCCKPSNDCNFTYVNPTTWTKTPGPYKNEDCNVWDNKPGTLCYDCEACKAGLLDNIKNSWKKVAKVNIVFLIFLIIVYSVGCCAFRNNRKRSW

SEQ ID NO: 25096 - DNA, 675 bp, Arabidopsis thaliana
  misc_feature (1)..(675): Ceres Seq. ID no. 12580226
  misc_feature: MA Experiment ID: 108461 Result: Down-regulated in Transcription
  misc_feature: MA Experiment 108461 PARAMETER Experiment Name: At_Germinating_Seeds_cDNA_P Parameter: Age (day) Value: 1 vs. 0
  misc_feature: MA Experiment 108461 PARAMETER Experiment Name: At_Germinating_Seeds_cDNA_P Parameter: Tissue Value: Germinating Seeds
  misc_feature: MA Experiment ID: 108488 Result: Down-regulated in Transcription
  misc_feature: MA Experiment ID: 108574 Result: Up-regulated in Transcription
  misc_feature: MA Experiment 108574 PARAMETER Experiment Name: At_Wounding__cDNA_P Parameter: Timepoint (hr) Value: 1
  misc_feature: MA Experiment 108574 PARAMETER Experiment Name: At_Wounding__cDNA_P Parameter: Tissue Value: Aerial
  misc_feature: MA Experiment 108574 PARAMETER Experiment Name: At_Wounding__cDNA_P Parameter: Treatment Value: Wounding vs. No Wounding
  misc_feature: MA Experiment ID: 108576 Result: Up-regulated in Transcription
  misc_feature: MA Experiment 108576 PARAMETER Experiment Name: At_42deg_Heat_cDNA_P Parameter: Temperature (deg C) Value: 42 vs. 22
  misc_feature: MA Experiment 108576 PARAMETER Experiment Name: At_42deg_Heat_cDNA_P Parameter: Timepoint (hr) Value: 1
  misc_feature: MA Experiment 108576 PARAMETER Experiment Name: At_42deg_Heat_cDNA_P Parameter: Tissue Value: Aerial
  misc_feature: MA Experiment ID: 108585 Result: Up-regulated in Transcription
  misc_feature: MA Experiment 108585 PARAMETER Experiment Name: At_5mM_NaNP_cDNA_P Parameter: Timepoint (hr) Value: 6
  misc_feature: MA Experiment 108585 PARAMETER Experiment Name: At_5mM_NaNP_cDNA_P Parameter: Tissue Value: Aerial
  misc_feature: MA Experiment 108585 PARAMETER Experiment Name: At_5mM_NaNP_cDNA_P Parameter: Treatment Value: null
  misc_feature: MA Experiment ID: 108595 Result: Up-regulated in Transcription
  misc_feature: MA Experiment 108595 PARAMETER Experiment Name: At_Ler-pi_Ovule_cDNA_P Parameter: Plant Line Value: null
  misc_feature: MA Experiment ID: 108607 Result: Up-regulated in Transcription
  misc_feature: MA Experiment 108607 PARAMETER Experiment Name: At_100uM_ABA_cDNA_P Parameter: Timepoint (hr) Value: 4
  misc_feature: MA Experiment 108607 PARAMETER Experiment Name: At_100uM_ABA_cDNA_P Parameter: Tissue Value: Aerial
  misc_feature: MA Experiment 108607 PARAMETER Experiment Name: At_100uM_ABA_cDNA_P Parameter: Treatment Value: 100uM ABA vs. No Treatment
  misc_feature: MA Experiment ID: 108608 Result: Up-regulated in Transcription
  misc_feature: MA Experiment 108608 PARAMETER Experiment Name: At_100uM_ABA_cDNA_P Parameter: Timepoint (hr) Value: 1
  misc_feature: MA Experiment 108608 PARAMETER Experiment Name: At_100uM_ABA_cDNA_P Parameter: Tissue Value: Aerial
  misc_feature: MA Experiment 108608 PARAMETER Experiment Name: At_100uM_ABA_cDNA_P Parameter: Treatment Value: 100uM ABA vs. No Treatment
  misc_feature: MA Experiment ID: 108667 Result: Up-regulated in Transcription
  misc_feature: MA Experiment 108667 PARAMETER Experiment Name: At_2mM_SA_cDNA_P Parameter: Plant Line Value: WS
  misc_feature: MA Experiment 108667 PARAMETER Experiment Name: At_2mM_SA_cDNA_P Parameter: Timepoint (hr) Value: 1
  misc_feature: MA Experiment 108667 PARAMETER Experiment Name: At_2mM_SA_cDNA_P Parameter: Treatment Value: 2mM SA vs. No Treatment
  misc_feature: MA Experiment ID: 20000069 Result: Up-regulated in Transcription
  misc_feature: MA Experiment 20000069 PARAMETER Experiment Name: At_100uM_ABA_Mutants_cDNA_P Parameter: Plant Line Value: CS23
  misc_feature: MA Experiment 20000069 PARAMETER Experiment Name: At_100uM_ABA_Mutants_cDNA_P Parameter: Timepoint (hr) Value: 6
  misc_feature: MA Experiment 20000069 PARAMETER Experiment Name: At_100uM_ABA_Mutants_cDNA_P Parameter: Tissue Value: Aerial
  misc_feature: MA Experiment 20000069 PARAMETER Experiment Name: At_100uM_ABA_Mutants_cDNA_P Parameter: Treatment Value: 100uM ABA vs. No Treatment
  misc_feature: MA Experiment ID: 20000070 Result: Up-regulated in Transcription
  misc_feature: MA Experiment 20000070 PARAMETER Experiment Name: At_100uM_ABA_Mutants_cDNA_P Parameter: Plant Line Value: CS24
  misc_feature: MA Experiment 20000070 PARAMETER Experiment Name: At_100uM_ABA_Mutants_cDNA_P Parameter: Timepoint (hr) Value: 6
  misc_feature: MA Experiment 20000070 PARAMETER Experiment Name: At_100uM_ABA_Mutants_cDNA_P Parameter: Tissue Value: Aerial
  misc_feature: MA Experiment 20000070 PARAMETER Experiment Name: At_100uM_ABA_Mutants_cDNA_P Parameter: Treatment Value: 100uM ABA vs. No Treatment
  misc_feature: MA Experiment ID: 20000071 Result: Up-regulated in Transcription
  misc_feature: MA Experiment 20000071 PARAMETER Experiment Name: At_100uM_ABA_Mutants_cDNA_P Parameter: Plant Line Value: CS8104
  misc_feature: MA Experiment 20000071 PARAMETER Experiment Name: At_100uM_ABA_Mutants_cDNA_P Parameter: Timepoint (hr) Value: 6
  misc_feature: MA Experiment 20000071 PARAMETER Experiment Name: At_100uM_ABA_Mutants_cDNA_P Parameter: Tissue Value: Aerial
  misc_feature: MA Experiment 20000071 PARAMETER Experiment Name: At_100uM_ABA_Mutants_cDNA_P Parameter: Treatment Value: 100uM ABA vs. No Treatment
  misc_feature: MA Experiment ID: 20000072 Result: Up-regulated in Transcription
  misc_feature: MA Experiment 20000072 PARAMETER Experiment Name: At_100uM_ABA_Mutants_cDNA_P Parameter: Plant Line Value: CS8105
  misc_feature: MA Experiment 20000072 PARAMETER Experiment Name: At_100uM_ABA_Mutants_cDNA_P Parameter: Timepoint (hr) Value: 6
  misc_feature: MA Experiment 20000072 PARAMETER Experiment Name: At_100uM_ABA_Mutants_cDNA_P Parameter: Tissue Value: Aerial
  misc_feature: MA Experiment 20000072 PARAMETER Experiment Name: At_100uM_ABA_Mutants_cDNA_P Parameter: Treatment Value: 100uM ABA vs. No Treatment
  misc_feature: MA Experiment ID: 20000087 Result: Up-regulated in Transcription
  misc_feature: MA Experiment 20000087 PARAMETER Experiment Name: At_100uM_ABA_Mutants_cDNA_P Parameter: Plant Line Value: WS
  misc_feature: MA Experiment 20000087 PARAMETER Experiment Name: At_100uM_ABA_Mutants_cDNA_P Parameter: Timepoint (hr) Value: 6
  misc_feature: MA Experiment 20000087 PARAMETER Experiment Name: At_100uM_ABA_Mutants_cDNA_P Parameter: Tissue Value: Aerial
  misc_feature: MA Experiment 20000087 PARAMETER Experiment Name: At_100uM_ABA_Mutants_cDNA_P Parameter: Treatment Value: 100uM ABA vs. No Treatment
  misc_feature: MA Experiment ID: 20000088 Result: Up-regulated in Transcription
  misc_feature: MA Experiment 20000088 PARAMETER Experiment Name: At_100uM_ABA_Mutants_cDNA_P Parameter: Plant Line Value: Landsberg
  misc_feature: MA Experiment 20000088 PARAMETER Experiment Name: At_100uM_ABA_Mutants_cDNA_P Parameter: Timepoint (hr) Value: 6
  misc_feature: MA Experiment 20000088 PARAMETER Experiment Name: At_100uM_ABA_Mutants_cDNA_P Parameter: Tissue Value: Aerial
  misc_feature: MA Experiment 20000088 PARAMETER Experiment Name: At_100uM_ABA_Mutants_cDNA_P Parameter: Treatment Value: 100uM ABA vs. No Treatment
  misc_feature: MA Experiment ID: 20000093 Result: Up-regulated in Transcription
  misc_feature: MA Experiment 20000093 PARAMETER Experiment Name: At_42deg_Heat_cDNA_P Parameter: Temperature (deg C) Value: 42 vs. 22
  misc_feature: MA Experiment 20000093 PARAMETER Experiment Name: At_42deg_Heat_cDNA_P Parameter: Timepoint (hr) Value: 0.5
  misc_feature: MA Experiment 20000093 PARAMETER Experiment Name: At_42deg_Heat_cDNA_P Parameter: Tissue Value: Aerial
  misc_feature: MA Experiment ID: 20000112 Result: Up-regulated in Transcription
  misc_feature: MA Experiment 20000112 PARAMETER Experiment Name: At_42deg_Heat_cDNA_P Parameter: Temperature (deg C) Value: 42 vs. 22
  misc_feature: MA Experiment 20000112 PARAMETER Experiment Name: At_42deg_Heat_cDNA_P Parameter: Timepoint (hr) Value: 2
  misc_feature: MA Experiment 20000112 PARAMETER Experiment Name: At_42deg_Heat_cDNA_P Parameter: Tissue Value: Aerial
  misc_feature: MA Experiment ID: 20000117 Result: Up-regulated in Transcription
  misc_feature: MA Experiment 20000117 PARAMETER Experiment Name: At_100uM_ABA_Mutants_cDNA_P Parameter: Plant Line Value: Columbia
  misc_feature: MA Experiment 20000117 PARAMETER Experiment Name: At_100uM_ABA_Mutants_cDNA_P Parameter: Timepoint (hr) Value: 6
  misc_feature: MA Experiment 20000117 PARAMETER Experiment Name: At_100uM_ABA_Mutants_cDNA_P Parameter: Tissue Value: Aerial
  misc_feature: MA Experiment 20000117 PARAMETER Experiment Name: At_100uM_ABA_Mutants_cDNA_P Parameter: Treatment Value: 100uM ABA vs. No Treatment
  misc_feature: MA Experiment ID: 20000144 Result: Up-regulated in Transcription
  misc_feature: MA Experiment 20000144 PARAMETER Experiment Name: At_42deg_Heat_cDNA_P Parameter: Temperature (deg C) Value: 42 vs. 22
  misc_feature: MA Experiment 20000144 PARAMETER Experiment Name: At_42deg_Heat_cDNA_P Parameter: Timepoint (hr) Value: 1
  misc_feature: MA Experiment 20000144 PARAMETER Experiment Name: At_42deg_Heat_cDNA_P Parameter: Tissue Value: Aerial
  misc_feature: MA Experiment ID: 20000185 Result: Up-regulated in Transcription
  misc_feature: MA Experiment 20000185 PARAMETER Experiment Name: At_Roots__P Parameter: Age (day) Value: 7 vs. 21
  misc_feature: MA Experiment 20000185 PARAMETER Experiment Name: At_Roots__P Parameter: Organism Value: A. thaliana
  misc_feature: MA Experiment 20000185 PARAMETER Experiment Name: At_Roots__P Parameter: Tissue Value: Roots vs. Whole Plant
  misc_feature: MA Experiment ID: 20000224 Result: Up-regulated in Transcription
  misc_feature: MA Experiment ID: 20000286 Result: Up-regulated in Transcription
  misc_feature: MA Experiment 20000286 PARAMETER Experiment Name: At_Open_Flower_P Parameter: Age (day) Value: 21
  misc_feature: MA Experiment 20000286 PARAMETER Experiment Name: At_Open_Flower_P Parameter: Plant Line Value: WS
  misc_feature: MA Experiment 20000286 PARAMETER Experiment Name: At_Open_Flower_P Parameter: Tissue Value: Half Open vs. Whole Plant
  misc_feature: MA Experiment ID: 20001555 Result: Up-regulated in Transcription
  misc_feature: MA Experiment 20001555 PARAMETER Experiment Name: At_Drought_Soil_Dry_P Parameter: Age (day) Value: 24
  misc_feature: MA Experiment 20001555 PARAMETER Experiment Name: At_Drought_Soil_Dry_P Parameter: Organism Value: A. thaliana
  misc_feature: MA Experiment 20001555 PARAMETER Experiment Name: At_Drought_Soil_Dry_P Parameter: Plant Line Value: WS
  misc_feature: MA Experiment 20001555 PARAMETER Experiment Name: At_Drought_Soil_Dry_P Parameter: Post Timepoint (hr) Value: None
  misc_feature: MA Experiment 20001555 PARAMETER Experiment Name: At_Drought_Soil_Dry_P Parameter: Post-Treatment Value: None
  misc_feature: MA Experiment 20001555 PARAMETER Experiment Name: At_Drought_Soil_Dry_P Parameter: Timepoint (day) Value: 10
  misc_feature: MA Experiment 20001555 PARAMETER Experiment Name: At_Drought_Soil_Dry_P Parameter: Treatment Value: Drought vs. No Drought
  misc_feature: MA Experiment ID: 20001904 Result: Up-regulated in Transcription
  misc_feature: MA Experiment 20001904 PARAMETER Experiment Name: At_Drought_Reproduction_P Parameter: Age (day) Value: 37
  misc_feature: MA Experiment 20001904 PARAMETER Experiment Name: At_Drought_Reproduction_P Parameter: Organism Value: A. thaliana
  misc_feature: MA Experiment 20001904 PARAMETER Experiment Name: At_Drought_Reproduction_P Parameter: Plant Line Value: WS
  misc_feature: MA Experiment 20001904 PARAMETER Experiment Name: At_Drought_Reproduction_P Parameter: Timepoint (day) Value: 7
  misc_feature: MA Experiment 20001904 PARAMETER Experiment Name: At_Drought_Reproduction_P Parameter: Tissue Value: Rosettes
  misc_feature: MA Experiment 20001904 PARAMETER Experiment Name: At_Drought_Reproduction_P Parameter: Treatment Value: Drought vs. No Drought
  misc_feature: MA Experiment ID: 20001905 Result: Up-regulated in Transcription
  misc_feature: MA Experiment 20001905 PARAMETER Experiment Name: At_Drought_Reproduction_P Parameter: Age (day) Value: 40
  misc_feature: MA Experiment 20001905 PARAMETER Experiment Name: At_Drought_Reproduction_P Parameter: Organism Value: A. thaliana
  misc_feature: MA Experiment 20001905 PARAMETER Experiment Name: At_Drought_Reproduction_P Parameter: Plant Line Value: WS
  misc_feature: MA Experiment 20001905 PARAMETER Experiment Name: At_Drought_Reproduction_P Parameter: Timepoint (day) Value: 10
  misc_feature: MA Experiment 20001905 PARAMETER Experiment Name: At_Drought_Reproduction_P Parameter: Tissue Value: Rosettes
  misc_feature: MA Experiment 20001905 PARAMETER Experiment Name: At_Drought_Reproduction_P Parameter: Treatment Value: Drought vs. No Drought
aatcacaatccaaaactctctctctctctctctgtctcttgtcttattatttatctctctaacggcgaggcaatgggttttccggtgggatattctgagctacttctcccaaaaatctttttctacttgttatctttcttaggtttgatacgtaaactcatctccacaatgttcaagatcattggtctaccagatttcttagaacctgaaccggtttcaacctcatggcccgacccaccacccacgttgaccaaacctgactcagcagcaatactagccggagagatgttaccggttgttcgattctcggatataaaccgaccggaatccgagtgttgcgcagtgtgtctctacgatttcgagaacgacgacgagatccgacggctgacgaattgtcgacatatatttcatcggggatgtttggaccgttggatgatgggttataatcagatgacgtgtccactttgtcgtacacagtttatacctgatcatcttcaactggagtttaatcaaaggctctggtctcaatcttctgctgtttcttctcaacttcttgatgaatcatcatcttaggacgtattaaatctttgtccaaacaaaaaaagaaagacatattaaatccttttttttggtactttcattgggaattgggtttggtgtgagatcgatgtaaat

SEQ ID NO: 25097 - protein, 190 aa, Arabidopsis thaliana
  peptide (1)..(190): Ceres Seq. ID no. 12580227
  misc_feature (113)..(156): Pfam Name: Zinc finger, C3HC4 type (RING finger) Pfam Description: Zinc finger, C3HC4 type (RING finger)
  misc_feature (25)..(68): Homolog of NCBI NO: 32488512 NR Description: OSJNBa0011J08.19 [Oryza sativa (japonica
  misc_feature (90)..(188): Homolog of NCBI NO: 32488512 NR Description: OSJNBa0011J08.19 [Oryza sativa (japonica
  misc_feature (25)..(178): Homolog of NCBI NO: 15233352 NR Description: RING-H2 finger protein RHA1a -like protein
  misc_feature (25)..(177): Homolog of NCBI NO: 15233350 NR Description: RING-H2 finger protein RHA1b
  misc_feature (25)..(177): Homolog of NCBI NO: 11358777 NR Description: RING-H2 finger protein RHA1b [imported] -
  misc_feature (25)..(178): Homolog of NCBI NO: 11358776 NR Description: RING-H2 finger protein RHA1a [imported] -
  misc_feature (25)..(177): Homolog of NCBI NO: 15233117 NR Description: RING finger protein
  misc_feature (25)..(181): Homolog of NCBI NO: 21554155 NR Description: RING zinc finger protein-like [Arabidopsis
  misc_feature (25)..(181): Homolog of NCBI NO: 15238072 NR Description: RING zinc finger protein-like
  misc_feature (25)..(190): Homolog of NCBI NO: 15222553 NR Description: putative RING zinc finger protein
NHNPKLSLSLSVSCLIIYLSNGEAMGFPVGYSELLLPKIFFYLLSFLGLIRKLISTMFKIIGLPDFLEPEPVSTSWPDPPPTLTKPDSAAILAGEMLPVVRFSDINRPESECCAVCLYDFENDDEIRRLTNCRHIFHRGCLDRWMMGYNQMTCPLCRTQFIPDHLQLEFNQRLWSQSSAVSSQLLDESSS

SEQ ID NO: 25098 - protein, 166 aa, Arabidopsis thaliana
  peptide (1)..(166): Ceres Seq. ID no. 12580228
  misc_feature (89)..(132): Pfam Name: Zinc finger, C3HC4 type (RING finger) Pfam Description: Zinc finger, C3HC4 type (RING finger)
  misc_feature (1)..(44): Homolog of NCBI NO: 32488512 NR Description: OSJNBa0011J08.19 [Oryza sativa (japonica
  misc_feature (66)..(164): Homolog of NCBI NO: 32488512 NR Description: OSJNBa0011J08.19 [Oryza sativa (japonica
  misc_feature (1)..(154): Homolog of NCBI NO: 15233352 NR Description: RING-H2 finger protein RHA1a -like protein
  misc_feature (1)..(153): Homolog of NCBI NO: 15233350 NR Description: RING-H2 finger protein RHA1b
  misc_feature (1)..(153): Homolog of NCBI NO: 11358777 NR Description: RING-H2 finger protein RHA1b [imported] -
  misc_feature (1)..(154): Homolog of NCBI NO: 11358776 NR Description: RING-H2 finger protein RHA1a [imported] -
  misc_feature (1)..(153): Homolog of NCBI NO: 15233117 NR Description: RING finger protein
  misc_feature (1)..(157): Homolog of NCBI NO: 21554155 NR Description: RING zinc finger protein-like [Arabidopsis
  misc_feature (1)..(157): Homolog of NCBI NO: 15238072 NR Description: RING zinc finger protein-like
  misc_feature (1)..(166): Homolog of NCBI NO: 15222553 NR Description: putative RING zinc finger protein
MGFPVGYSELLLPKIFFYLLSFLGLIRKLISTMFKIIGLPDFLEPEPVSTSWPDPPPTLTKPDSAAILAGEMLPVVRFSDINRPESECCAVCLYDFENDDEIRRLTNCRHIFHRGCLDRWMMGYNQMTCPLCRTQFIPDHLQLEFNQRLWSQSSAVSSQLLDESSS

SEQ ID NO: 25099 - protein, 134 aa, Arabidopsis thaliana
  peptide (1)..(134): Ceres Seq. ID no. 12580229
  misc_feature (57)..(100): Pfam Name: Zinc finger, C3HC4 type (RING finger) Pfam Description: Zinc finger, C3HC4 type (RING finger)
  misc_feature (1)..(12): Homolog of NCBI NO: 32488512 NR Description: OSJNBa0011J08.19 [Oryza sativa (japonica
  misc_feature (34)..(132): Homolog of NCBI NO: 32488512 NR Description: OSJNBa0011J08.19 [Oryza sativa (japonica
  misc_feature (1)..(122): Homolog of NCBI NO: 15233352 NR Description: RING-H2 finger protein RHA1a -like protein
  misc_feature (1)..(121): Homolog of NCBI NO: 15233350 NR Description: RING-H2 finger protein RHA1b
  misc_feature (1)..(121): Homolog of NCBI NO: 11358777 NR Description: RING-H2 finger protein RHA1b [imported] -
  misc_feature (1)..(122): Homolog of NCBI NO: 11358776 NR Description: RING-H2 finger protein RHA1a [imported] -
  misc_feature (1)..(121): Homolog of NCBI NO: 15233117 NR Description: RING finger protein
  misc_feature (1)..(125): Homolog of NCBI NO: 21554155 NR Description: RING zinc finger protein-like [Arabidopsis
  misc_feature (1)..(125): Homolog of NCBI NO: 15238072 NR Description: RING zinc finger protein-like
  misc_feature (1)..(134): Homolog of NCBI NO: 15222553 NR Description: putative RING zinc finger protein
MFKIIGLPDFLEPEPVSTSWPDPPPTLTKPDSAAILAGEMLPVVRFSDINRPESECCAVCLYDFENDDEIRRLTNCRHIFHRGCLDRWMMGYNQMTCPLCRTQFIPDHLQLEFNQRLWSQSSAVSSQLLDESSS

SEQ ID NO: 25100 - DNA, 1332 bp, Arabidopsis thaliana
  misc_feature (1)..(1332): Ceres Seq. ID no. 12488506
  misc_feature: MA Experiment ID: 108473 Result: Up-regulated in Transcription
  misc_feature: MA Experiment 108473 PARAMETER Experiment Name: At_Drought_Flowers_cDNA_P Parameter: Timepoint (hr) Value: 7 d
  misc_feature: MA Experiment 108473 PARAMETER Experiment Name: At_Drought_Flowers_cDNA_P Parameter: Tissue Value: Flower
  misc_feature: MA Experiment 108473 PARAMETER Experiment Name: At_Drought_Flowers_cDNA_P Parameter: Treatment Value: Drought vs. No Drought
  misc_feature: MA Experiment ID: 108474 Result: Up-regulated in Transcription
  misc_feature: MA Experiment 108474 PARAMETER Experiment Name: At_Drought_Flowers_cDNA_P Parameter: Timepoint (hr) Value: null
  misc_feature: MA Experiment 108474 PARAMETER Experiment Name: At_Drought_Flowers_cDNA_P Parameter: Treatment Value: Drought vs. No Drought
  misc_feature: MA Experiment ID: 108489 Result: Up-regulated in Transcription
  misc_feature: MA Experiment ID: 108501 Result: Down-regulated in Transcription
  misc_feature: MA Experiment 108501 PARAMETER Experiment Name: At_ap2_floral_buds_cDNA_P Parameter: Plant Line Value: ap2 (Ler.)
  misc_feature: MA Experiment 108501 PARAMETER Experiment Name: At_ap2_floral_buds_cDNA_P Parameter: Tissue Value: Closed Flower
  misc_feature: MA Experiment ID: 108579 Result: Down-regulated in Transcription
  misc_feature: MA Experiment 108579 PARAMETER Experiment Name: At_4deg_Cold_cDNA_P Parameter: Temperature (deg C) Value: 4 vs. 22
  misc_feature: MA Experiment 108579 PARAMETER Experiment Name: At_4deg_Cold_cDNA_P Parameter: Timepoint (hr) Value: 6
  misc_feature: MA Experiment 108579 PARAMETER Experiment Name: At_4deg_Cold_cDNA_P Parameter: Tissue Value: Aerial
  misc_feature: MA Experiment ID: 108585 Result: Up-regulated in Transcription
  misc_feature: MA Experiment 108585 PARAMETER Experiment Name: At_5mM_NaNP_cDNA_P Parameter: Timepoint (hr) Value: 6
  misc_feature: MA Experiment 108585 PARAMETER Experiment Name: At_5mM_NaNP_cDNA_P Parameter: Tissue Value: Aerial
  misc_feature: MA Experiment 108585 PARAMETER Experiment Name: At_5mM_NaNP_cDNA_P Parameter: Treatment Value: null
  misc_feature: MA Experiment ID: 108607 Result: Down-regulated in Transcription
  misc_feature: MA Experiment 108607 PARAMETER Experiment Name: At_100uM_ABA_cDNA_P Parameter: Timepoint (hr) Value: 4
  misc_feature: MA Experiment 108607 PARAMETER Experiment Name: At_100uM_ABA_cDNA_P Parameter: Tissue Value: Aerial
  misc_feature: MA Experiment 108607 PARAMETER Experiment Name: At_100uM_ABA_cDNA_P Parameter: Treatment Value: 100uM ABA vs. No Treatment
  misc_feature: MA Experiment ID: 20000089 Result: Up-regulated in Transcription
  misc_feature: MA Experiment ID: 20000166 Result: Down-regulated in Transcription
  misc_feature: MA Experiment 20000166 PARAMETER Experiment Name: At_100uM_ABA_P Parameter: Age (day) Value: 14
  misc_feature: MA Experiment 20000166 PARAMETER Experiment Name: At_100uM_ABA_P Parameter: Organism Value: A. thaliana
  misc_feature: MA Experiment 20000166 PARAMETER Experiment Name: At_100uM_ABA_P Parameter: Plant Line Value: WS
  misc_feature: MA Experiment 20000166 PARAMETER Experiment Name: At_100uM_ABA_P Parameter: Timepoint (hr) Value: 1
  misc_feature: MA Experiment 20000166 PARAMETER Experiment Name: At_100uM_ABA_P Parameter: Tissue Value: Aerial
  misc_feature: MA Experiment 20000166 PARAMETER Experiment Name: At_100uM_ABA_P Parameter: Treatment Value: 100uM ABA vs. No Treatment
  misc_feature: MA Experiment ID: 20000169 Result: Down-regulated in Transcription
  misc_feature: MA Experiment 20000169 PARAMETER Experiment Name: At_100uM_ABA_P Parameter: Age (day) Value: 14
  misc_feature: MA Experiment 20000169 PARAMETER Experiment Name: At_100uM_ABA_P Parameter: Organism Value: A. thaliana
  misc_feature: MA Experiment 20000169 PARAMETER Experiment Name: At_100uM_ABA_P Parameter: Plant Line Value: WS
  misc_feature: MA Experiment 20000169 PARAMETER Experiment Name: At_100uM_ABA_P Parameter: Timepoint (hr) Value: 6
  misc_feature: MA Experiment 20000169 PARAMETER Experiment Name: At_100uM_ABA_P Parameter: Tissue Value: Aerial
  misc_feature: MA Experiment 20000169 PARAMETER Experiment Name: At_100uM_ABA_P Parameter: Treatment Value: 100uM ABA vs. No Treatment
  misc_feature: MA Experiment ID: 20000213 Result: Down-regulated in Transcription
  misc_feature: MA Experiment 20000213 PARAMETER Experiment Name: At_4deg_Cold_P Parameter: Timepoint (hr) Value: 2
  misc_feature: MA Experiment ID: 20000224 Result: Down-regulated in Transcription
  misc_feature: MA Experiment ID: 20000227 Result: Down-regulated in Transcription
  misc_feature: MA Experiment 20000227 PARAMETER Experiment Name: At_Root-Tips-vs-Tops_P Parameter: Tissue Value: Root Tips vs. Root Tops
  misc_feature: MA Experiment ID: 20000234 Result: Down-regulated in Transcription
  misc_feature: MA Experiment 20000234 PARAMETER Experiment Name: At_Siliques_P Parameter: Age (day) Value: 21
  misc_feature: MA Experiment 20000234 PARAMETER Experiment Name: At_Siliques_P Parameter: Organism Value: A. thaliana
  misc_feature: MA Experiment 20000234 PARAMETER Experiment Name: At_Siliques_P Parameter: Plant Line Value: WS
  misc_feature: MA Experiment 20000234 PARAMETER Experiment Name: At_Siliques_P Parameter: Tissue Value: Less Than 5mm Siliques vs. Whole Plant
  misc_feature: MA Experiment ID: 20000235 Result: Down-regulated in Transcription
  misc_feature: MA Experiment 20000235 PARAMETER Experiment Name: At_Siliques_P Parameter: Age (day) Value: 21
  misc_feature: MA Experiment 20000235 PARAMETER Experiment Name: At_Siliques_P Parameter: Organism Value: A. thaliana
  misc_feature: MA Experiment 20000235 PARAMETER Experiment Name: At_Siliques_P Parameter: Plant Line Value: WS
  misc_feature: MA Experiment 20000235 PARAMETER Experiment Name: At_Siliques_P Parameter: Tissue Value: 5-10mm Siliques vs. Whole Plant
  misc_feature: MA Experiment ID: 20000264 Result: Down-regulated in Transcription
  misc_feature: MA Experiment 20000264 PARAMETER Experiment Name: At_Open_Flower_P Parameter: Age (day) Value: 21
  misc_feature: MA Experiment 20000264 PARAMETER Experiment Name: At_Open_Flower_P Parameter: Plant Line Value: WS
  misc_feature: MA Experiment 20000264 PARAMETER Experiment Name: At_Open_Flower_P Parameter: Tissue Value: Open Flower vs. Whole Plant
  misc_feature: MA Experiment ID: 20000265 Result: Down-regulated in Transcription
  misc_feature: MA Experiment 20000265 PARAMETER Experiment Name: At_Open_Flower_P Parameter: Age (day) Value: 21
  misc_feature: MA Experiment 20000265 PARAMETER Experiment Name: At_Open_Flower_P Parameter: Plant Line Value: WS
  misc_feature: MA Experiment 20000265 PARAMETER Experiment Name: At_Open_Flower_P Parameter: Tissue Value: Closed Flower vs. Whole Plant
  misc_feature: MA Experiment ID: 20000268 Result: Down-regulated in Transcription
  misc_feature: MA Experiment 20000268 PARAMETER Experiment Name: At_100mM_NaCl__P Parameter: Age (day) Value: 14
  misc_feature: MA Experiment 20000268 PARAMETER Experiment Name: At_100mM_NaCl__P Parameter: Organism Value: A. thaliana
  misc_feature: MA Experiment 20000268 PARAMETER Experiment Name: At_100mM_NaCl__P Parameter: Plant Line Value: WS
  misc_feature: MA Experiment 20000268 PARAMETER Experiment Name: At_100mM_NaCl__P Parameter: Timepoint (hr) Value: 6
  misc_feature: MA Experiment 20000268 PARAMETER Experiment Name: At_100mM_NaCl__P Parameter: Tissue Value: Whole Plant
  misc_feature: MA Experiment 20000268 PARAMETER Experiment Name: At_100mM_NaCl__P Parameter: Treatment Value: 100mM NaCl vs. No Treatment
  misc_feature: MA Experiment ID: 20000269 Result: Down-regulated in Transcription
  misc_feature: MA Experiment 20000269 PARAMETER Experiment Name: At_1mM_KNO3_L-vs-H_Roots_P Parameter: Age (day) Value: 7,10,12
  misc_feature: MA Experiment 20000269 PARAMETER Experiment Name: At_1mM_KNO3_L-vs-H_Roots_P Parameter: Organism Value: A. thaliana
  misc_feature: MA Experiment 20000269 PARAMETER Experiment Name: At_1mM_KNO3_L-vs-H_Roots_P Parameter: Plant Line Value: WS
  misc_feature: MA Experiment 20000269 PARAMETER Experiment Name: At_1mM_KNO3_L-vs-H_Roots_P Parameter: Timepoint (day) Value: 7,10,12
  misc_feature: MA Experiment 20000269 PARAMETER Experiment Name: At_1mM_KNO3_L-vs-H_Roots_P Parameter: Tissue Value: Roots
  misc_feature: MA Experiment 20000269 PARAMETER Experiment Name: At_1mM_KNO3_L-vs-H_Roots_P Parameter: Treatment Value: 1mM KNO3 vs. 50mM KNO3
  misc_feature: MA Experiment ID: 20000286 Result: Down-regulated in Transcription
  misc_feature: MA Experiment 20000286 PARAMETER Experiment Name: At_Open_Flower_P Parameter: Age (day) Value: 21
  misc_feature: MA Experiment 20000286 PARAMETER Experiment Name: At_Open_Flower_P Parameter: Plant Line Value: WS
  misc_feature: MA Experiment 20000286 PARAMETER Experiment Name: At_Open_Flower_P Parameter: Tissue Value: Half Open vs. Whole Plant
  misc_feature: MA Experiment ID: 20000437 Result: Down-regulated in Transcription
  misc_feature: MA Experiment 20000437 PARAMETER Experiment Name: At_Drought_P Parameter: Age (day) Value: 8
  misc_feature: MA Experiment 20000437 PARAMETER Experiment Name: At_Drought_P Parameter: Organism Value: A. thaliana
  misc_feature: MA Experiment 20000437 PARAMETER Experiment Name: At_Drought_P Parameter: Plant Line Value: WS
  misc_feature: MA Experiment 20000437 PARAMETER Experiment Name: At_Drought_P Parameter: Timepoint (hr) Value: 24
  misc_feature: MA Experiment 20000437 PARAMETER Experiment Name: At_Drought_P Parameter: Tissue Value: Whole Plant
  misc_feature: MA Experiment 20000437 PARAMETER Experiment Name: At_Drought_P Parameter: Treatment Value: Drought vs. No Drought
  misc_feature: MA Experiment ID: 20000441 Result: Up-regulated in Transcription
  misc_feature: MA Experiment 20000441 PARAMETER Experiment Name: At_1uM_BR-BRZ__P Parameter: Tissue Value: Shoot Apices
  misc_feature: MA Experiment 20000441 PARAMETER Experiment Name: At_1uM_BR-BRZ__P Parameter: Treatment Value: 1uM BR vs. No Treatment
  misc_feature: MA Experiment ID: 20000443 Result: Up-regulated in Transcription
  misc_feature: MA Experiment 20000443 PARAMETER Experiment Name: At_1uM_BR-BRZ__P Parameter: Tissue Value: Shoot Apices
  misc_feature: MA Experiment 20000443 PARAMETER Experiment Name: At_1uM_BR-BRZ__P Parameter: Treatment Value: 1uM BRZ vs. No Treatment
  misc_feature: MA Experiment ID: 20000495 Result: Up-regulated in Transcription
  misc_feature: MA Experiment 20000495 PARAMETER Experiment Name: At_Guard_Cells_P Parameter: Harvest Date Value: 8/2/2002
  misc_feature: MA Experiment 20000495 PARAMETER Experiment Name: At_Guard_Cells_P Parameter: Organism Value: A. thaliana
  misc_feature: MA Experiment 20000495 PARAMETER Experiment Name: At_Guard_Cells_P Parameter: Tissue Value: Guard Cells vs. Leaves
  misc_feature: MA Experiment ID: 20000496 Result: Up-regulated in Transcription
  misc_feature: MA Experiment 20000496 PARAMETER Experiment Name: At_Guard_Cells_P Parameter: Harvest Date Value: 7/19/2002
  misc_feature: MA Experiment 20000496 PARAMETER Experiment Name: At_Guard_Cells_P Parameter: Organism Value: Canola
  misc_feature: MA Experiment 20000496 PARAMETER Experiment Name: At_Guard_Cells_P Parameter: Tissue Value: Guard Cells vs. Leaves
  misc_feature: MA Experiment ID: 20000709 Result: Up-regulated in Transcription
  misc_feature: MA Experiment 20000709 PARAMETER Experiment Name: At_15mM_NH4NO3_L-to-H_P Parameter: Age (hr) Value: 14
  misc_feature: MA Experiment 20000709 PARAMETER Experiment Name: At_15mM_NH4NO3_L-to-H_P Parameter: Organism Value: A. thaliana
  misc_feature: MA Experiment 20000709 PARAMETER Experiment Name: At_15mM_NH4NO3_L-to-H_P Parameter: Plant Line Value: WS
  misc_feature: MA Experiment 20000709 PARAMETER Experiment Name: At_15mM_NH4NO3_L-to-H_P Parameter: Timepoint (hr) Value: 4
  misc_feature: MA Experiment 20000709 PARAMETER Experiment Name: At_15mM_NH4NO3_L-to-H_P Parameter: Tissue Value: Aerial
  misc_feature: MA Experiment 20000709 PARAMETER Experiment Name: At_15mM_NH4NO3_L-to-H_P Parameter: Treatment Value: 15mM NH4NO3 vs. 30mM Mannitol
  misc_feature: MA Experiment ID: 20000794 Result: Down-regulated in Transcription
  misc_feature: MA Experiment 20000794 PARAMETER Experiment Name: At_Petals_P Parameter: Age (day) Value: 23-25 days
  misc_feature: MA Experiment 20000794 PARAMETER Experiment Name: At_Petals_P Parameter: Plant Line Value: WS
  misc_feature: MA Experiment 20000794 PARAMETER Experiment Name: At_Petals_P Parameter: Tissue Value: Petals vs. Whole plant
  misc_feature: MA Experiment ID: 20001247 Result: Up-regulated in Transcription
  misc_feature: MA Experiment 20001247 PARAMETER Experiment Name: At_Far-red-induction_P Parameter: Age (day) Value: 7
  misc_feature: MA Experiment 20001247 PARAMETER Experiment Name: At_Far-red-induction_P Parameter: Light Value: Far-red vs. White
  misc_feature: MA Experiment 20001247 PARAMETER Experiment Name: At_Far-red-induction_P Parameter: Organism Value: A. thaliana
  misc_feature: MA Experiment 20001247 PARAMETER Experiment Name: At_Far-red-induction_P Parameter: Plant Line Value: Columbia
  misc_feature: MA Experiment 20001247 PARAMETER Experiment Name: At_Far-red-induction_P Parameter: Timepoint (hr) Value: 1
  misc_feature: MA Experiment 20001247 PARAMETER Experiment Name: At_Far-red-induction_P Parameter: Tissue Value: Whole Plant
  misc_feature: MA Experiment ID: 20001248 Result: Up-regulated in Transcription
  misc_feature: MA Experiment 20001248 PARAMETER Experiment Name: At_Far-red-induction_P Parameter: Age (day) Value: 7
  misc_feature: MA Experiment 20001248 PARAMETER Experiment Name: At_Far-red-induction_P Parameter: Light Value: Far-red vs. White
  misc_feature: MA Experiment 20001248 PARAMETER Experiment Name: At_Far-red-induction_P Parameter: Organism Value: A. thaliana
  misc_feature: MA Experiment 20001248 PARAMETER Experiment Name: At_Far-red-induction_P Parameter: Plant Line Value: Columbia
  misc_feature: MA Experiment 20001248 PARAMETER Experiment Name: At_Far-red-induction_P Parameter: Timepoint (hr) Value: 4
  misc_feature: MA Experiment 20001248 PARAMETER Experiment Name: At_Far-red-induction_P Parameter: Tissue Value: Whole Plant
  misc_feature: MA Experiment ID: 20001450 Result: Up-regulated in Transcription
  misc_feature: MA Experiment 20001450 PARAMETER Experiment Name: At_Far-red-induction_P Parameter: Age (day) Value: 7
  misc_feature: MA Experiment 20001450 PARAMETER Experiment Name: At_Far-red-induction_P Parameter: Light Value: Far-red vs. White
  misc_feature: MA Experiment 20001450 PARAMETER Experiment Name: At_Far-red-induction_P Parameter: Organism Value: A. thaliana
  misc_feature: MA Experiment 20001450 PARAMETER Experiment Name: At_Far-red-induction_P Parameter: Plant Line Value: Columbia
  misc_feature: MA Experiment 20001450 PARAMETER Experiment Name: At_Far-red-induction_P Parameter: Timepoint (hr) Value: 8
  misc_feature: MA Experiment 20001450 PARAMETER Experiment Name: At_Far-red-induction_P Parameter: Tissue Value: Whole Plant
  misc_feature: MA Experiment ID: 20001451 Result: Up-regulated in Transcription
  misc_feature: MA Experiment 20001451 PARAMETER Experiment Name: At_Far-red-induction_P Parameter: Age (day) Value: 7
  misc_feature: MA Experiment 20001451 PARAMETER Experiment Name: At_Far-red-induction_P Parameter: Light Value: Far-red vs. White
  misc_feature: MA Experiment 20001451 PARAMETER Experiment Name: At_Far-red-induction_P Parameter: Organism Value: A. thaliana
  misc_feature: MA Experiment 20001451 PARAMETER Experiment Name: At_Far-red-induction_P Parameter: Plant Line Value: Columbia
  misc_feature: MA Experiment 20001451 PARAMETER Experiment Name: At_Far-red-induction_P Parameter: Timepoint (hr) Value: 24
  misc_feature: MA Experiment 20001451 PARAMETER Experiment Name: At_Far-red-induction_P Parameter: Tissue Value: Whole Plant
  misc_feature: MA Experiment ID: 20001457 Result: Up-regulated in Transcription
  misc_feature: MA Experiment 20001457 PARAMETER Experiment Name: At_50mM_NH4NO3_L-to-H_P Parameter: Age (day) Value: Undefined
  misc_feature: MA Experiment 20001457 PARAMETER Experiment Name: At_50mM_NH4NO3_L-to-H_P Parameter: Organism Value: Undefined
  misc_feature: MA Experiment 20001457 PARAMETER Experiment Name: At_50mM_NH4NO3_L-to-H_P Parameter: Plant Line Value: Undefined
  misc_feature: MA Experiment 20001457 PARAMETER Experiment Name: At_50mM_NH4NO3_L-to-H_P Parameter: Timepoint (hr) Value: 0.5
  misc_feature: MA Experiment 20001457 PARAMETER Experiment Name: At_50mM_NH4NO3_L-to-H_P Parameter: Tissue Value: Siliques
  misc_feature: MA Experiment 20001457 PARAMETER Experiment Name: At_50mM_NH4NO3_L-to-H_P Parameter: Treatment Value: 50mM NH4NO3 vs. 100mM Manitol
  misc_feature: MA Experiment ID: 20001458 Result: Up-regulated in Transcription
  misc_feature: MA Experiment 20001458 PARAMETER Experiment Name: At_50mM_NH4NO3_L-to-H_P Parameter: Age (day) Value: Undefined
  misc_feature: MA Experiment 20001458 PARAMETER Experiment Name: At_50mM_NH4NO3_L-to-H_P Parameter: Organism Value: Undefined
  misc_feature: MA Experiment 20001458 PARAMETER Experiment Name: At_50mM_NH4NO3_L-to-H_P Parameter: Plant Line Value: Undefined
  misc_feature: MA Experiment 20001458 PARAMETER Experiment Name: At_50mM_NH4NO3_L-to-H_P Parameter: Timepoint (hr) Value: 2
  misc_feature: MA Experiment 20001458 PARAMETER Experiment Name: At_50mM_NH4NO3_L-to-H_P Parameter: Tissue Value: Siliques
  misc_feature: MA Experiment 20001458 PARAMETER Experiment Name: At_50mM_NH4NO3_L-to-H_P Parameter: Treatment Value: 50mM NH4NO3 vs. 100mM Manitol
  misc_feature: MA Experiment ID: 20001459 Result: Up-regulated in Transcription
  misc_feature: MA Experiment 20001459 PARAMETER Experiment Name: At_50mM_NH4NO3_L-to-H_P Parameter: Age (day) Value: Undefined
  misc_feature: MA Experiment 20001459 PARAMETER Experiment Name: At_50mM_NH4NO3_L-to-H_P Parameter: Organism Value: Undefined
  misc_feature: MA Experiment 20001459 PARAMETER Experiment Name: At_50mM_NH4NO3_L-to-H_P Parameter: Plant Line Value: Undefined
  misc_feature: MA Experiment 20001459 PARAMETER Experiment Name: At_50mM_NH4NO3_L-to-H_P Parameter: Timepoint (hr) Value: 4
  misc_feature: MA Experiment 20001459 PARAMETER Experiment Name: At_50mM_NH4NO3_L-to-H_P Parameter: Tissue Value: Siliques
  misc_feature: MA Experiment 20001459 PARAMETER Experiment Name: At_50mM_NH4NO3_L-to-H_P Parameter: Treatment Value: 50mM NH4NO3 vs. 100mM Manitol
  misc_feature: MA Experiment ID: 20001554 Result: Down-regulated in Transcription
  misc_feature: MA Experiment 20001554 PARAMETER Experiment Name: At_Drought_Soil_Dry_P Parameter: Age (day) Value: 21
  misc_feature: MA Experiment 20001554 PARAMETER Experiment Name: At_Drought_Soil_Dry_P Parameter: Organism Value: A. thaliana
  misc_feature: MA Experiment 20001554 PARAMETER Experiment Name: At_Drought_Soil_Dry_P Parameter: Plant Line Value: WS
  misc_feature: MA Experiment 20001554 PARAMETER Experiment Name: At_Drought_Soil_Dry_P Parameter: Post Timepoint (hr) Value: None
  misc_feature: MA Experiment 20001554 PARAMETER Experiment Name: At_Drought_Soil_Dry_P Parameter: Post-Treatment Value: None
  misc_feature: MA Experiment 20001554 PARAMETER Experiment Name: At_Drought_Soil_Dry_P Parameter: Timepoint (day) Value: 7
  misc_feature: MA Experiment 20001554 PARAMETER Experiment Name: At_Drought_Soil_Dry_P Parameter: Treatment Value: Drought vs. No Drought
  misc_feature: MA Experiment ID: 20001555 Result: Down-regulated in Transcription
  misc_feature: MA Experiment 20001555 PARAMETER Experiment Name: At_Drought_Soil_Dry_P Parameter: Age (day) Value: 24
  misc_feature: MA Experiment 20001555 PARAMETER Experiment Name: At_Drought_Soil_Dry_P Parameter: Organism Value: A. thaliana
  misc_feature: MA Experiment 20001555 PARAMETER Experiment Name: At_Drought_Soil_Dry_P Parameter: Plant Line Value: WS
  misc_feature: MA Experiment 20001555 PARAMETER Experiment Name: At_Drought_Soil_Dry_P Parameter: Post Timepoint (hr) Value: None
  misc_feature: MA Experiment 20001555 PARAMETER Experiment Name: At_Drought_Soil_Dry_P Parameter: Post-Treatment Value: None
  misc_feature: MA Experiment 20001555 PARAMETER Experiment Name: At_Drought_Soil_Dry_P Parameter: Timepoint (day) Value: 10
  misc_feature: MA Experiment 20001555 PARAMETER Experiment Name: At_Drought_Soil_Dry_P Parameter: Treatment Value: Drought vs. No Drought
  misc_feature: MA Experiment ID: 20001556 Result: Down-regulated in Transcription
  misc_feature: MA Experiment 20001556 PARAMETER Experiment Name: At_Drought_Soil_Dry_P Parameter: Age (day) Value: 26
  misc_feature: MA Experiment 20001556 PARAMETER Experiment Name: At_Drought_Soil_Dry_P Parameter: Organism Value: A. thaliana
  misc_feature: MA Experiment 20001556 PARAMETER Experiment Name: At_Drought_Soil_Dry_P Parameter: Plant Line Value: WS
  misc_feature: MA Experiment 20001556 PARAMETER Experiment Name: At_Drought_Soil_Dry_P Parameter: Post Timepoint (hr) Value: None
  misc_feature: MA Experiment 20001556 PARAMETER Experiment Name: At_Drought_Soil_Dry_P Parameter: Post-Treatment Value: None
  misc_feature: MA Experiment 20001556 PARAMETER Experiment Name: At_Drought_Soil_Dry_P Parameter: Timepoint (day) Value: 12
  misc_feature: MA Experiment 20001556 PARAMETER Experiment Name: At_Drought_Soil_Dry_P Parameter: Treatment Value: Drought vs. No Drought
  misc_feature: MA Experiment ID: 20001557 Result: Down-regulated in Transcription
  misc_feature: MA Experiment 20001557 PARAMETER Experiment Name: At_Drought_Soil_Dry_P Parameter: Age (day) Value: 27
  misc_feature: MA Experiment 20001557 PARAMETER Experiment Name: At_Drought_Soil_Dry_P Parameter: Organism Value: A. thaliana
  misc_feature: MA Experiment 20001557 PARAMETER Experiment Name: At_Drought_Soil_Dry_P Parameter: Plant Line Value: WS
  misc_feature: MA Experiment 20001557 PARAMETER Experiment Name: At_Drought_Soil_Dry_P Parameter: Post Timepoint (hr) Value: 3
  misc_feature: MA Experiment 20001557 PARAMETER Experiment Name: At_Drought_Soil_Dry_P Parameter: Post-Treatment Value: Re-Water vs. No Drought
  misc_feature: MA Experiment 20001557 PARAMETER Experiment Name: At_Drought_Soil_Dry_P Parameter: Timepoint (day) Value: 13
  misc_feature: MA Experiment 20001557 PARAMETER Experiment Name: At_Drought_Soil_Dry_P Parameter: Treatment Value: Drought vs. No Drought
  misc_feature: MA Experiment ID: 20001558 Result: Down-regulated in Transcription
  misc_feature: MA Experiment 20001558 PARAMETER Experiment Name: At_Drought_Soil_Dry_P Parameter: Age (day) Value: 27
  misc_feature: MA Experiment 20001558 PARAMETER Experiment Name: At_Drought_Soil_Dry_P Parameter: Organism Value: A. thaliana
  misc_feature: MA Experiment 20001558 PARAMETER Experiment Name: At_Drought_Soil_Dry_P Parameter: Plant Line Value: WS
  misc_feature: MA Experiment 20001558 PARAMETER Experiment Name: At_Drought_Soil_Dry_P Parameter: Post Timepoint (hr) Value: 6
  misc_feature: MA Experiment 20001558 PARAMETER Experiment Name: At_Drought_Soil_Dry_P Parameter: Post-Treatment Value: Re-Water vs. No Drought
  misc_feature: MA Experiment 20001558 PARAMETER Experiment Name: At_Drought_Soil_Dry_P Parameter: Timepoint (day) Value: 13
  misc_feature: MA Experiment 20001558 PARAMETER Experiment Name: At_Drought_Soil_Dry_P Parameter: Treatment Value: Drought vs. No Drought
  misc_feature: MA Experiment ID: 20001559 Result: Down-regulated in Transcription
  misc_feature: MA Experiment 20001559 PARAMETER Experiment Name: At_Drought_Soil_Dry_P Parameter: Age (day) Value: 28
  misc_feature: MA Experiment 20001559 PARAMETER Experiment Name: At_Drought_Soil_Dry_P Parameter: Organism Value: A. thaliana
  misc_feature: MA Experiment 20001559 PARAMETER Experiment Name: At_Drought_Soil_Dry_P Parameter: Plant Line Value: WS
  misc_feature: MA Experiment 20001559 PARAMETER Experiment Name: At_Drought_Soil_Dry_P Parameter: Post Timepoint (hr) Value: 29
  misc_feature: MA Experiment 20001559 PARAMETER Experiment Name: At_Drought_Soil_Dry_P Parameter: Post-Treatment Value: Re-Water vs. No Drought
  misc_feature: MA Experiment 20001559 PARAMETER Experiment Name: At_Drought_Soil_Dry_P Parameter: Timepoint (day) Value: 14
  misc_feature: MA Experiment 20001559 PARAMETER Experiment Name: At_Drought_Soil_Dry_P Parameter: Treatment Value: Drought vs. No Drought
  misc_feature: MA Experiment ID: 20001560 Result: Down-regulated in Transcription
  misc_feature: MA Experiment 20001560 PARAMETER Experiment Name: At_Drought_Soil_Dry_P Parameter: Age (day) Value: 28
  misc_feature: MA Experiment 20001560 PARAMETER Experiment Name: At_Drought_Soil_Dry_P Parameter: Organism Value: A. thaliana
  misc_feature: MA Experiment 20001560 PARAMETER Experiment Name: At_Drought_Soil_Dry_P Parameter: Plant Line Value: WS
  misc_feature: MA Experiment 20001560 PARAMETER Experiment Name: At_Drought_Soil_Dry_P Parameter: Post Timepoint (hr) Value: None
  misc_feature: MA Experiment 20001560 PARAMETER Experiment Name: At_Drought_Soil_Dry_P Parameter: Post-Treatment Value: None
  misc_feature: MA Experiment 20001560 PARAMETER Experiment Name: At_Drought_Soil_Dry_P Parameter: Timepoint (day) Value: 14
  misc_feature: MA Experiment 20001560 PARAMETER Experiment Name: At_Drought_Soil_Dry_P Parameter: Treatment Value: Drought vs. No Drought
  misc_feature: MA Experiment ID: 20001757 Result: Up-regulated in Transcription
  misc_feature: MA Experiment 20001757 PARAMETER Experiment Name: At_50mM_NH4NO3_L-to-H_P Parameter: Timepoint (hr) Value: 6
  misc_feature: MA Experiment 20001757 PARAMETER Experiment Name: At_50mM_NH4NO3_L-to-H_P Parameter: Tissue Value: Leaf
  misc_feature: MA Experiment 20001757 PARAMETER Experiment Name: At_50mM_NH4NO3_L-to-H_P Parameter: Treatment Value: 50mM NH4NO3 vs 100mM Mannitol
  misc_feature: MA Experiment ID: 20001759 Result: Up-regulated in Transcription
  misc_feature: MA Experiment 20001759 PARAMETER Experiment Name: At_50mM_NH4NO3_L-to-H_P Parameter: Timepoint (hr) Value: 1
  misc_feature: MA Experiment 20001759 PARAMETER Experiment Name: At_50mM_NH4NO3_L-to-H_P Parameter: Tissue Value: Siliques
  misc_feature: MA Experiment 20001759 PARAMETER Experiment Name: At_50mM_NH4NO3_L-to-H_P Parameter: Treatment Value: 50mM NH4NO3 vs 100mM Mannitol
attcacaataaaccagcgtcggcccaccgcatcccaaaccataacgcttaatccttaaaaaccgtccagatccatttccttcctctacaactcatcacacacacttctaatggcttcttcttcttgtttgaatctcttcttcttctcttttctctccgctctaatcatttctaaatctcagatctctgattccgttaacggggtcgttttccctgttgttaaagaccttccaaccggtcaatacctcgcacagattcgactcggtgactcaccggatccagtcaagctcgtagtcgatctggccggctcaattctctggtttgattgttcctcaagacatgtttcctcgtcaaggaacctaatatccggtagctctagcggctgcttaaaggcaaaagttggaaatgaacgagtatcatcatcatcatcatcgcgtaaagaccaaaacgccgattgcgaattacttgttaaaaacgacgcctttgggattacggcgagaggagagcttttcagtgacgtcatgtcggttggctctgttacttctccgggaaccgttgatctacttttcgcttgtactccaccgtggctgttacgtgggctcgctagtggagcccaaggagtaatgggcttaggaagggcccaaatctcactcccttcacaactcgccgcggaaactaacgaacgtcgtcggttaactgtttacctgtcgccgttgaacggtgtcgtatcaacgagttcggtggaggaggtttttggagtggctgcgtctagatcgctggtttacacgcctttgttaaccggttcgagtggcaactacgtaattaacgtgaaatcgattagagtcaacggggaaaagctctccgtggaaggtccgttggcggtggagctgagcacggtggttccttacacgattttagagagctcgatctacaaggtgttcgcggaagcttacgccaaagctgcgggtgaagctacatcggtgcctcctgtcgcaccgtttgggctctgcttcactagtgacgtagattttccggcggtagatctagcgttgcagagtgagatggtgcggtggaggattcatgggaagaatctgatggtggatgttggtggtggagtccgatgctcggggattgttgacggcgggtcaagtcgagtcaacccgattgtaatgggtgggctacaattagaaggctttatattggactttgatttgggtaactcaatgatgggctttggacaaagaacacgctctgattcaacttcgttgtaatacagaaacctttgtaattgtaaccttctaattatctggtagatatcctcaattttgatccc

SEQ ID NO: 25101 - protein, 386 aa, Arabidopsis thaliana
  peptide (1)..(386): Ceres Seq. ID no. 12488507
  misc_feature (26)..(216): Pfam Name: Eukaryotic aspartyl protease Pfam Description: Eukaryotic aspartyl protease
  misc_feature (26)..(216): Pfam Name: Eukaryotic aspartyl protease Pfam Description: Eukaryotic aspartyl protease
  misc_feature (30)..(246): Homolog of NCBI NO: 11558383 NR Description: conglutin gamma [Lupinus albus]
  misc_feature (259)..(375): Homolog of NCBI NO: 18379072 NR Description: expressed protein
  misc_feature (1)..(284): Homolog of NCBI NO: 18379072 NR Description: expressed protein
  misc_feature (241)..(375): Homolog of NCBI NO: 21537233 NR Description: EDGP precursor [Arabidopsis thaliana]
  misc_feature (5)..(278): Homolog of NCBI NO: 21537233 NR Description: EDGP precursor [Arabidopsis thaliana]
  misc_feature (30)..(246): Homolog of NCBI NO: 11558383 NR Description: conglutin gamma [Lupinus albus]
  misc_feature (1)..(284): Homolog of NCBI NO: 18379072 NR Description: expressed protein
  misc_feature (5)..(278): Homolog of NCBI NO: 21537233 NR Description: EDGP precursor [Arabidopsis thaliana]
  misc_feature (1)..(386): Homolog of NCBI NO: 15239656 NR Description: conglutin gamma - like protein
  misc_feature (1)..(200): Homolog of NCBI NO: 27372527 NR Description: xyloglucan-specific fungal endoglucanase
  misc_feature (238)..(375): Homolog of NCBI NO: 27372527 NR Description: xyloglucan-specific fungal endoglucanase
  misc_feature (1)..(206): Homolog of NCBI NO: 32482806 NR Description: putative xyloglucanase inhibitor [Solanum
  misc_feature (238)..(375): Homolog of NCBI NO: 32482806 NR Description: putative xyloglucanase inhibitor [Solanum
  misc_feature (241)..(375): Homolog of NCBI NO: 21537233 NR Description: EDGP precursor [Arabidopsis thaliana]
  misc_feature (259)..(375): Homolog of NCBI NO: 18379072 NR Description: expressed protein
  misc_feature (238)..(375): Homolog of NCBI NO: 32482806 NR Description: putative xyloglucanase inhibitor [Solanum
  misc_feature (1)..(206): Homolog of NCBI NO: 32482806 NR Description: putative xyloglucanase inhibitor [Solanum
  misc_feature (238)..(375): Homolog of NCBI NO: 27372527 NR Description: xyloglucan-specific fungal endoglucanase
  misc_feature (1)..(200): Homolog of NCBI NO: 27372527 NR Description: xyloglucan-specific fungal endoglucanase
  misc_feature (1)..(386): Homolog of NCBI NO: 15239656 NR Description: conglutin gamma - like protein
MASSSCLNLFFFSFLSALIISKSQISDSVNGVVFPVVKDLPTGQYLAQIRLGDSPDPVKLVVDLAGSILWFDCSSRHVSSSRNLISGSSSGCLKAKVGNERVSSSSSSRKDQNADCELLVKNDAFGITARGELFSDVMSVGSVTSPGTVDLLFACTPPWLLRGLASGAQGVMGLGRAQISLPSQLAAETNERRRLTVYLSPLNGVVSTSSVEEVFGVAASRSLVYTPLLTGSSGNYVINVKSIRVNGEKLSVEGPLAVELSTVVPYTILESSIYKVFAEAYAKAAGEATSVPPVAPFGLCFTSDVDFPAVDLALQSEMVRWRIHGKNLMVDVGGGVRCSGIVDGGSSRVNPIVMGGLQLEGFILDFDLGNSMMGFGQRTRSDSTSL

SEQ ID NO: 25102 - protein, 249 aa, Arabidopsis thaliana
  peptide (1)..(249): Ceres Seq. ID no. 12488508
  misc_feature (1)..(79): Pfam Name: Eukaryotic aspartyl protease Pfam Description: Eukaryotic aspartyl protease
  misc_feature (1)..(79): Pfam Name: Eukaryotic aspartyl protease Pfam Description: Eukaryotic aspartyl protease
  misc_feature (1)..(109): Homolog of NCBI NO: 11558383 NR Description: conglutin gamma [Lupinus albus]
  misc_feature (122)..(238): Homolog of NCBI NO: 18379072 NR Description: expressed protein
  misc_feature (1)..(147): Homolog of NCBI NO: 18379072 NR Description: expressed protein
  misc_feature (104)..(238): Homolog of NCBI NO: 21537233 NR Description: EDGP precursor [Arabidopsis thaliana]
  misc_feature (1)..(141): Homolog of NCBI NO: 21537233 NR Description: EDGP precursor [Arabidopsis thaliana]
  misc_feature (1)..(109): Homolog of NCBI NO: 11558383 NR Description: conglutin gamma [Lupinus albus]
  misc_feature (1)..(147): Homolog of NCBI NO: 18379072 NR Description: expressed protein
  misc_feature (1)..(141): Homolog of NCBI NO: 21537233 NR Description: EDGP precursor [Arabidopsis thaliana]
  misc_feature (1)..(249): Homolog of NCBI NO: 15239656 NR Description: conglutin gamma - like protein
  misc_feature (1)..(63): Homolog of NCBI NO: 27372527 NR Description: xyloglucan-specific fungal endoglucanase
  misc_feature (101)..(238): Homolog of NCBI NO: 27372527 NR Description: xyloglucan-specific fungal endoglucanase
  misc_feature (1)..(69): Homolog of NCBI NO: 32482806 NR Description: putative xyloglucanase inhibitor [Solanum
  misc_feature (101)..(238): Homolog of NCBI NO: 32482806 NR Description: putative xyloglucanase inhibitor [Solanum
  misc_feature (104)..(238): Homolog of NCBI NO: 21537233 NR Description: EDGP precursor [Arabidopsis thaliana]
  misc_feature (122)..(238): Homolog of NCBI NO: 18379072 NR Description: expressed protein
  misc_feature (101)..(238): Homolog of NCBI NO: 32482806 NR Description: putative xyloglucanase inhibitor [Solanum
  misc_feature (1)..(69): Homolog of NCBI NO: 32482806 NR Description: putative xyloglucanase inhibitor [Solanum
  misc_feature (101)..(238): Homolog of NCBI NO: 27372527 NR Description: xyloglucan-specific fungal endoglucanase
  misc_feature (1)..(63): Homolog of NCBI NO: 27372527 NR Description: xyloglucan-specific fungal endoglucanase
  misc_feature (1)..(249): Homolog of NCBI NO: 15239656 NR Description: conglutin gamma - like protein
MSVGSVTSPGTVDLLFACTPPWLLRGLASGAQGVMGLGRAQISLPSQLAAETNERRRLTVYLSPLNGVVSTSSVEEVFGVAASRSLVYTPLLTGSSGNYVINVKSIRVNGEKLSVEGPLAVELSTVVPYTILESSIYKVFAEAYAKAAGEATSVPPVAPFGLCFTSDVDFPAVDLALQSEMVRWRIHGKNLMVDVGGGVRCSGIVDGGSSRVNPIVMGGLQLEGFILDFDLGNSMMGFGQRTRSDSTSL

SEQ ID NO: 25103 - protein, 215 aa, Arabidopsis thaliana
  peptide (1)..(215): Ceres Seq. ID no. 12488509
  misc_feature (89)..(204): Pfam Name: Eukaryotic aspartyl protease Pfam Description: Eukaryotic aspartyl protease
  misc_feature (89)..(204): Pfam Name: Eukaryotic aspartyl protease Pfam Description: Eukaryotic aspartyl protease
  misc_feature (1)..(75): Homolog of NCBI NO: 11558383 NR Description: conglutin gamma [Lupinus albus]
  misc_feature (88)..(204): Homolog of NCBI NO: 18379072 NR Description: expressed protein
  misc_feature (1)..(113): Homolog of NCBI NO: 18379072 NR Description: expressed protein
  misc_feature (70)..(204): Homolog of NCBI NO: 21537233 NR Description: EDGP precursor [Arabidopsis thaliana]
  misc_feature (1)..(107): Homolog of NCBI NO: 21537233 NR Description: EDGP precursor [Arabidopsis thaliana]
  misc_feature (1)..(75): Homolog of NCBI NO: 11558383 NR Description: conglutin gamma [Lupinus albus]
  misc_feature (1)..(113): Homolog of NCBI NO: 18379072 NR Description: expressed protein
  misc_feature (1)..(107): Homolog of NCBI NO: 21537233 NR Description: EDGP precursor [Arabidopsis thaliana]
  misc_feature (1)..(215): Homolog of NCBI NO: 15239656 NR Description: conglutin gamma - like protein
  misc_feature (1)..(29): Homolog of NCBI NO: 27372527 NR Description: xyloglucan-specific fungal endoglucanase
  misc_feature (67)..(204): Homolog of NCBI NO: 27372527 NR Description: xyloglucan-specific fungal endoglucanase
  misc_feature (1)..(35): Homolog of NCBI NO: 32482806 NR Description: putative xyloglucanase inhibitor [Solanum
  misc_feature (67)..(204): Homolog of NCBI NO: 32482806 NR Description: putative xyloglucanase inhibitor [Solanum
  misc_feature (70)..(204): Homolog of NCBI NO: 21537233 NR Description: EDGP precursor [Arabidopsis thaliana]
  misc_feature (88)..(204): Homolog of NCBI NO: 18379072 NR Description: expressed protein
  misc_feature (67)..(204): Homolog of NCBI NO: 32482806 NR Description: putative xyloglucanase inhibitor [Solanum
  misc_feature (1)..(35): Homolog of NCBI NO: 32482806 NR Description: putative xyloglucanase inhibitor [Solanum
  misc_feature (67)..(204): Homolog of NCBI NO: 27372527 NR Description: xyloglucan-specific fungal endoglucanase
  misc_feature (1)..(29): Homolog of NCBI NO: 27372527 NR Description: xyloglucan-specific fungal endoglucanase
  misc_feature (1)..(215): Homolog of NCBI NO: 15239656 NR Description: conglutin gamma - like protein
MGLGRAQISLPSQLAAETNERRRLTVYLSPLNGVVSTSSVEEVFGVAASRSLVYTPLLTGSSGNYVINVKSIRVNGEKLSVEGPLAVELSTVVPYTILESSIYKVFAEAYAKAAGEATSVPPVAPFGLCFTSDVDFPAVDLALQSEMVRWRIHGKNLMVDVGGGVRCSGIVDGGSSRVNPIVMGGLQLEGFILDFDLGNSMMGFGQRTRSDSTSL

SEQ ID NO: 25104 - DNA, 1254 bp, Arabidopsis thaliana
  misc_feature (1)..(1254): Ceres Seq. ID no. 12335354
  misc_feature: MA Experiment ID: 108434 Result: Down-regulated in Transcription
  misc_feature: MA Experiment 108434 PARAMETER Experiment Name: At_Root_Tips_cDNA_P Parameter: Tissue Value: Root Tips
  misc_feature: MA Experiment ID: 108488 Result: Down-regulated in Transcription
  misc_feature: MA Experiment ID: 108561 Result: Up-regulated in Transcription
  misc_feature: MA Experiment 108561 PARAMETER Experiment Name: At_100uM_ABA_cDNA_P Parameter: Timepoint (hr) Value: 6
  misc_feature: MA Experiment 108561 PARAMETER Experiment Name: At_100uM_ABA_cDNA_P Parameter: Tissue Value: Aerial
  misc_feature: MA Experiment 108561 PARAMETER Experiment Name: At_100uM_ABA_cDNA_P Parameter: Treatment Value: 100uM ABA vs. No Treatment
  misc_feature: MA Experiment ID: 108585 Result: Up-regulated in Transcription
  misc_feature: MA Experiment 108585 PARAMETER Experiment Name: At_5mM_NaNP_cDNA_P Parameter: Timepoint (hr) Value: 6
  misc_feature: MA Experiment 108585 PARAMETER Experiment Name: At_5mM_NaNP_cDNA_P Parameter: Tissue Value: Aerial
  misc_feature: MA Experiment 108585 PARAMETER Experiment Name: At_5mM_NaNP_cDNA_P Parameter: Treatment Value: null
  misc_feature: MA Experiment ID: 20000171 Result: Up-regulated in Transcription
  misc_feature: MA Experiment 20000171 PARAMETER Experiment Name: At_42deg_Heat_P Parameter: Age (day) Value: 14
  misc_feature: MA Experiment 20000171 PARAMETER Experiment Name: At_42deg_Heat_P Parameter: Organism Value: A. thaliana
  misc_feature: MA Experiment 20000171 PARAMETER Experiment Name: At_42deg_Heat_P Parameter: Plant Line Value: WS
  misc_feature: MA Experiment 20000171 PARAMETER Experiment Name: At_42deg_Heat_P Parameter: Temperature (deg C) Value: 42 vs. 22
  misc_feature: MA Experiment 20000171 PARAMETER Experiment Name: At_42deg_Heat_P Parameter: Timepoint (hr) Value: 1
  misc_feature: MA Experiment 20000171 PARAMETER Experiment Name: At_42deg_Heat_P Parameter: Tissue Value: Aerial
  misc_feature: MA Experiment ID: 20000794 Result: Up-regulated in Transcription
  misc_feature: MA Experiment 20000794 PARAMETER Experiment Name: At_Petals_P Parameter: Age (day) Value: 23-25 days
  misc_feature: MA Experiment 20000794 PARAMETER Experiment Name: At_Petals_P Parameter: Plant Line Value: WS
  misc_feature: MA Experiment 20000794 PARAMETER Experiment Name: At_Petals_P Parameter: Tissue Value: Petals vs. Whole plant
  misc_feature: MA Experiment ID: 20001905 Result: Up-regulated in Transcription
  misc_feature: MA Experiment 20001905 PARAMETER Experiment Name: At_Drought_Reproduction_P Parameter: Age (day) Value: 40
  misc_feature: MA Experiment 20001905 PARAMETER Experiment Name: At_Drought_Reproduction_P Parameter: Organism Value: A. thaliana
  misc_feature: MA Experiment 20001905 PARAMETER Experiment Name: At_Drought_Reproduction_P Parameter: Plant Line Value: WS
  misc_feature: MA Experiment 20001905 PARAMETER Experiment Name: At_Drought_Reproduction_P Parameter: Timepoint (day) Value: 10
  misc_feature: MA Experiment 20001905 PARAMETER Experiment Name: At_Drought_Reproduction_P Parameter: Tissue Value: Rosettes
  misc_feature: MA Experiment 20001905 PARAMETER Experiment Name: At_Drought_Reproduction_P Parameter: Treatment Value: Drought vs. No Drought
ataattggtctctcgcggtggcttggcgacacggaacagagaattaatcgagaatctttttcagcttgtaaccggaattcatggcgatgcaagccggtgttcagacctctaaggtccttatcctactcggcgcaggtgtatctggttcgatcgtattgagacatgggaggttgtctgacctaatagcccaacttcaagacttactcaatggtgctcaaggagttgaaagcactccttttaagtatgacggtgcactccttgctgctcagattcgacagcttgcaaacgagatcaaagaactaactatgaccaatccagttaccatctttaatggagattcaaactccagtggctatgcatcttacctggttccagcggctgccgttggagctatggggtactgctacatgtggtggaagggctggtcgttttcagatgcaatgtttgtgacaaagaaaaatatggctgatgcggttgcctctgtttcgaaacaactagacgatttgtcagacacattagcgtcaacaaggaaacatctttctcagaagctagcgaccttggattggaaggtggaagagcagaatgagacatctaaaatgatcttaagtgatgttactgagatgagatcaagcatttcgcaaattgggtttgattttaagcaacttaatgaaatgatttctggaatagaagggaagattgaaagtcttgaaagcaaacaagatgtgaccctctctggactatggcatctatgtcaagttgcaggcgttaaagacagcacaagtactaaagtatttcaggatgttggtgagagattacctattgatggaaaaccatccactaatacttctctctctggtctgcggtttctgacggaaggcaaagaggatgcaaatgtaatacacaagccggttatggcgaaagaaattatggtgatgggggaaaaaacaaaagtcactgcagcgggaagaagcagagttcatagagcgtttccaggtggaatatcttgggtacgggatgtttcaggactatcctaatattattttggttgatatacaaagaaattgcttgtattcgtcccaaattctgatactgggactggcaattattttttcatgtaaaaagaagaaaaatctacatatgttattgcatccaccaacaatttggtttgcccctaattatatttggtcttgatgtttgtaaagaaagagtgtgattaaggctttcacgtatgttgatgtcttcattgatttggac

SEQ ID NO: 25105 - protein, 317 aa, Arabidopsis thaliana
  peptide (1)..(317): Ceres Seq. ID no. 12335355
  misc_feature (11)..(225): Homolog of NCBI NO: 22329773 NR Description: Expressed protein
  misc_feature (12)..(213): Homolog of NCBI NO: 34894218 NR Description: P0439B06.30 [Oryza sativa (japonica
  misc_feature (7)..(256): Homolog of NCBI NO: 30688826 NR Description: expressed protein [Arabidopsis thaliana]
  misc_feature (1)..(225): Homolog of NCBI NO: 34906300 NR Description: unnamed protein product [Oryza sativa (japonica
  misc_feature (1)..(253): Homolog of NCBI NO: 7487252 NR Description: hypothetical protein At2g02730 [imported] -
  misc_feature (1)..(253): Homolog of NCBI NO: 15227027 NR Description: expressed protein
  misc_feature (1)..(308): Homolog of NCBI NO: 25361065 NR Description: protein T7N9.6 [imported] - Arabidopsis thaliana
  misc_feature (1)..(302): Homolog of NCBI NO: 18396143 NR Description: bZIP family transcription factor
  misc_feature (1)..(302): Homolog of NCBI NO: 21537323 NR Description: unknown [Arabidopsis thaliana]
  misc_feature (1)..(317): Homolog of NCBI NO: 18390460 NR Description: expressed protein
MAMQAGVQTSKVLILLGAGVSGSIVLRHGRLSDLIAQLQDLLNGAQGVESTPFKYDGALLAAQIRQLANEIKELTMTNPVTIFNGDSNSSGYASYLVPAAAVGAMGYCYMWWKGWSFSDAMFVTKKNMADAVASVSKQLDDLSDTLASTRKHLSQKLATLDWKVEEQNETSKMILSDVTEMRSSISQIGFDFKQLNEMISGIEGKIESLESKQDVTLSGLWHLCQVAGVKDSTSTKVFQDVGERLPIDGKPSTNTSLSGLRFLTEGKEDANVIHKPVMAKEIMVMGEKTKVTAAGRSRVHRAFPGGISWVRDVSGLS

SEQ ID NO: 25106 - protein, 315 aa, Arabidopsis thaliana
  peptide (1)..(315): Ceres Seq. ID no. 12335356
  misc_feature (1)..(251): Homolog of NCBI NO: 7487252 NR Description: hypothetical protein At2g02730 [imported] -
  misc_feature (1)..(251): Homolog of NCBI NO: 15227027 NR Description: expressed protein
  misc_feature (1)..(306): Homolog of NCBI NO: 25361065 NR Description: protein T7N9.6 [imported] - Arabidopsis thaliana
  misc_feature (1)..(300): Homolog of NCBI NO: 18396143 NR Description: bZIP family transcription factor
  misc_feature (1)..(300): Homolog of NCBI NO: 21537323 NR Description: unknown [Arabidopsis thaliana]
  misc_feature (1)..(315): Homolog of NCBI NO: 18390460 NR Description: expressed protein
  misc_feature (9)..(223): Homolog of NCBI NO: 22329773 NR Description: Expressed protein
  misc_feature (10)..(211): Homolog of NCBI NO: 34894218 NR Description: P0439B06.30 [Oryza sativa (japonica
  misc_feature (5)..(254): Homolog of NCBI NO: 30688826 NR Description: expressed protein [Arabidopsis thaliana]
  misc_feature (1)..(223): Homolog of NCBI NO: 34906300 NR Description: unnamed protein product [Oryza sativa (japonica
MQAGVQTSKVLILLGAGVSGSIVLRHGRLSDLIAQLQDLLNGAQGVESTPFKYDGALLAAQIRQLANEIKELTMTNPVTIFNGDSNSSGYASYLVPAAAVGAMGYCYMWWKGWSFSDAMFVTKKNMADAVASVSKQLDDLSDTLASTRKHLSQKLATLDWKVEEQNETSKMILSDVTEMRSSISQIGFDFKQLNEMISGIEGKIESLESKQDVTLSGLWHLCQVAGVKDSTSTKVFQDVGERLPIDGKPSTNTSLSGLRFLTEGKEDANVIHKPVMAKEIMVMGEKTKVTAAGRSRVHRAFPGGISWVRDVSGLS

SEQ ID NO: 25107 - protein, 242 aa, Arabidopsis thaliana
  peptide (1)..(242): Ceres Seq. ID no. 12335357
  misc_feature (1)..(150): Homolog of NCBI NO: 22329773 NR Description: Expressed protein
  misc_feature (1)..(138): Homolog of NCBI NO: 34894218 NR Description: P0439B06.30 [Oryza sativa (japonica
  misc_feature (1)..(181): Homolog of NCBI NO: 30688826 NR Description: expressed protein [Arabidopsis thaliana]
  misc_feature (1)..(150): Homolog of NCBI NO: 34906300 NR Description: unnamed protein product [Oryza sativa (japonica
  misc_feature (1)..(178): Homolog of NCBI NO: 7487252 NR Description: hypothetical protein At2g02730 [imported] -
  misc_feature (1)..(178): Homolog of NCBI NO: 15227027 NR Description: expressed protein
  misc_feature (1)..(233): Homolog of NCBI NO: 25361065 NR Description: protein T7N9.6 [imported] - Arabidopsis thaliana
  misc_feature (1)..(227): Homolog of NCBI NO: 18396143 NR Description: bZIP family transcription factor
  misc_feature (1)..(227): Homolog of NCBI NO: 21537323 NR Description: unknown [Arabidopsis thaliana]
  misc_feature (1)..(242): Homolog of NCBI NO: 18390460 NR Description: expressed protein
MTNPVTIFNGDSNSSGYASYLVPAAAVGAMGYCYMWWKGWSFSDAMFVTKKNMADAVASVSKQLDDLSDTLASTRKHLSQKLATLDWKVEEQNETSKMILSDVTEMRSSISQIGFDFKQLNEMISGIEGKIESLESKQDVTLSGLWHLCQVAGVKDSTSTKVFQDVGERLPIDGKPSTNTSLSGLRFLTEGKEDANVIHKPVMAKEIMVMGEKTKVTAAGRSRVHRAFPGGISWVRDVSGLS

SEQ ID NO: 25108 - DNA, 1242 bp, Arabidopsis thaliana
  misc_feature (1)..(1242): Ceres Seq. ID no. 13495848
  misc_feature: MA Experiment ID: 108433 Result: Down-regulated in Transcription
  misc_feature: MA Experiment 108433 PARAMETER Experiment Name: At_rhl_Mutant2_cDNA_P Parameter: Age (day) Value: 7
  misc_feature: MA Experiment 108433 PARAMETER Experiment Name: At_rhl_Mutant2_cDNA_P Parameter: Organism Value: A. thaliana
  misc_feature: MA Experiment 108433 PARAMETER Experiment Name: At_rhl_Mutant2_cDNA_P Parameter: Plant Line Value: rhl Mutant vs. wt landsburg
  misc_feature: MA Experiment 108433 PARAMETER Experiment Name: At_rhl_Mutant2_cDNA_P Parameter: Tissue Value: Roots
  misc_feature: MA Experiment ID: 108434 Result: Down-regulated in Transcription
  misc_feature: MA Experiment 108434 PARAMETER Experiment Name: At_Root_Tips_cDNA_P Parameter: Tissue Value: Root Tips
  misc_feature: MA Experiment ID: 108461 Result: Up-regulated in Transcription
  misc_feature: MA Experiment 108461 PARAMETER Experiment Name: At_Germinating_Seeds_cDNA_P Parameter: Age (day) Value: 1 vs. 0
  misc_feature: MA Experiment 108461 PARAMETER Experiment Name: At_Germinating_Seeds_cDNA_P Parameter: Tissue Value: Germinating Seeds
  misc_feature: MA Experiment ID: 108462 Result: Up-regulated in Transcription
  misc_feature: MA Experiment 108462 PARAMETER Experiment Name: At_Germinating_Seeds_cDNA_P Parameter: Age (day) Value: 2 vs. 0
  misc_feature: MA Experiment 108462 PARAMETER Experiment Name: At_Germinating_Seeds_cDNA_P Parameter: Tissue Value: Germinating Seeds
  misc_feature: MA Experiment ID: 108463 Result: Up-regulated in Transcription
  misc_feature: MA Experiment 108463 PARAMETER Experiment Name: At_Germinating_Seeds_cDNA_P Parameter: Age (day) Value: 3 vs. 0
  misc_feature: MA Experiment 108463 PARAMETER Experiment Name: At_Germinating_Seeds_cDNA_P Parameter: Tissue Value: Germinating Seeds
  misc_feature: MA Experiment ID: 108464 Result: Up-regulated in Transcription
  misc_feature: MA Experiment 108464 PARAMETER Experiment Name: At_Germinating_Seeds_cDNA_P Parameter: Age (day) Value: 4 vs. 0
  misc_feature: MA Experiment 108464 PARAMETER Experiment Name: At_Germinating_Seeds_cDNA_P Parameter: Tissue Value: Germinating Seeds
  misc_feature: MA Experiment ID: 108561 Result: Down-regulated in Transcription
  misc_feature: MA Experiment 108561 PARAMETER Experiment Name: At_100uM_ABA_cDNA_P Parameter: Timepoint (hr) Value: 6
  misc_feature: MA Experiment 108561 PARAMETER Experiment Name: At_100uM_ABA_cDNA_P Parameter: Tissue Value: Aerial
  misc_feature: MA Experiment 108561 PARAMETER Experiment Name: At_100uM_ABA_cDNA_P Parameter: Treatment Value: 100uM ABA vs. No Treatment
  misc_feature: MA Experiment ID: 108573 Result: Down-regulated in Transcription
  misc_feature: MA Experiment 108573 PARAMETER Experiment Name: At_Drought_cDNA_P Parameter: Timepoint (hr) Value: 6
  misc_feature: MA Experiment 108573 PARAMETER Experiment Name: At_Drought_cDNA_P Parameter: Tissue Value: Aerial
  misc_feature: MA Experiment 108573 PARAMETER Experiment Name: At_Drought_cDNA_P Parameter: Treatment Value: Drought vs. No Drought
  misc_feature: MA Experiment ID: 108574 Result: Up-regulated in Transcription
  misc_feature: MA Experiment 108574 PARAMETER Experiment Name: At_Wounding__cDNA_P Parameter: Timepoint (hr) Value: 1
  misc_feature: MA Experiment 108574 PARAMETER Experiment Name: At_Wounding__cDNA_P Parameter: Tissue Value: Aerial
  misc_feature: MA Experiment 108574 PARAMETER Experiment Name: At_Wounding__cDNA_P Parameter: Treatment Value: Wounding vs. No Wounding
  misc_feature: MA Experiment ID: 108594 Result: Up-regulated in Transcription
  misc_feature: MA Experiment 108594 PARAMETER Experiment Name: At_Ler-rhl_Root_cDNA_P Parameter: Plant Line Value: null
  misc_feature: MA Experiment ID: 20000070 Result: Down-regulated in Transcription
  misc_feature: MA Experiment 20000070 PARAMETER Experiment Name: At_100uM_ABA_Mutants_cDNA_P Parameter: Plant Line Value: CS24
  misc_feature: MA Experiment 20000070 PARAMETER Experiment Name: At_100uM_ABA_Mutants_cDNA_P Parameter: Timepoint (hr) Value: 6
  misc_feature: MA Experiment 20000070 PARAMETER Experiment Name: At_100uM_ABA_Mutants_cDNA_P Parameter: Tissue Value: Aerial
  misc_feature: MA Experiment 20000070 PARAMETER Experiment Name: At_100uM_ABA_Mutants_cDNA_P Parameter: Treatment Value: 100uM ABA vs. No Treatment
  misc_feature: MA Experiment ID: 20000173 Result: Down-regulated in Transcription
  misc_feature: MA Experiment 20000173 PARAMETER Experiment Name: At_42deg_Heat_P Parameter: Age (day) Value: 14
  misc_feature: MA Experiment 20000173 PARAMETER Experiment Name: At_42deg_Heat_P Parameter: Organism Value: A. thaliana
  misc_feature: MA Experiment 20000173 PARAMETER Experiment Name: At_42deg_Heat_P Parameter: Plant Line Value: WS
  misc_feature: MA Experiment 20000173 PARAMETER Experiment Name: At_42deg_Heat_P Parameter: Temperature (deg C) Value: 42 vs. 22
  misc_feature: MA Experiment 20000173 PARAMETER Experiment Name: At_42deg_Heat_P Parameter: Timepoint (hr) Value: 6
  misc_feature: MA Experiment 20000173 PARAMETER Experiment Name: At_42deg_Heat_P Parameter: Tissue Value: Aerial
  misc_feature: MA Experiment ID: 20000180 Result: Up-regulated in Transcription
  misc_feature: MA Experiment 20000180 PARAMETER Experiment Name: At_Germinating_Seeds_P Parameter: Age (hr) Value: 24 vs. 0
  misc_feature: MA Experiment 20000180 PARAMETER Experiment Name: At_Germinating_Seeds_P Parameter: Tissue Value: Germinating Seeds
  misc_feature: MA Experiment ID: 20000185 Result: Up-regulated in Transcription
  misc_feature: MA Experiment 20000185 PARAMETER Experiment Name: At_Roots__P Parameter: Age (day) Value: 7 vs. 21
  misc_feature: MA Experiment 20000185 PARAMETER Experiment Name: At_Roots__P Parameter: Organism Value: A. thaliana
  misc_feature: MA Experiment 20000185 PARAMETER Experiment Name: At_Roots__P Parameter: Tissue Value: Roots vs. Whole Plant
  misc_feature: MA Experiment ID: 20000227 Result: Down-regulated in Transcription
  misc_feature: MA Experiment 20000227 PARAMETER Experiment Name: At_Root-Tips-vs-Tops_P Parameter: Tissue Value: Root Tips vs. Root Tops
  misc_feature: MA Experiment ID: 20000269 Result: Up-regulated in Transcription
  misc_feature: MA Experiment 20000269 PARAMETER Experiment Name: At_1mM_KNO3_L-vs-H_Roots_P Parameter: Age (day) Value: 7,10,12
  misc_feature: MA Experiment 20000269 PARAMETER Experiment Name: At_1mM_KNO3_L-vs-H_Roots_P Parameter: Organism Value: A. thaliana
  misc_feature: MA Experiment 20000269 PARAMETER Experiment Name: At_1mM_KNO3_L-vs-H_Roots_P Parameter: Plant Line Value: WS
  misc_feature: MA Experiment 20000269 PARAMETER Experiment Name: At_1mM_KNO3_L-vs-H_Roots_P Parameter: Timepoint (day) Value: 7,10,12
  misc_feature: MA Experiment 20000269 PARAMETER Experiment Name: At_1mM_KNO3_L-vs-H_Roots_P Parameter: Tissue Value: Roots
  misc_feature: MA Experiment 20000269 PARAMETER Experiment Name: At_1mM_KNO3_L-vs-H_Roots_P Parameter: Treatment Value: 1mM KNO3 vs. 50mM KNO3
  misc_feature: MA Experiment ID: 20000436 Result: Down-regulated in Transcription
  misc_feature: MA Experiment 20000436 PARAMETER Experiment Name: At_Drought_P Parameter: Age (day) Value: 7
  misc_feature: MA Experiment 20000436 PARAMETER Experiment Name: At_Drought_P Parameter: Organism Value: A. thaliana
  misc_feature: MA Experiment 20000436 PARAMETER Experiment Name: At_Drought_P Parameter: Plant Line Value: WS
  misc_feature: MA Experiment 20000436 PARAMETER Experiment Name: At_Drought_P Parameter: Timepoint (hr) Value: 12
  misc_feature: MA Experiment 20000436 PARAMETER Experiment Name: At_Drought_P Parameter: Tissue Value: Whole Plant
  misc_feature: MA Experiment 20000436 PARAMETER Experiment Name: At_Drought_P Parameter: Treatment Value: Drought vs. No Drought
  misc_feature: MA Experiment ID: 20000437 Result: Down-regulated in Transcription
  misc_feature: MA Experiment 20000437 PARAMETER Experiment Name: At_Drought_P Parameter: Age (day) Value: 8
  misc_feature: MA Experiment 20000437 PARAMETER Experiment Name: At_Drought_P Parameter: Organism Value: A. thaliana
  misc_feature: MA Experiment 20000437 PARAMETER Experiment Name: At_Drought_P Parameter: Plant Line Value: WS
  misc_feature: MA Experiment 20000437 PARAMETER Experiment Name: At_Drought_P Parameter: Timepoint (hr) Value: 24
  misc_feature: MA Experiment 20000437 PARAMETER Experiment Name: At_Drought_P Parameter: Tissue Value: Whole Plant
  misc_feature: MA Experiment 20000437 PARAMETER Experiment Name: At_Drought_P Parameter: Treatment Value: Drought vs. No Drought
  misc_feature: MA Experiment ID: 20000439 Result: Up-regulated in Transcription
  misc_feature: MA Experiment 20000439 PARAMETER Experiment Name: At_Roots__P Parameter: Age (day) Value: 14 vs. 21
  misc_feature: MA Experiment 20000439 PARAMETER Experiment Name: At_Roots__P Parameter: Organism Value: A. thaliana
  misc_feature: MA Experiment 20000439 PARAMETER Experiment Name: At_Roots__P Parameter: Tissue Value: Roots vs. Whole Plant
  misc_feature: MA Experiment ID: 20000441 Result: Up-regulated in Transcription
  misc_feature: MA Experiment 20000441 PARAMETER Experiment Name: At_1uM_BR-BRZ__P Parameter: Tissue Value: Shoot Apices
  misc_feature: MA Experiment 20000441 PARAMETER Experiment Name: At_1uM_BR-BRZ__P Parameter: Treatment Value: 1uM BR vs. No Treatment
  misc_feature: MA Experiment ID: 20000443 Result: Up-regulated in Transcription
  misc_feature: MA Experiment 20000443 PARAMETER Experiment Name: At_1uM_BR-BRZ__P Parameter: Tissue Value: Shoot Apices
  misc_feature: MA Experiment 20000443 PARAMETER Experiment Name: At_1uM_BR-BRZ__P Parameter: Treatment Value: 1uM BRZ vs. No Treatment
  misc_feature: MA Experiment ID: 20001554 Result: Down-regulated in Transcription
  misc_feature: MA Experiment 20001554 PARAMETER Experiment Name: At_Drought_Soil_Dry_P Parameter: Age (day) Value: 21
  misc_feature: MA Experiment 20001554 PARAMETER Experiment Name: At_Drought_Soil_Dry_P Parameter: Organism Value: A. thaliana
  misc_feature: MA Experiment 20001554 PARAMETER Experiment Name: At_Drought_Soil_Dry_P Parameter: Plant Line Value: WS
  misc_feature: MA Experiment 20001554 PARAMETER Experiment Name: At_Drought_Soil_Dry_P Parameter: Post Timepoint (hr) Value: None
  misc_feature: MA Experiment 20001554 PARAMETER Experiment Name: At_Drought_Soil_Dry_P Parameter: Post-Treatment Value: None
  misc_feature: MA Experiment 20001554 PARAMETER Experiment Name: At_Drought_Soil_Dry_P Parameter: Timepoint (day) Value: 7
  misc_feature: MA Experiment 20001554 PARAMETER Experiment Name: At_Drought_Soil_Dry_P Parameter: Treatment Value: Drought vs. No Drought
  misc_feature: MA Experiment ID: 20001556 Result: Down-regulated in Transcription
  misc_feature: MA Experiment 20001556 PARAMETER Experiment Name: At_Drought_Soil_Dry_P Parameter: Age (day) Value: 26
  misc_feature: MA Experiment 20001556 PARAMETER Experiment Name: At_Drought_Soil_Dry_P Parameter: Organism Value: A. thaliana
  misc_feature: MA Experiment 20001556 PARAMETER Experiment Name: At_Drought_Soil_Dry_P Parameter: Plant Line Value: WS
  misc_feature: MA Experiment 20001556 PARAMETER Experiment Name: At_Drought_Soil_Dry_P Parameter: Post Timepoint (hr) Value: None
  misc_feature: MA Experiment 20001556 PARAMETER Experiment Name: At_Drought_Soil_Dry_P Parameter: Post-Treatment Value: None
  misc_feature: MA Experiment 20001556 PARAMETER Experiment Name: At_Drought_Soil_Dry_P Parameter: Timepoint (day) Value: 12
  misc_feature: MA Experiment 20001556 PARAMETER Experiment Name: At_Drought_Soil_Dry_P Parameter: Treatment Value: Drought vs. No Drought
  misc_feature: MA Experiment ID: 20001557 Result: Up-regulated in Transcription
  misc_feature: MA Experiment 20001557 PARAMETER Experiment Name: At_Drought_Soil_Dry_P Parameter: Age (day) Value: 27
  misc_feature: MA Experiment 20001557 PARAMETER Experiment Name: At_Drought_Soil_Dry_P Parameter: Organism Value: A. thaliana
  misc_feature: MA Experiment 20001557 PARAMETER Experiment Name: At_Drought_Soil_Dry_P Parameter: Plant Line Value: WS
  misc_feature: MA Experiment 20001557 PARAMETER Experiment Name: At_Drought_Soil_Dry_P Parameter: Post Timepoint (hr) Value: 3
  misc_feature: MA Experiment 20001557 PARAMETER Experiment Name: At_Drought_Soil_Dry_P Parameter: Post-Treatment Value: Re-Water vs. No Drought
  misc_feature: MA Experiment 20001557 PARAMETER Experiment Name: At_Drought_Soil_Dry_P Parameter: Timepoint (day) Value: 13
  misc_feature: MA Experiment 20001557 PARAMETER Experiment Name: At_Drought_Soil_Dry_P Parameter: Treatment Value: Drought vs. No Drought
  misc_feature: MA Experiment ID: 20001558 Result: Up-regulated in Transcription
  misc_feature: MA Experiment 20001558 PARAMETER Experiment Name: At_Drought_Soil_Dry_P Parameter: Age (day) Value: 27
  misc_feature: MA Experiment 20001558 PARAMETER Experiment Name: At_Drought_Soil_Dry_P Parameter: Organism Value: A. thaliana
  misc_feature: MA Experiment 20001558 PARAMETER Experiment Name: At_Drought_Soil_Dry_P Parameter: Plant Line Value: WS
  misc_feature: MA Experiment 20001558 PARAMETER Experiment Name: At_Drought_Soil_Dry_P Parameter: Post Timepoint (hr) Value: 6
  misc_feature: MA Experiment 20001558 PARAMETER Experiment Name: At_Drought_Soil_Dry_P Parameter: Post-Treatment Value: Re-Water vs. No Drought
  misc_feature: MA Experiment 20001558 PARAMETER Experiment Name: At_Drought_Soil_Dry_P Parameter: Timepoint (day) Value: 13
  misc_feature: MA Experiment 20001558 PARAMETER Experiment Name: At_Drought_Soil_Dry_P Parameter: Treatment Value: Drought vs. No Drought
  misc_feature: MA Experiment ID: 20001560 Result: Up-regulated in Transcription
  misc_feature: MA Experiment 20001560 PARAMETER Experiment Name: At_Drought_Soil_Dry_P Parameter: Age (day) Value: 28
  misc_feature: MA Experiment 20001560 PARAMETER Experiment Name: At_Drought_Soil_Dry_P Parameter: Organism Value: A. thaliana
  misc_feature: MA Experiment 20001560 PARAMETER Experiment Name: At_Drought_Soil_Dry_P Parameter: Plant Line Value: WS
  misc_feature: MA Experiment 20001560 PARAMETER Experiment Name: At_Drought_Soil_Dry_P Parameter: Post Timepoint (hr) Value: None
  misc_feature: MA Experiment 20001560 PARAMETER Experiment Name: At_Drought_Soil_Dry_P Parameter: Post-Treatment Value: None
  misc_feature: MA Experiment 20001560 PARAMETER Experiment Name: At_Drought_Soil_Dry_P Parameter: Timepoint (day) Value: 14
  misc_feature: MA Experiment 20001560 PARAMETER Experiment Name: At_Drought_Soil_Dry_P Parameter: Treatment Value: Drought vs. No Drought
acacatatacattcacattactaatctctcaagatttcacaattttcttgtgattttctctcagtttcttatttcgtttcataacatggatgccatgagtagcgtagacgagagctctacaactacagattccattccggcgagaaagtcatcgtctccggcgagtttactatatagaatgggaagcggaacaagcgtggtacttgattcagagaacggtgtcgaagtcgaagtcgaagccgaatcaagaaagcttccttcttcaagattcaaaggtgttgttcctcaaccaaatggaagatggggagctcagatttacgagaaacatcaacgcgtgtggcttggtactttcaacgaggaagacgaagcagctcgtgcttacgacgtcgcggctcaccgtttccgtggccgcgatgccgttactaatttcaaagacacgacgttcgaagaagaggttgagttcttaaacgcgcattcgaaatcagagatcgtagatatgttgagaaaacacacttacaaagaagagttagaccaaaggaaacgtaaccgtgacggtaacggaaaagagacgacggcgtttgctttggcttcgatggtggttatgacggggtttaaaacggcggagttactgtttgagaaaacggtaacgccaagtgacgtcgggaaactaaaccgtttagttataccaaaacaccaagcggagaaacattttccgttaccgttaggtaataataacgtctccgttaaaggtatgctgttgaatttcgaagacgttaacgggaaagtgtggaggttccgttactcttattggaatagtagtcaaagttatgtgttgaccaaaggttggagtagattcgttaaagagaagagactttgtgctggtgatttgatcagttttaaaagatccaacgatcaagatcaaaaattctttatcgggtggaaatcgaaatccgggttggatctagagacgggtcgggttatgagattgtttggggttgatatttctttaaacgccgtcgttgtagtgaaggaaacaacggaggtgttaatgtcgtcgttaaggtgtaagaatcaacgagttttgtaataacaatttaacaacttgggaaagaaaaaaaaagctttttgattttaatttctcttcaacgttaatcttgctgagattatttatgttgtaagttgtaacaagtggaaaaaattaattaggtgtcaaacaaatcttgtgttaatattctttgtatg

SEQ ID NO: 25109 - protein, 361 aa, Arabidopsis thaliana
  peptide (1)..(361): Ceres Seq. ID no. 13495849
  misc_feature (210)..(319): Pfam Name: B3 DNA binding domain Pfam Description: B3 DNA binding domain
  misc_feature (68)..(299): Homolog of NCBI NO: 15223618 NR Description: AP2 domain transcription factor, putative
  misc_feature (86)..(335): Homolog of NCBI NO: 34895676 NR Description: putative DNA binding protein RAV2
  misc_feature (84)..(344): Homolog of NCBI NO: 34911404 NR Description: DNA-binding protein RAV2-like
  misc_feature (33)..(334): Homolog of NCBI NO: 15222622 NR Description: AP2 domain transcription factor, putative
  misc_feature (47)..(361): Homolog of NCBI NO: 2281641 NR Description: AP2 domain containing protein RAP2.8 [Arabidopsis
  misc_feature (29)..(361): Homolog of NCBI NO: 18409138 NR Description: AP2 domain protein RAP2.8 (RAV2) [Arabidopsis
  misc_feature (29)..(361): Homolog of NCBI NO: 21554039 NR Description: putative RAV2-like DNA-binding protein
  misc_feature (33)..(360): Homolog of NCBI NO: 15222217 NR Description: AP2 domain transcription factor, putative  (RAV1)
  misc_feature (29)..(361): Homolog of NCBI NO: 15230871 NR Description: AP2 domain transcription factor, putative
  misc_feature (29)..(361): Homolog of NCBI NO: 21593532 NR Description: AP2 domain transcription factor [Arabidopsis
HIYIHITNLSRFHNFLVIFSQFLISFHNMDAMSSVDESSTTTDSIPARKSSSPASLLYRMGSGTSVVLDSENGVEVEVEAESRKLPSSRFKGVVPQPNGRWGAQIYEKHQRVWLGTFNEEDEAARAYDVAAHRFRGRDAVTNFKDTTFEEEVEFLNAHSKSEIVDMLRKHTYKEELDQRKRNRDGNGKETTAFALASMVVMTGFKTAELLFEKTVTPSDVGKLNRLVIPKHQAEKHFPLPLGNNNVSVKGMLLNFEDVNGKVWRFRYSYWNSSQSYVLTKGWSRFVKEKRLCAGDLISFKRSNDQDQKFFIGWKSKSGLDLETGRVMRLFGVDISLNAVVVVKETTEVLMSSLRCKNQRVL

SEQ ID NO: 25110 - protein, 333 aa, Arabidopsis thaliana
  peptide (1)..(333): Ceres Seq. ID no. 13495850
  misc_feature (182)..(291): Pfam Name: B3 DNA binding domain Pfam Description: B3 DNA binding domain
  misc_feature (40)..(271): Homolog of NCBI NO: 15223618 NR Description: AP2 domain transcription factor, putative
  misc_feature (58)..(307): Homolog of NCBI NO: 34895676 NR Description: putative DNA binding protein RAV2
  misc_feature (56)..(316): Homolog of NCBI NO: 34911404 NR Description: DNA-binding protein RAV2-like
  misc_feature (5)..(306): Homolog of NCBI NO: 15222622 NR Description: AP2 domain transcription factor, putative
  misc_feature (19)..(333): Homolog of NCBI NO: 2281641 NR Description: AP2 domain containing protein RAP2.8 [Arabidopsis
  misc_feature (1)..(333): Homolog of NCBI NO: 18409138 NR Description: AP2 domain protein RAP2.8 (RAV2) [Arabidopsis
  misc_feature (1)..(333): Homolog of NCBI NO: 21554039 NR Description: putative RAV2-like DNA-binding protein
  misc_feature (5)..(332): Homolog of NCBI NO: 15222217 NR Description: AP2 domain transcription factor, putative  (RAV1)
  misc_feature (1)..(333): Homolog of NCBI NO: 15230871 NR Description: AP2 domain transcription factor, putative
  misc_feature (1)..(333): Homolog of NCBI NO: 21593532 NR Description: AP2 domain transcription factor [Arabidopsis
MDAMSSVDESSTTTDSIPARKSSSPASLLYRMGSGTSVVLDSENGVEVEVEAESRKLPSSRFKGVVPQPNGRWGAQIYEKHQRVWLGTFNEEDEAARAYDVAAHRFRGRDAVTNFKDTTFEEEVEFLNAHSKSEIVDMLRKHTYKEELDQRKRNRDGNGKETTAFALASMVVMTGFKTAELLFEKTVTPSDVGKLNRLVIPKHQAEKHFPLPLGNNNVSVKGMLLNFEDVNGKVWRFRYSYWNSSQSYVLTKGWSRFVKEKRLCAGDLISFKRSNDQDQKFFIGWKSKSGLDLETGRVMRLFGVDISLNAVVVVKETTEVLMSSLRCKNQRVL

SEQ ID NO: 25111 - protein, 330 aa, Arabidopsis thaliana
  peptide (1)..(330): Ceres Seq. ID no. 13495851
  misc_feature (179)..(288): Pfam Name: B3 DNA binding domain Pfam Description: B3 DNA binding domain
  misc_feature (37)..(268): Homolog of NCBI NO: 15223618 NR Description: AP2 domain transcription factor, putative
  misc_feature (55)..(304): Homolog of NCBI NO: 34895676 NR Description: putative DNA binding protein RAV2
  misc_feature (53)..(313): Homolog of NCBI NO: 34911404 NR Description: DNA-binding protein RAV2-like
  misc_feature (2)..(303): Homolog of NCBI NO: 15222622 NR Description: AP2 domain transcription factor, putative
  misc_feature (16)..(330): Homolog of NCBI NO: 2281641 NR Description: AP2 domain containing protein RAP2.8 [Arabidopsis
  misc_feature (1)..(330): Homolog of NCBI NO: 18409138 NR Description: AP2 domain protein RAP2.8 (RAV2) [Arabidopsis
  misc_feature (1)..(330): Homolog of NCBI NO: 21554039 NR Description: putative RAV2-like DNA-binding protein
  misc_feature (2)..(329): Homolog of NCBI NO: 15222217 NR Description: AP2 domain transcription factor, putative  (RAV1)
  misc_feature (1)..(330): Homolog of NCBI NO: 15230871 NR Description: AP2 domain transcription factor, putative
  misc_feature (1)..(330): Homolog of NCBI NO: 21593532 NR Description: AP2 domain transcription factor [Arabidopsis
MSSVDESSTTTDSIPARKSSSPASLLYRMGSGTSVVLDSENGVEVEVEAESRKLPSSRFKGVVPQPNGRWGAQIYEKHQRVWLGTFNEEDEAARAYDVAAHRFRGRDAVTNFKDTTFEEEVEFLNAHSKSEIVDMLRKHTYKEELDQRKRNRDGNGKETTAFALASMVVMTGFKTAELLFEKTVTPSDVGKLNRLVIPKHQAEKHFPLPLGNNNVSVKGMLLNFEDVNGKVWRFRYSYWNSSQSYVLTKGWSRFVKEKRLCAGDLISFKRSNDQDQKFFIGWKSKSGLDLETGRVMRLFGVDISLNAVVVVKETTEVLMSSLRCKNQRVL

SEQ ID NO: 25112 - DNA, 1415 bp, Arabidopsis thaliana
  misc_feature (1)..(1415): Ceres Seq. ID no. 12335742
  misc_feature: MA Experiment ID: 108434 Result: Up-regulated in Transcription
  misc_feature: MA Experiment 108434 PARAMETER Experiment Name: At_Root_Tips_cDNA_P Parameter: Tissue Value: Root Tips
  misc_feature: MA Experiment ID: 108461 Result: Up-regulated in Transcription
  misc_feature: MA Experiment 108461 PARAMETER Experiment Name: At_Germinating_Seeds_cDNA_P Parameter: Age (day) Value: 1 vs. 0
  misc_feature: MA Experiment 108461 PARAMETER Experiment Name: At_Germinating_Seeds_cDNA_P Parameter: Tissue Value: Germinating Seeds
  misc_feature: MA Experiment ID: 108462 Result: Up-regulated in Transcription
  misc_feature: MA Experiment 108462 PARAMETER Experiment Name: At_Germinating_Seeds_cDNA_P Parameter: Age (day) Value: 2 vs. 0
  misc_feature: MA Experiment 108462 PARAMETER Experiment Name: At_Germinating_Seeds_cDNA_P Parameter: Tissue Value: Germinating Seeds
  misc_feature: MA Experiment ID: 108595 Result: Up-regulated in Transcription
  misc_feature: MA Experiment 108595 PARAMETER Experiment Name: At_Ler-pi_Ovule_cDNA_P Parameter: Plant Line Value: null
  misc_feature: MA Experiment ID: 20000307 Result: Up-regulated in Transcription
  misc_feature: MA Experiment 20000307 PARAMETER Experiment Name: At_Germinating_Seeds_Sub_P Parameter: Age (hr) Value: 24 vs. 0
  misc_feature: MA Experiment 20000307 PARAMETER Experiment Name: At_Germinating_Seeds_Sub_P Parameter: Organism Value: A. thaliana
  misc_feature: MA Experiment 20000307 PARAMETER Experiment Name: At_Germinating_Seeds_Sub_P Parameter: Plant Line Value: WS
  misc_feature: MA Experiment 20000307 PARAMETER Experiment Name: At_Germinating_Seeds_Sub_P Parameter: Tissue Value: Germinating Seeds
  misc_feature: MA Experiment ID: 20000355 Result: Up-regulated in Transcription
  misc_feature: MA Experiment 20000355 PARAMETER Experiment Name: At_Siliques_Sub_P Parameter: Age (day) Value: 21
  misc_feature: MA Experiment 20000355 PARAMETER Experiment Name: At_Siliques_Sub_P Parameter: Organism Value: A. thaliana
  misc_feature: MA Experiment 20000355 PARAMETER Experiment Name: At_Siliques_Sub_P Parameter: Plant Line Value: WS
  misc_feature: MA Experiment 20000355 PARAMETER Experiment Name: At_Siliques_Sub_P Parameter: Tissue Value: Less Than 5mm Siliques vs. Whole Plant
  misc_feature: MA Experiment ID: 20000440 Result: Up-regulated in Transcription
  misc_feature: MA Experiment 20000440 PARAMETER Experiment Name: At_Closed-Flower__Sub_P Parameter: Tissue Value: Closed Flower vs. Whole Plant
atcatcgatatatacaccgatacatacaccgacacatacgcatgagtgtaagtatacgctcaagtgtgggagcaatctcagatccctccatgaaaacaacgctttataagatgactcattttctgaaacgaactcaactccaagtgtgacacattctcaacgagagatcgtgatcgtacttatatacacacacgcacacttgcaaagcttgggaggaagaagtgatggacaagtatgaggttgtgaaggatttgggagctggaaattttggtgtggctcgtcttcttagacacaaagagaccaaagagctcgttgctatgaaatacattgagagaggtcgcaagattgatgagaatgtggcaagagagattatcaatcatagatcacttaggcatcctaatatcatcagattcaaggaggtgattctgactccaactcatcttgcaattgtaatggagtatgcttctggaggagagctctttgaaagaatctgtaatgctggtagattcagtgaagctgaggctagatacttctttcagcagctgatttgtggcgtggattactgtcattcactgcaaatatgtcatagagatttgaagcttgagaatacactgcttgatggtagtccggccccgcttttgaaaatctgtgattttggttactccaagtcatctctgcttcactctagacctaaatcaactgttggtactccagcttatatcgcacctgaagttctttcccgaagagaatatgacggaaagcatgcggatgtttggtcctgtggtgtgactctttatgtgatgttagttggaggttatccgtttgaagacccggatgatccgagaaacttcaggaaaacaatccaacgtataatggctgtccagtacaagatcccggattacgttcatatatcgcaggagtgcagacaccttctctctcgcatatttgtcactaattcagctaagagaatcacacttaaagagatcaagaagcatccatggtacttaaagaacttgccaaaggagcttacagagcctgctcaagcggcgtactacaagagagaaaccccaagcttttccctccaaagcgtagaggacataatgaagatcgttggagaagccaggaatccagctccgtcttctaatgccgtcaagggctttgatgatgatgaggaagatgtggaggacgaggttgaagaagaagaagaagaagaagaggaggaagaagaggaagaggaagaagatgaatacgagaagcatgttaaagaggcccattcttgtcaagagcctcccaaagcttaagaaactctcactctgttgtgtaatattcaatctccttgtatctttacgtttatgtgaattcgaagtttcaaaactttatctacgcaattgaccaattagttatcatagcatttg

SEQ ID NO: 25113 - protein, 358 aa, Arabidopsis thaliana
  peptide (1)..(358): Ceres Seq. ID no. 12335743
  misc_feature (4)..(260): Pfam Name: Protein kinase domain Pfam Description: Protein kinase domain
  misc_feature (1)..(354): Homolog of NCBI NO: 19568098 NR Description: osmotic stress-activated protein kinase
  misc_feature (1)..(358): Homolog of NCBI NO: 99748 NR Description: probable serine/threonine-specific protein kinase
  misc_feature (1)..(358): Homolog of NCBI NO: 15242317 NR Description: serine/threonine-protein kinase; protein id:
  misc_feature (1)..(358): Homolog of NCBI NO: 15242858 NR Description: serine/threonine-protein kinase
  misc_feature (1)..(358): Homolog of NCBI NO: 21593536 NR Description: serine/threonine-protein kinase [Arabidopsis
MDKYEVVKDLGAGNFGVARLLRHKETKELVAMKYIERGRKIDENVAREIINHRSLRHPNIIRFKEVILTPTHLAIVMEYASGGELFERICNAGRFSEAEARYFFQQLICGVDYCHSLQICHRDLKLENTLLDGSPAPLLKICDFGYSKSSLLHSRPKSTVGTPAYIAPEVLSRREYDGKHADVWSCGVTLYVMLVGGYPFEDPDDPRNFRKTIQRIMAVQYKIPDYVHISQECRHLLSRIFVTNSAKRITLKEIKKHPWYLKNLPKELTEPAQAAYYKRETPSFSLQSVEDIMKIVGEARNPAPSSNAVKGFDDDEEDVEDEVEEEEEEEEEEEEEEEEDEYEKHVKEAHSCQEPPKA

SEQ ID NO: 25114 - protein, 327 aa, Arabidopsis thaliana
  peptide (1)..(327): Ceres Seq. ID no. 12335744
  misc_feature (1)..(229): Pfam Name: Protein kinase domain Pfam Description: Protein kinase domain
  misc_feature (1)..(323): Homolog of NCBI NO: 19568098 NR Description: osmotic stress-activated protein kinase
  misc_feature (1)..(327): Homolog of NCBI NO: 99748 NR Description: probable serine/threonine-specific protein kinase
  misc_feature (1)..(327): Homolog of NCBI NO: 15242317 NR Description: serine/threonine-protein kinase; protein id:
  misc_feature (1)..(327): Homolog of NCBI NO: 15242858 NR Description: serine/threonine-protein kinase
  misc_feature (1)..(327): Homolog of NCBI NO: 21593536 NR Description: serine/threonine-protein kinase [Arabidopsis
MKYIERGRKIDENVAREIINHRSLRHPNIIRFKEVILTPTHLAIVMEYASGGELFERICNAGRFSEAEARYFFQQLICGVDYCHSLQICHRDLKLENTLLDGSPAPLLKICDFGYSKSSLLHSRPKSTVGTPAYIAPEVLSRREYDGKHADVWSCGVTLYVMLVGGYPFEDPDDPRNFRKTIQRIMAVQYKIPDYVHISQECRHLLSRIFVTNSAKRITLKEIKKHPWYLKNLPKELTEPAQAAYYKRETPSFSLQSVEDIMKIVGEARNPAPSSNAVKGFDDDEEDVEDEVEEEEEEEEEEEEEEEEDEYEKHVKEAHSCQEPPKA

SEQ ID NO: 25115 - protein, 282 aa, Arabidopsis thaliana
  peptide (1)..(282): Ceres Seq. ID no. 12335745
  misc_feature (1)..(184): Pfam Name: Protein kinase domain Pfam Description: Protein kinase domain
  misc_feature (1)..(278): Homolog of NCBI NO: 19568098 NR Description: osmotic stress-activated protein kinase
  misc_feature (1)..(282): Homolog of NCBI NO: 99748 NR Description: probable serine/threonine-specific protein kinase
  misc_feature (1)..(282): Homolog of NCBI NO: 15242317 NR Description: serine/threonine-protein kinase; protein id:
  misc_feature (1)..(282): Homolog of NCBI NO: 15242858 NR Description: serine/threonine-protein kinase
  misc_feature (1)..(282): Homolog of NCBI NO: 21593536 NR Description: serine/threonine-protein kinase [Arabidopsis
MEYASGGELFERICNAGRFSEAEARYFFQQLICGVDYCHSLQICHRDLKLENTLLDGSPAPLLKICDFGYSKSSLLHSRPKSTVGTPAYIAPEVLSRREYDGKHADVWSCGVTLYVMLVGGYPFEDPDDPRNFRKTIQRIMAVQYKIPDYVHISQECRHLLSRIFVTNSAKRITLKEIKKHPWYLKNLPKELTEPAQAAYYKRETPSFSLQSVEDIMKIVGEARNPAPSSNAVKGFDDDEEDVEDEVEEEEEEEEEEEEEEEEDEYEKHVKEAHSCQEPPKA

SEQ ID NO: 25116 - DNA, 1165 bp, Arabidopsis thaliana
  misc_feature (1)..(1165): Ceres Seq. ID no. 13488379
  misc_feature: MA Experiment ID: 108501 Result: Down-regulated in Transcription
  misc_feature: MA Experiment 108501 PARAMETER Experiment Name: At_ap2_floral_buds_cDNA_P Parameter: Plant Line Value: ap2 (Ler.)
  misc_feature: MA Experiment 108501 PARAMETER Experiment Name: At_ap2_floral_buds_cDNA_P Parameter: Tissue Value: Closed Flower
  misc_feature: MA Experiment ID: 20000087 Result: Up-regulated in Transcription
  misc_feature: MA Experiment 20000087 PARAMETER Experiment Name: At_100uM_ABA_Mutants_cDNA_P Parameter: Plant Line Value: WS
  misc_feature: MA Experiment 20000087 PARAMETER Experiment Name: At_100uM_ABA_Mutants_cDNA_P Parameter: Timepoint (hr) Value: 6
  misc_feature: MA Experiment 20000087 PARAMETER Experiment Name: At_100uM_ABA_Mutants_cDNA_P Parameter: Tissue Value: Aerial
  misc_feature: MA Experiment 20000087 PARAMETER Experiment Name: At_100uM_ABA_Mutants_cDNA_P Parameter: Treatment Value: 100uM ABA vs. No Treatment
  misc_feature: MA Experiment ID: 20000113 Result: Down-regulated in Transcription
  misc_feature: MA Experiment 20000113 PARAMETER Experiment Name: At_42deg_Heat_cDNA_P Parameter: Temperature (deg C) Value: 42 vs. 22
  misc_feature: MA Experiment 20000113 PARAMETER Experiment Name: At_42deg_Heat_cDNA_P Parameter: Timepoint (hr) Value: 8
  misc_feature: MA Experiment 20000113 PARAMETER Experiment Name: At_42deg_Heat_cDNA_P Parameter: Tissue Value: Aerial
  misc_feature: MA Experiment ID: 20000184 Result: Down-regulated in Transcription
  misc_feature: MA Experiment 20000184 PARAMETER Experiment Name: At_Shoots__P Parameter: Age (day) Value: 7
  misc_feature: MA Experiment 20000184 PARAMETER Experiment Name: At_Shoots__P Parameter: Tissue Value: Shoots vs. Whole Plant
  misc_feature: MA Experiment ID: 20000234 Result: Down-regulated in Transcription
  misc_feature: MA Experiment 20000234 PARAMETER Experiment Name: At_Siliques_P Parameter: Age (day) Value: 21
  misc_feature: MA Experiment 20000234 PARAMETER Experiment Name: At_Siliques_P Parameter: Organism Value: A. thaliana
  misc_feature: MA Experiment 20000234 PARAMETER Experiment Name: At_Siliques_P Parameter: Plant Line Value: WS
  misc_feature: MA Experiment 20000234 PARAMETER Experiment Name: At_Siliques_P Parameter: Tissue Value: Less Than 5mm Siliques vs. Whole Plant
  misc_feature: MA Experiment ID: 20000264 Result: Up-regulated in Transcription
  misc_feature: MA Experiment 20000264 PARAMETER Experiment Name: At_Open_Flower_P Parameter: Age (day) Value: 21
  misc_feature: MA Experiment 20000264 PARAMETER Experiment Name: At_Open_Flower_P Parameter: Plant Line Value: WS
  misc_feature: MA Experiment 20000264 PARAMETER Experiment Name: At_Open_Flower_P Parameter: Tissue Value: Open Flower vs. Whole Plant
  misc_feature: MA Experiment ID: 20000265 Result: Up-regulated in Transcription
  misc_feature: MA Experiment 20000265 PARAMETER Experiment Name: At_Open_Flower_P Parameter: Age (day) Value: 21
  misc_feature: MA Experiment 20000265 PARAMETER Experiment Name: At_Open_Flower_P Parameter: Plant Line Value: WS
  misc_feature: MA Experiment 20000265 PARAMETER Experiment Name: At_Open_Flower_P Parameter: Tissue Value: Closed Flower vs. Whole Plant
  misc_feature: MA Experiment ID: 20000286 Result: Up-regulated in Transcription
  misc_feature: MA Experiment 20000286 PARAMETER Experiment Name: At_Open_Flower_P Parameter: Age (day) Value: 21
  misc_feature: MA Experiment 20000286 PARAMETER Experiment Name: At_Open_Flower_P Parameter: Plant Line Value: WS
  misc_feature: MA Experiment 20000286 PARAMETER Experiment Name: At_Open_Flower_P Parameter: Tissue Value: Half Open vs. Whole Plant
  misc_feature: MA Experiment ID: 20000438 Result: Down-regulated in Transcription
  misc_feature: MA Experiment 20000438 PARAMETER Experiment Name: At_Shoots__P Parameter: Age (day) Value: 14
  misc_feature: MA Experiment 20000438 PARAMETER Experiment Name: At_Shoots__P Parameter: Tissue Value: Shoots vs. Whole Plant
  misc_feature: MA Experiment ID: 20000794 Result: Up-regulated in Transcription
  misc_feature: MA Experiment 20000794 PARAMETER Experiment Name: At_Petals_P Parameter: Age (day) Value: 23-25 days
  misc_feature: MA Experiment 20000794 PARAMETER Experiment Name: At_Petals_P Parameter: Plant Line Value: WS
  misc_feature: MA Experiment 20000794 PARAMETER Experiment Name: At_Petals_P Parameter: Tissue Value: Petals vs. Whole plant
  misc_feature: MA Experiment ID: 20001771 Result: Up-regulated in Transcription
  misc_feature: MA Experiment 20001771 PARAMETER Experiment Name: At_Far-red-enriched-adult_P Parameter: Age (day) Value: 28
  misc_feature: MA Experiment 20001771 PARAMETER Experiment Name: At_Far-red-enriched-adult_P Parameter: Light Value: Far-red enriched vs. White
  misc_feature: MA Experiment 20001771 PARAMETER Experiment Name: At_Far-red-enriched-adult_P Parameter: Organism Value: A. thaliana
  misc_feature: MA Experiment 20001771 PARAMETER Experiment Name: At_Far-red-enriched-adult_P Parameter: Plant Line Value: Columbia
  misc_feature: MA Experiment 20001771 PARAMETER Experiment Name: At_Far-red-enriched-adult_P Parameter: Timepoint (hr) Value: 16
  misc_feature: MA Experiment 20001771 PARAMETER Experiment Name: At_Far-red-enriched-adult_P Parameter: Tissue Value: Aerial
  misc_feature: MA Experiment ID: 20001773 Result: Up-regulated in Transcription
  misc_feature: MA Experiment 20001773 PARAMETER Experiment Name: At_Far-red-enriched-adult_P Parameter: Age (day) Value: 30
  misc_feature: MA Experiment 20001773 PARAMETER Experiment Name: At_Far-red-enriched-adult_P Parameter: Light Value: Far-red enriched vs. White
  misc_feature: MA Experiment 20001773 PARAMETER Experiment Name: At_Far-red-enriched-adult_P Parameter: Organism Value: A. thaliana
  misc_feature: MA Experiment 20001773 PARAMETER Experiment Name: At_Far-red-enriched-adult_P Parameter: Plant Line Value: Columbia
  misc_feature: MA Experiment 20001773 PARAMETER Experiment Name: At_Far-red-enriched-adult_P Parameter: Timepoint (hr) Value: 48
  misc_feature: MA Experiment 20001773 PARAMETER Experiment Name: At_Far-red-enriched-adult_P Parameter: Tissue Value: Aerial
  misc_feature: MA Experiment ID: 20001911 Result: Down-regulated in Transcription
  misc_feature: MA Experiment 20001911 PARAMETER Experiment Name: At_Drought_Reproduction_P Parameter: Age (day) Value: 40
  misc_feature: MA Experiment 20001911 PARAMETER Experiment Name: At_Drought_Reproduction_P Parameter: Organism Value: A. thaliana
  misc_feature: MA Experiment 20001911 PARAMETER Experiment Name: At_Drought_Reproduction_P Parameter: Plant Line Value: WS
  misc_feature: MA Experiment 20001911 PARAMETER Experiment Name: At_Drought_Reproduction_P Parameter: Timepoint (day) Value: 10
  misc_feature: MA Experiment 20001911 PARAMETER Experiment Name: At_Drought_Reproduction_P Parameter: Tissue Value: Flowers
  misc_feature: MA Experiment 20001911 PARAMETER Experiment Name: At_Drought_Reproduction_P Parameter: Treatment Value: Drought vs. No Drought
aagtctttttataaaggaaagaaagaaaaactttcctaattggttcataccaaagtctgagctcttctttatatctctcttgtagtttcttattgggggtctttgttttgtttggttcttttagagtaagaagtttcttaaaaaaggatcaaaaatgggaaggggtagggttcaattgaagaggatagagaacaagatcaatagacaagtgacattctcgaaaagaagagctggtcttttgaagaaagctcatgagatctctgttctctgtgatgctgaagttgctcttgttgtcttctcccataagggaaaactcttcgaatactccactgattcttgtatggagaagatacttgaacgctatgagaggtactcttacgccgaaagacagcttattgcacctgagtccgacgtcaatacaaactggtcgatggagtataacaggcttaaggctaagattgagcttttggagagaaaccagaggcattatcttggggaagacttgcaagcaatgagccctaaagagcttcagaatctggagcagcagcttgacactgctcttaagcacatccgcactagaaaaaaccaacttatgtacgagtccatcaatgagctccaaaaaaaggagaaggccatacaggagcaaaacagcatgctttctaaacagatcaaggagagggaaaaaattcttagggctcaacaggagcagtgggatcagcagaaccaaggccacaatatgcctccccctctgccaccgcagcagcaccaaatccagcatccttacatgctctctcatcagccatctccttttctcaacatgggtggtctgtatcaagaagatgatcctatggcaatgaggaggaatgatctcgaactgactcttgaacccgtttacaactgcaaccttggctgcttcgccgcatgaagcatttccatatatatatttgtaatcgtcaacaataaaaacagtttgccacatacatataaatagtggctaggctcttttcatccaattaatatattttggcaaatgttcgatgttcttatatcatcatatataaattagcaggctcctttcttcttttgtaatttgataagtttatttgcttcaatatggagcaaaattgtaatatatttgaaggtcagagagaatgaacgtgaactt

SEQ ID NO: 25117 - protein, 256 aa, Arabidopsis thaliana
  peptide (1)..(256): Ceres Seq. ID no. 13488380
  misc_feature (75)..(174): Pfam Name: K-box region Pfam Description: K-box region
  misc_feature (1)..(251): Homolog of NCBI NO: 20799344 NR Description: apetala 1 [Arabidopsis thaliana]
  misc_feature (1)..(251): Homolog of NCBI NO: 20799358 NR Description: apetala 1 [Arabidopsis thaliana]
  misc_feature (1)..(251): Homolog of NCBI NO: 20799348 NR Description: apetala 1 [Arabidopsis thaliana]
  misc_feature (1)..(251): Homolog of NCBI NO: 20799362 NR Description: apetala 1 [Arabidopsis thaliana]
  misc_feature (1)..(251): Homolog of NCBI NO: 20799364 NR Description: apetala 1 [Arabidopsis thaliana]
  misc_feature (1)..(251): Homolog of NCBI NO: 20799346 NR Description: apetala 1 [Arabidopsis thaliana]
  misc_feature (1)..(251): Homolog of NCBI NO: 20799340 NR Description: apetala 1 [Arabidopsis thaliana]
  misc_feature (1)..(256): Homolog of NCBI NO: 16162 NR Description: AP1 [Arabidopsis thaliana]
  misc_feature (1)..(256): Homolog of NCBI NO: 21593537 NR Description: homeotic protein boi1AP1, putative [Arabidopsis
  misc_feature (1)..(256): Homolog of NCBI NO: 15222220 NR Description: floral homeotic gene APETALA1 [Arabidopsis
MGRGRVQLKRIENKINRQVTFSKRRAGLLKKAHEISVLCDAEVALVVFSHKGKLFEYSTDSCMEKILERYERYSYAERQLIAPESDVNTNWSMEYNRLKAKIELLERNQRHYLGEDLQAMSPKELQNLEQQLDTALKHIRTRKNQLMYESINELQKKEKAIQEQNSMLSKQIKEREKILRAQQEQWDQQNQGHNMPPPLPPQQHQIQHPYMLSHQPSPFLNMGGLYQEDDPMAMRRNDLELTLEPVYNCNLGCFAA

SEQ ID NO: 25118 - protein, 194 aa, Arabidopsis thaliana
  peptide (1)..(194): Ceres Seq. ID no. 13488381
  misc_feature (13)..(112): Pfam Name: K-box region Pfam Description: K-box region
  misc_feature (1)..(189): Homolog of NCBI NO: 20799358 NR Description: apetala 1 [Arabidopsis thaliana]
  misc_feature (1)..(189): Homolog of NCBI NO: 20799348 NR Description: apetala 1 [Arabidopsis thaliana]
  misc_feature (1)..(189): Homolog of NCBI NO: 20799362 NR Description: apetala 1 [Arabidopsis thaliana]
  misc_feature (1)..(189): Homolog of NCBI NO: 20799364 NR Description: apetala 1 [Arabidopsis thaliana]
  misc_feature (1)..(189): Homolog of NCBI NO: 20799346 NR Description: apetala 1 [Arabidopsis thaliana]
  misc_feature (1)..(189): Homolog of NCBI NO: 20799344 NR Description: apetala 1 [Arabidopsis thaliana]
  misc_feature (1)..(189): Homolog of NCBI NO: 20799340 NR Description: apetala 1 [Arabidopsis thaliana]
  misc_feature (1)..(194): Homolog of NCBI NO: 16162 NR Description: AP1 [Arabidopsis thaliana]
  misc_feature (1)..(194): Homolog of NCBI NO: 21593537 NR Description: homeotic protein boi1AP1, putative [Arabidopsis
  misc_feature (1)..(194): Homolog of NCBI NO: 15222220 NR Description: floral homeotic gene APETALA1 [Arabidopsis
MEKILERYERYSYAERQLIAPESDVNTNWSMEYNRLKAKIELLERNQRHYLGEDLQAMSPKELQNLEQQLDTALKHIRTRKNQLMYESINELQKKEKAIQEQNSMLSKQIKEREKILRAQQEQWDQQNQGHNMPPPLPPQQHQIQHPYMLSHQPSPFLNMGGLYQEDDPMAMRRNDLELTLEPVYNCNLGCFAA

SEQ ID NO: 25119 - protein, 164 aa, Arabidopsis thaliana
  peptide (1)..(164): Ceres Seq. ID no. 13488382
  misc_feature (1)..(82): Pfam Name: K-box region Pfam Description: K-box region
  misc_feature (1)..(159): Homolog of NCBI NO: 20799344 NR Description: apetala 1 [Arabidopsis thaliana]
  misc_feature (1)..(159): Homolog of NCBI NO: 20799358 NR Description: apetala 1 [Arabidopsis thaliana]
  misc_feature (1)..(159): Homolog of NCBI NO: 20799348 NR Description: apetala 1 [Arabidopsis thaliana]
  misc_feature (1)..(159): Homolog of NCBI NO: 20799362 NR Description: apetala 1 [Arabidopsis thaliana]
  misc_feature (1)..(159): Homolog of NCBI NO: 20799364 NR Description: apetala 1 [Arabidopsis thaliana]
  misc_feature (1)..(159): Homolog of NCBI NO: 20799346 NR Description: apetala 1 [Arabidopsis thaliana]
  misc_feature (1)..(159): Homolog of NCBI NO: 20799340 NR Description: apetala 1 [Arabidopsis thaliana]
  misc_feature (1)..(164): Homolog of NCBI NO: 16162 NR Description: AP1 [Arabidopsis thaliana]
  misc_feature (1)..(164): Homolog of NCBI NO: 21593537 NR Description: homeotic protein boi1AP1, putative [Arabidopsis
  misc_feature (1)..(164): Homolog of NCBI NO: 15222220 NR Description: floral homeotic gene APETALA1 [Arabidopsis
MEYNRLKAKIELLERNQRHYLGEDLQAMSPKELQNLEQQLDTALKHIRTRKNQLMYESINELQKKEKAIQEQNSMLSKQIKEREKILRAQQEQWDQQNQGHNMPPPLPPQQHQIQHPYMLSHQPSPFLNMGGLYQEDDPMAMRRNDLELTLEPVYNCNLGCFAA

SEQ ID NO: 25120 - DNA, 1347 bp, Arabidopsis thaliana
  misc_feature (1)..(1347): Ceres Seq. ID no. 12335738
  misc_feature: MA Experiment ID: 108434 Result: Up-regulated in Transcription
  misc_feature: MA Experiment 108434 PARAMETER Experiment Name: At_Root_Tips_cDNA_P Parameter: Tissue Value: Root Tips
  misc_feature: MA Experiment ID: 108461 Result: Up-regulated in Transcription
  misc_feature: MA Experiment 108461 PARAMETER Experiment Name: At_Germinating_Seeds_cDNA_P Parameter: Age (day) Value: 1 vs. 0
  misc_feature: MA Experiment 108461 PARAMETER Experiment Name: At_Germinating_Seeds_cDNA_P Parameter: Tissue Value: Germinating Seeds
  misc_feature: MA Experiment ID: 108462 Result: Up-regulated in Transcription
  misc_feature: MA Experiment 108462 PARAMETER Experiment Name: At_Germinating_Seeds_cDNA_P Parameter: Age (day) Value: 2 vs. 0
  misc_feature: MA Experiment 108462 PARAMETER Experiment Name: At_Germinating_Seeds_cDNA_P Parameter: Tissue Value: Germinating Seeds
  misc_feature: MA Experiment ID: 108463 Result: Up-regulated in Transcription
  misc_feature: MA Experiment 108463 PARAMETER Experiment Name: At_Germinating_Seeds_cDNA_P Parameter: Age (day) Value: 3 vs. 0
  misc_feature: MA Experiment 108463 PARAMETER Experiment Name: At_Germinating_Seeds_cDNA_P Parameter: Tissue Value: Germinating Seeds
  misc_feature: MA Experiment ID: 108464 Result: Up-regulated in Transcription
  misc_feature: MA Experiment 108464 PARAMETER Experiment Name: At_Germinating_Seeds_cDNA_P Parameter: Age (day) Value: 4 vs. 0
  misc_feature: MA Experiment 108464 PARAMETER Experiment Name: At_Germinating_Seeds_cDNA_P Parameter: Tissue Value: Germinating Seeds
  misc_feature: MA Experiment ID: 108501 Result: Down-regulated in Transcription
  misc_feature: MA Experiment 108501 PARAMETER Experiment Name: At_ap2_floral_buds_cDNA_P Parameter: Plant Line Value: ap2 (Ler.)
  misc_feature: MA Experiment 108501 PARAMETER Experiment Name: At_ap2_floral_buds_cDNA_P Parameter: Tissue Value: Closed Flower
  misc_feature: MA Experiment ID: 108573 Result: Up-regulated in Transcription
  misc_feature: MA Experiment 108573 PARAMETER Experiment Name: At_Drought_cDNA_P Parameter: Timepoint (hr) Value: 6
  misc_feature: MA Experiment 108573 PARAMETER Experiment Name: At_Drought_cDNA_P Parameter: Tissue Value: Aerial
  misc_feature: MA Experiment 108573 PARAMETER Experiment Name: At_Drought_cDNA_P Parameter: Treatment Value: Drought vs. No Drought
  misc_feature: MA Experiment ID: 108574 Result: Down-regulated in Transcription
  misc_feature: MA Experiment 108574 PARAMETER Experiment Name: At_Wounding__cDNA_P Parameter: Timepoint (hr) Value: 1
  misc_feature: MA Experiment 108574 PARAMETER Experiment Name: At_Wounding__cDNA_P Parameter: Tissue Value: Aerial
  misc_feature: MA Experiment 108574 PARAMETER Experiment Name: At_Wounding__cDNA_P Parameter: Treatment Value: Wounding vs. No Wounding
  misc_feature: MA Experiment ID: 108579 Result: Down-regulated in Transcription
  misc_feature: MA Experiment 108579 PARAMETER Experiment Name: At_4deg_Cold_cDNA_P Parameter: Temperature (deg C) Value: 4 vs. 22
  misc_feature: MA Experiment 108579 PARAMETER Experiment Name: At_4deg_Cold_cDNA_P Parameter: Timepoint (hr) Value: 6
  misc_feature: MA Experiment 108579 PARAMETER Experiment Name: At_4deg_Cold_cDNA_P Parameter: Tissue Value: Aerial
  misc_feature: MA Experiment ID: 108585 Result: Up-regulated in Transcription
  misc_feature: MA Experiment 108585 PARAMETER Experiment Name: At_5mM_NaNP_cDNA_P Parameter: Timepoint (hr) Value: 6
  misc_feature: MA Experiment 108585 PARAMETER Experiment Name: At_5mM_NaNP_cDNA_P Parameter: Tissue Value: Aerial
  misc_feature: MA Experiment 108585 PARAMETER Experiment Name: At_5mM_NaNP_cDNA_P Parameter: Treatment Value: null
  misc_feature: MA Experiment ID: 108594 Result: Up-regulated in Transcription
  misc_feature: MA Experiment 108594 PARAMETER Experiment Name: At_Ler-rhl_Root_cDNA_P Parameter: Plant Line Value: null
  misc_feature: MA Experiment ID: 108595 Result: Down-regulated in Transcription
  misc_feature: MA Experiment 108595 PARAMETER Experiment Name: At_Ler-pi_Ovule_cDNA_P Parameter: Plant Line Value: null
  misc_feature: MA Experiment ID: 20000068 Result: Down-regulated in Transcription
  misc_feature: MA Experiment ID: 20000111 Result: Down-regulated in Transcription
  misc_feature: MA Experiment 20000111 PARAMETER Experiment Name: At_42deg_Heat_cDNA_P Parameter: Temperature (deg C) Value: 42 vs. 22
  misc_feature: MA Experiment 20000111 PARAMETER Experiment Name: At_42deg_Heat_cDNA_P Parameter: Timepoint (hr) Value: 6
  misc_feature: MA Experiment 20000111 PARAMETER Experiment Name: At_42deg_Heat_cDNA_P Parameter: Tissue Value: Aerial
  misc_feature: MA Experiment ID: 20000113 Result: Down-regulated in Transcription
  misc_feature: MA Experiment 20000113 PARAMETER Experiment Name: At_42deg_Heat_cDNA_P Parameter: Temperature (deg C) Value: 42 vs. 22
  misc_feature: MA Experiment 20000113 PARAMETER Experiment Name: At_42deg_Heat_cDNA_P Parameter: Timepoint (hr) Value: 8
  misc_feature: MA Experiment 20000113 PARAMETER Experiment Name: At_42deg_Heat_cDNA_P Parameter: Tissue Value: Aerial
  misc_feature: MA Experiment ID: 20000144 Result: Down-regulated in Transcription
  misc_feature: MA Experiment 20000144 PARAMETER Experiment Name: At_42deg_Heat_cDNA_P Parameter: Temperature (deg C) Value: 42 vs. 22
  misc_feature: MA Experiment 20000144 PARAMETER Experiment Name: At_42deg_Heat_cDNA_P Parameter: Timepoint (hr) Value: 1
  misc_feature: MA Experiment 20000144 PARAMETER Experiment Name: At_42deg_Heat_cDNA_P Parameter: Tissue Value: Aerial
  misc_feature: MA Experiment ID: 20000171 Result: Down-regulated in Transcription
  misc_feature: MA Experiment 20000171 PARAMETER Experiment Name: At_42deg_Heat_P Parameter: Age (day) Value: 14
  misc_feature: MA Experiment 20000171 PARAMETER Experiment Name: At_42deg_Heat_P Parameter: Organism Value: A. thaliana
  misc_feature: MA Experiment 20000171 PARAMETER Experiment Name: At_42deg_Heat_P Parameter: Plant Line Value: WS
  misc_feature: MA Experiment 20000171 PARAMETER Experiment Name: At_42deg_Heat_P Parameter: Temperature (deg C) Value: 42 vs. 22
  misc_feature: MA Experiment 20000171 PARAMETER Experiment Name: At_42deg_Heat_P Parameter: Timepoint (hr) Value: 1
  misc_feature: MA Experiment 20000171 PARAMETER Experiment Name: At_42deg_Heat_P Parameter: Tissue Value: Aerial
  misc_feature: MA Experiment ID: 20000173 Result: Down-regulated in Transcription
  misc_feature: MA Experiment 20000173 PARAMETER Experiment Name: At_42deg_Heat_P Parameter: Age (day) Value: 14
  misc_feature: MA Experiment 20000173 PARAMETER Experiment Name: At_42deg_Heat_P Parameter: Organism Value: A. thaliana
  misc_feature: MA Experiment 20000173 PARAMETER Experiment Name: At_42deg_Heat_P Parameter: Plant Line Value: WS
  misc_feature: MA Experiment 20000173 PARAMETER Experiment Name: At_42deg_Heat_P Parameter: Temperature (deg C) Value: 42 vs. 22
  misc_feature: MA Experiment 20000173 PARAMETER Experiment Name: At_42deg_Heat_P Parameter: Timepoint (hr) Value: 6
  misc_feature: MA Experiment 20000173 PARAMETER Experiment Name: At_42deg_Heat_P Parameter: Tissue Value: Aerial
  misc_feature: MA Experiment ID: 20000180 Result: Up-regulated in Transcription
  misc_feature: MA Experiment 20000180 PARAMETER Experiment Name: At_Germinating_Seeds_P Parameter: Age (hr) Value: 24 vs. 0
  misc_feature: MA Experiment 20000180 PARAMETER Experiment Name: At_Germinating_Seeds_P Parameter: Tissue Value: Germinating Seeds
  misc_feature: MA Experiment ID: 20000184 Result: Up-regulated in Transcription
  misc_feature: MA Experiment 20000184 PARAMETER Experiment Name: At_Shoots__P Parameter: Age (day) Value: 7
  misc_feature: MA Experiment 20000184 PARAMETER Experiment Name: At_Shoots__P Parameter: Tissue Value: Shoots vs. Whole Plant
  misc_feature: MA Experiment ID: 20000185 Result: Down-regulated in Transcription
  misc_feature: MA Experiment 20000185 PARAMETER Experiment Name: At_Roots__P Parameter: Age (day) Value: 7 vs. 21
  misc_feature: MA Experiment 20000185 PARAMETER Experiment Name: At_Roots__P Parameter: Organism Value: A. thaliana
  misc_feature: MA Experiment 20000185 PARAMETER Experiment Name: At_Roots__P Parameter: Tissue Value: Roots vs. Whole Plant
  misc_feature: MA Experiment ID: 20000224 Result: Down-regulated in Transcription
  misc_feature: MA Experiment ID: 20000227 Result: Down-regulated in Transcription
  misc_feature: MA Experiment 20000227 PARAMETER Experiment Name: At_Root-Tips-vs-Tops_P Parameter: Tissue Value: Root Tips vs. Root Tops
  misc_feature: MA Experiment ID: 20000234 Result: Down-regulated in Transcription
  misc_feature: MA Experiment 20000234 PARAMETER Experiment Name: At_Siliques_P Parameter: Age (day) Value: 21
  misc_feature: MA Experiment 20000234 PARAMETER Experiment Name: At_Siliques_P Parameter: Organism Value: A. thaliana
  misc_feature: MA Experiment 20000234 PARAMETER Experiment Name: At_Siliques_P Parameter: Plant Line Value: WS
  misc_feature: MA Experiment 20000234 PARAMETER Experiment Name: At_Siliques_P Parameter: Tissue Value: Less Than 5mm Siliques vs. Whole Plant
  misc_feature: MA Experiment ID: 20000264 Result: Down-regulated in Transcription
  misc_feature: MA Experiment 20000264 PARAMETER Experiment Name: At_Open_Flower_P Parameter: Age (day) Value: 21
  misc_feature: MA Experiment 20000264 PARAMETER Experiment Name: At_Open_Flower_P Parameter: Plant Line Value: WS
  misc_feature: MA Experiment 20000264 PARAMETER Experiment Name: At_Open_Flower_P Parameter: Tissue Value: Open Flower vs. Whole Plant
  misc_feature: MA Experiment ID: 20000265 Result: Down-regulated in Transcription
  misc_feature: MA Experiment 20000265 PARAMETER Experiment Name: At_Open_Flower_P Parameter: Age (day) Value: 21
  misc_feature: MA Experiment 20000265 PARAMETER Experiment Name: At_Open_Flower_P Parameter: Plant Line Value: WS
  misc_feature: MA Experiment 20000265 PARAMETER Experiment Name: At_Open_Flower_P Parameter: Tissue Value: Closed Flower vs. Whole Plant
  misc_feature: MA Experiment ID: 20000269 Result: Down-regulated in Transcription
  misc_feature: MA Experiment 20000269 PARAMETER Experiment Name: At_1mM_KNO3_L-vs-H_Roots_P Parameter: Age (day) Value: 7,10,12
  misc_feature: MA Experiment 20000269 PARAMETER Experiment Name: At_1mM_KNO3_L-vs-H_Roots_P Parameter: Organism Value: A. thaliana
  misc_feature: MA Experiment 20000269 PARAMETER Experiment Name: At_1mM_KNO3_L-vs-H_Roots_P Parameter: Plant Line Value: WS
  misc_feature: MA Experiment 20000269 PARAMETER Experiment Name: At_1mM_KNO3_L-vs-H_Roots_P Parameter: Timepoint (day) Value: 7,10,12
  misc_feature: MA Experiment 20000269 PARAMETER Experiment Name: At_1mM_KNO3_L-vs-H_Roots_P Parameter: Tissue Value: Roots
  misc_feature: MA Experiment 20000269 PARAMETER Experiment Name: At_1mM_KNO3_L-vs-H_Roots_P Parameter: Treatment Value: 1mM KNO3 vs. 50mM KNO3
  misc_feature: MA Experiment ID: 20000286 Result: Down-regulated in Transcription
  misc_feature: MA Experiment 20000286 PARAMETER Experiment Name: At_Open_Flower_P Parameter: Age (day) Value: 21
  misc_feature: MA Experiment 20000286 PARAMETER Experiment Name: At_Open_Flower_P Parameter: Plant Line Value: WS
  misc_feature: MA Experiment 20000286 PARAMETER Experiment Name: At_Open_Flower_P Parameter: Tissue Value: Half Open vs. Whole Plant
  misc_feature: MA Experiment ID: 20000308 Result: Down-regulated in Transcription
  misc_feature: MA Experiment 20000308 PARAMETER Experiment Name: At_100mM_NaCl__P Parameter: Age (day) Value: 17
  misc_feature: MA Experiment 20000308 PARAMETER Experiment Name: At_100mM_NaCl__P Parameter: Organism Value: A. thaliana
  misc_feature: MA Experiment 20000308 PARAMETER Experiment Name: At_100mM_NaCl__P Parameter: Plant Line Value: WS
  misc_feature: MA Experiment 20000308 PARAMETER Experiment Name: At_100mM_NaCl__P Parameter: Timepoint (hr) Value: 72
  misc_feature: MA Experiment 20000308 PARAMETER Experiment Name: At_100mM_NaCl__P Parameter: Tissue Value: Whole Plant
  misc_feature: MA Experiment 20000308 PARAMETER Experiment Name: At_100mM_NaCl__P Parameter: Treatment Value: 100mM NaCl vs. No Treatment
  misc_feature: MA Experiment ID: 20000439 Result: Down-regulated in Transcription
  misc_feature: MA Experiment 20000439 PARAMETER Experiment Name: At_Roots__P Parameter: Age (day) Value: 14 vs. 21
  misc_feature: MA Experiment 20000439 PARAMETER Experiment Name: At_Roots__P Parameter: Organism Value: A. thaliana
  misc_feature: MA Experiment 20000439 PARAMETER Experiment Name: At_Roots__P Parameter: Tissue Value: Roots vs. Whole Plant
  misc_feature: MA Experiment ID: 20000441 Result: Up-regulated in Transcription
  misc_feature: MA Experiment 20000441 PARAMETER Experiment Name: At_1uM_BR-BRZ__P Parameter: Tissue Value: Shoot Apices
  misc_feature: MA Experiment 20000441 PARAMETER Experiment Name: At_1uM_BR-BRZ__P Parameter: Treatment Value: 1uM BR vs. No Treatment
  misc_feature: MA Experiment ID: 20000443 Result: Up-regulated in Transcription
  misc_feature: MA Experiment 20000443 PARAMETER Experiment Name: At_1uM_BR-BRZ__P Parameter: Tissue Value: Shoot Apices
  misc_feature: MA Experiment 20000443 PARAMETER Experiment Name: At_1uM_BR-BRZ__P Parameter: Treatment Value: 1uM BRZ vs. No Treatment
  misc_feature: MA Experiment ID: 20000451 Result: Down-regulated in Transcription
  misc_feature: MA Experiment 20000451 PARAMETER Experiment Name: At_CS6879_Shoots-Roots_P Parameter: Age (day) Value: 14
  misc_feature: MA Experiment 20000451 PARAMETER Experiment Name: At_CS6879_Shoots-Roots_P Parameter: Organism Value: A. thaliana
  misc_feature: MA Experiment 20000451 PARAMETER Experiment Name: At_CS6879_Shoots-Roots_P Parameter: Plant Line Value: CS6879 vs. WS
  misc_feature: MA Experiment 20000451 PARAMETER Experiment Name: At_CS6879_Shoots-Roots_P Parameter: Tissue Value: Roots
  misc_feature: MA Experiment ID: 20000527 Result: Up-regulated in Transcription
  misc_feature: MA Experiment 20000527 PARAMETER Experiment Name: At_10percent_PEG_P Parameter: Age (day) Value: 20
  misc_feature: MA Experiment 20000527 PARAMETER Experiment Name: At_10percent_PEG_P Parameter: Organism Value: A. thaliana
  misc_feature: MA Experiment 20000527 PARAMETER Experiment Name: At_10percent_PEG_P Parameter: Plant Line Value: WS
  misc_feature: MA Experiment 20000527 PARAMETER Experiment Name: At_10percent_PEG_P Parameter: Timepoint (day) Value: 20
  misc_feature: MA Experiment 20000527 PARAMETER Experiment Name: At_10percent_PEG_P Parameter: Tissue Value: Whole Plant
  misc_feature: MA Experiment 20000527 PARAMETER Experiment Name: At_10percent_PEG_P Parameter: Treatment Value: 10percent PEG vs. No Treatment
  misc_feature: MA Experiment ID: 20000794 Result: Down-regulated in Transcription
  misc_feature: MA Experiment 20000794 PARAMETER Experiment Name: At_Petals_P Parameter: Age (day) Value: 23-25 days
  misc_feature: MA Experiment 20000794 PARAMETER Experiment Name: At_Petals_P Parameter: Plant Line Value: WS
  misc_feature: MA Experiment 20000794 PARAMETER Experiment Name: At_Petals_P Parameter: Tissue Value: Petals vs. Whole plant
  misc_feature: MA Experiment ID: 20001247 Result: Up-regulated in Transcription
  misc_feature: MA Experiment 20001247 PARAMETER Experiment Name: At_Far-red-induction_P Parameter: Age (day) Value: 7
  misc_feature: MA Experiment 20001247 PARAMETER Experiment Name: At_Far-red-induction_P Parameter: Light Value: Far-red vs. White
  misc_feature: MA Experiment 20001247 PARAMETER Experiment Name: At_Far-red-induction_P Parameter: Organism Value: A. thaliana
  misc_feature: MA Experiment 20001247 PARAMETER Experiment Name: At_Far-red-induction_P Parameter: Plant Line Value: Columbia
  misc_feature: MA Experiment 20001247 PARAMETER Experiment Name: At_Far-red-induction_P Parameter: Timepoint (hr) Value: 1
  misc_feature: MA Experiment 20001247 PARAMETER Experiment Name: At_Far-red-induction_P Parameter: Tissue Value: Whole Plant
  misc_feature: MA Experiment ID: 20001248 Result: Up-regulated in Transcription
  misc_feature: MA Experiment 20001248 PARAMETER Experiment Name: At_Far-red-induction_P Parameter: Age (day) Value: 7
  misc_feature: MA Experiment 20001248 PARAMETER Experiment Name: At_Far-red-induction_P Parameter: Light Value: Far-red vs. White
  misc_feature: MA Experiment 20001248 PARAMETER Experiment Name: At_Far-red-induction_P Parameter: Organism Value: A. thaliana
  misc_feature: MA Experiment 20001248 PARAMETER Experiment Name: At_Far-red-induction_P Parameter: Plant Line Value: Columbia
  misc_feature: MA Experiment 20001248 PARAMETER Experiment Name: At_Far-red-induction_P Parameter: Timepoint (hr) Value: 4
  misc_feature: MA Experiment 20001248 PARAMETER Experiment Name: At_Far-red-induction_P Parameter: Tissue Value: Whole Plant
  misc_feature: MA Experiment ID: 20001450 Result: Up-regulated in Transcription
  misc_feature: MA Experiment 20001450 PARAMETER Experiment Name: At_Far-red-induction_P Parameter: Age (day) Value: 7
  misc_feature: MA Experiment 20001450 PARAMETER Experiment Name: At_Far-red-induction_P Parameter: Light Value: Far-red vs. White
  misc_feature: MA Experiment 20001450 PARAMETER Experiment Name: At_Far-red-induction_P Parameter: Organism Value: A. thaliana
  misc_feature: MA Experiment 20001450 PARAMETER Experiment Name: At_Far-red-induction_P Parameter: Plant Line Value: Columbia
  misc_feature: MA Experiment 20001450 PARAMETER Experiment Name: At_Far-red-induction_P Parameter: Timepoint (hr) Value: 8
  misc_feature: MA Experiment 20001450 PARAMETER Experiment Name: At_Far-red-induction_P Parameter: Tissue Value: Whole Plant
  misc_feature: MA Experiment ID: 20001451 Result: Up-regulated in Transcription
  misc_feature: MA Experiment 20001451 PARAMETER Experiment Name: At_Far-red-induction_P Parameter: Age (day) Value: 7
  misc_feature: MA Experiment 20001451 PARAMETER Experiment Name: At_Far-red-induction_P Parameter: Light Value: Far-red vs. White
  misc_feature: MA Experiment 20001451 PARAMETER Experiment Name: At_Far-red-induction_P Parameter: Organism Value: A. thaliana
  misc_feature: MA Experiment 20001451 PARAMETER Experiment Name: At_Far-red-induction_P Parameter: Plant Line Value: Columbia
  misc_feature: MA Experiment 20001451 PARAMETER Experiment Name: At_Far-red-induction_P Parameter: Timepoint (hr) Value: 24
  misc_feature: MA Experiment 20001451 PARAMETER Experiment Name: At_Far-red-induction_P Parameter: Tissue Value: Whole Plant
  misc_feature: MA Experiment ID: 20001504 Result: Down-regulated in Transcription
  misc_feature: MA Experiment 20001504 PARAMETER Experiment Name: At_Far-red-enriched_P Parameter: Age (day) Value: 10
  misc_feature: MA Experiment 20001504 PARAMETER Experiment Name: At_Far-red-enriched_P Parameter: Light Value: Far-red enriched vs. White
  misc_feature: MA Experiment 20001504 PARAMETER Experiment Name: At_Far-red-enriched_P Parameter: Organism Value: A. thaliana
  misc_feature: MA Experiment 20001504 PARAMETER Experiment Name: At_Far-red-enriched_P Parameter: Plant Line Value: Columbia
  misc_feature: MA Experiment 20001504 PARAMETER Experiment Name: At_Far-red-enriched_P Parameter: Timepoint (day) Value: 6
  misc_feature: MA Experiment 20001504 PARAMETER Experiment Name: At_Far-red-enriched_P Parameter: Tissue Value: Whole Plant
  misc_feature: MA Experiment ID: 20001555 Result: Down-regulated in Transcription
  misc_feature: MA Experiment 20001555 PARAMETER Experiment Name: At_Drought_Soil_Dry_P Parameter: Age (day) Value: 24
  misc_feature: MA Experiment 20001555 PARAMETER Experiment Name: At_Drought_Soil_Dry_P Parameter: Organism Value: A. thaliana
  misc_feature: MA Experiment 20001555 PARAMETER Experiment Name: At_Drought_Soil_Dry_P Parameter: Plant Line Value: WS
  misc_feature: MA Experiment 20001555 PARAMETER Experiment Name: At_Drought_Soil_Dry_P Parameter: Post Timepoint (hr) Value: None
  misc_feature: MA Experiment 20001555 PARAMETER Experiment Name: At_Drought_Soil_Dry_P Parameter: Post-Treatment Value: None
  misc_feature: MA Experiment 20001555 PARAMETER Experiment Name: At_Drought_Soil_Dry_P Parameter: Timepoint (day) Value: 10
  misc_feature: MA Experiment 20001555 PARAMETER Experiment Name: At_Drought_Soil_Dry_P Parameter: Treatment Value: Drought vs. No Drought
  misc_feature: MA Experiment ID: 20001556 Result: Down-regulated in Transcription
  misc_feature: MA Experiment 20001556 PARAMETER Experiment Name: At_Drought_Soil_Dry_P Parameter: Age (day) Value: 26
  misc_feature: MA Experiment 20001556 PARAMETER Experiment Name: At_Drought_Soil_Dry_P Parameter: Organism Value: A. thaliana
  misc_feature: MA Experiment 20001556 PARAMETER Experiment Name: At_Drought_Soil_Dry_P Parameter: Plant Line Value: WS
  misc_feature: MA Experiment 20001556 PARAMETER Experiment Name: At_Drought_Soil_Dry_P Parameter: Post Timepoint (hr) Value: None
  misc_feature: MA Experiment 20001556 PARAMETER Experiment Name: At_Drought_Soil_Dry_P Parameter: Post-Treatment Value: None
  misc_feature: MA Experiment 20001556 PARAMETER Experiment Name: At_Drought_Soil_Dry_P Parameter: Timepoint (day) Value: 12
  misc_feature: MA Experiment 20001556 PARAMETER Experiment Name: At_Drought_Soil_Dry_P Parameter: Treatment Value: Drought vs. No Drought
  misc_feature: MA Experiment ID: 20001557 Result: Down-regulated in Transcription
  misc_feature: MA Experiment 20001557 PARAMETER Experiment Name: At_Drought_Soil_Dry_P Parameter: Age (day) Value: 27
  misc_feature: MA Experiment 20001557 PARAMETER Experiment Name: At_Drought_Soil_Dry_P Parameter: Organism Value: A. thaliana
  misc_feature: MA Experiment 20001557 PARAMETER Experiment Name: At_Drought_Soil_Dry_P Parameter: Plant Line Value: WS
  misc_feature: MA Experiment 20001557 PARAMETER Experiment Name: At_Drought_Soil_Dry_P Parameter: Post Timepoint (hr) Value: 3
  misc_feature: MA Experiment 20001557 PARAMETER Experiment Name: At_Drought_Soil_Dry_P Parameter: Post-Treatment Value: Re-Water vs. No Drought
  misc_feature: MA Experiment 20001557 PARAMETER Experiment Name: At_Drought_Soil_Dry_P Parameter: Timepoint (day) Value: 13
  misc_feature: MA Experiment 20001557 PARAMETER Experiment Name: At_Drought_Soil_Dry_P Parameter: Treatment Value: Drought vs. No Drought
  misc_feature: MA Experiment ID: 20001558 Result: Down-regulated in Transcription
  misc_feature: MA Experiment 20001558 PARAMETER Experiment Name: At_Drought_Soil_Dry_P Parameter: Age (day) Value: 27
  misc_feature: MA Experiment 20001558 PARAMETER Experiment Name: At_Drought_Soil_Dry_P Parameter: Organism Value: A. thaliana
  misc_feature: MA Experiment 20001558 PARAMETER Experiment Name: At_Drought_Soil_Dry_P Parameter: Plant Line Value: WS
  misc_feature: MA Experiment 20001558 PARAMETER Experiment Name: At_Drought_Soil_Dry_P Parameter: Post Timepoint (hr) Value: 6
  misc_feature: MA Experiment 20001558 PARAMETER Experiment Name: At_Drought_Soil_Dry_P Parameter: Post-Treatment Value: Re-Water vs. No Drought
  misc_feature: MA Experiment 20001558 PARAMETER Experiment Name: At_Drought_Soil_Dry_P Parameter: Timepoint (day) Value: 13
  misc_feature: MA Experiment 20001558 PARAMETER Experiment Name: At_Drought_Soil_Dry_P Parameter: Treatment Value: Drought vs. No Drought
  misc_feature: MA Experiment ID: 20001559 Result: Down-regulated in Transcription
  misc_feature: MA Experiment 20001559 PARAMETER Experiment Name: At_Drought_Soil_Dry_P Parameter: Age (day) Value: 28
  misc_feature: MA Experiment 20001559 PARAMETER Experiment Name: At_Drought_Soil_Dry_P Parameter: Organism Value: A. thaliana
  misc_feature: MA Experiment 20001559 PARAMETER Experiment Name: At_Drought_Soil_Dry_P Parameter: Plant Line Value: WS
  misc_feature: MA Experiment 20001559 PARAMETER Experiment Name: At_Drought_Soil_Dry_P Parameter: Post Timepoint (hr) Value: 29
  misc_feature: MA Experiment 20001559 PARAMETER Experiment Name: At_Drought_Soil_Dry_P Parameter: Post-Treatment Value: Re-Water vs. No Drought
  misc_feature: MA Experiment 20001559 PARAMETER Experiment Name: At_Drought_Soil_Dry_P Parameter: Timepoint (day) Value: 14
  misc_feature: MA Experiment 20001559 PARAMETER Experiment Name: At_Drought_Soil_Dry_P Parameter: Treatment Value: Drought vs. No Drought
  misc_feature: MA Experiment ID: 20001560 Result: Down-regulated in Transcription
  misc_feature: MA Experiment 20001560 PARAMETER Experiment Name: At_Drought_Soil_Dry_P Parameter: Age (day) Value: 28
  misc_feature: MA Experiment 20001560 PARAMETER Experiment Name: At_Drought_Soil_Dry_P Parameter: Organism Value: A. thaliana
  misc_feature: MA Experiment 20001560 PARAMETER Experiment Name: At_Drought_Soil_Dry_P Parameter: Plant Line Value: WS
  misc_feature: MA Experiment 20001560 PARAMETER Experiment Name: At_Drought_Soil_Dry_P Parameter: Post Timepoint (hr) Value: None
  misc_feature: MA Experiment 20001560 PARAMETER Experiment Name: At_Drought_Soil_Dry_P Parameter: Post-Treatment Value: None
  misc_feature: MA Experiment 20001560 PARAMETER Experiment Name: At_Drought_Soil_Dry_P Parameter: Timepoint (day) Value: 14
  misc_feature: MA Experiment 20001560 PARAMETER Experiment Name: At_Drought_Soil_Dry_P Parameter: Treatment Value: Drought vs. No Drought
  misc_feature: MA Experiment ID: 20001757 Result: Up-regulated in Transcription
  misc_feature: MA Experiment 20001757 PARAMETER Experiment Name: At_50mM_NH4NO3_L-to-H_P Parameter: Timepoint (hr) Value: 6
  misc_feature: MA Experiment 20001757 PARAMETER Experiment Name: At_50mM_NH4NO3_L-to-H_P Parameter: Tissue Value: Leaf
  misc_feature: MA Experiment 20001757 PARAMETER Experiment Name: At_50mM_NH4NO3_L-to-H_P Parameter: Treatment Value: 50mM NH4NO3 vs 100mM Mannitol
  misc_feature: MA Experiment ID: 20001904 Result: Down-regulated in Transcription
  misc_feature: MA Experiment 20001904 PARAMETER Experiment Name: At_Drought_Reproduction_P Parameter: Age (day) Value: 37
  misc_feature: MA Experiment 20001904 PARAMETER Experiment Name: At_Drought_Reproduction_P Parameter: Organism Value: A. thaliana
  misc_feature: MA Experiment 20001904 PARAMETER Experiment Name: At_Drought_Reproduction_P Parameter: Plant Line Value: WS
  misc_feature: MA Experiment 20001904 PARAMETER Experiment Name: At_Drought_Reproduction_P Parameter: Timepoint (day) Value: 7
  misc_feature: MA Experiment 20001904 PARAMETER Experiment Name: At_Drought_Reproduction_P Parameter: Tissue Value: Rosettes
  misc_feature: MA Experiment 20001904 PARAMETER Experiment Name: At_Drought_Reproduction_P Parameter: Treatment Value: Drought vs. No Drought
  misc_feature: MA Experiment ID: 20001905 Result: Down-regulated in Transcription
  misc_feature: MA Experiment 20001905 PARAMETER Experiment Name: At_Drought_Reproduction_P Parameter: Age (day) Value: 40
  misc_feature: MA Experiment 20001905 PARAMETER Experiment Name: At_Drought_Reproduction_P Parameter: Organism Value: A. thaliana
  misc_feature: MA Experiment 20001905 PARAMETER Experiment Name: At_Drought_Reproduction_P Parameter: Plant Line Value: WS
  misc_feature: MA Experiment 20001905 PARAMETER Experiment Name: At_Drought_Reproduction_P Parameter: Timepoint (day) Value: 10
  misc_feature: MA Experiment 20001905 PARAMETER Experiment Name: At_Drought_Reproduction_P Parameter: Tissue Value: Rosettes
  misc_feature: MA Experiment 20001905 PARAMETER Experiment Name: At_Drought_Reproduction_P Parameter: Treatment Value: Drought vs. No Drought
  misc_feature: MA Experiment ID: 20001906 Result: Down-regulated in Transcription
  misc_feature: MA Experiment 20001906 PARAMETER Experiment Name: At_Drought_Reproduction_P Parameter: Age (day) Value: 35
  misc_feature: MA Experiment 20001906 PARAMETER Experiment Name: At_Drought_Reproduction_P Parameter: Organism Value: A. thaliana
  misc_feature: MA Experiment 20001906 PARAMETER Experiment Name: At_Drought_Reproduction_P Parameter: Plant Line Value: WS
  misc_feature: MA Experiment 20001906 PARAMETER Experiment Name: At_Drought_Reproduction_P Parameter: Timepoint (day) Value: 5
  misc_feature: MA Experiment 20001906 PARAMETER Experiment Name: At_Drought_Reproduction_P Parameter: Tissue Value: Siliques
  misc_feature: MA Experiment 20001906 PARAMETER Experiment Name: At_Drought_Reproduction_P Parameter: Treatment Value: Drought vs. No Drought
  misc_feature: MA Experiment ID: 20001908 Result: Down-regulated in Transcription
  misc_feature: MA Experiment 20001908 PARAMETER Experiment Name: At_Drought_Reproduction_P Parameter: Age (day) Value: 40
  misc_feature: MA Experiment 20001908 PARAMETER Experiment Name: At_Drought_Reproduction_P Parameter: Organism Value: A. thaliana
  misc_feature: MA Experiment 20001908 PARAMETER Experiment Name: At_Drought_Reproduction_P Parameter: Plant Line Value: WS
  misc_feature: MA Experiment 20001908 PARAMETER Experiment Name: At_Drought_Reproduction_P Parameter: Timepoint (day) Value: 10
  misc_feature: MA Experiment 20001908 PARAMETER Experiment Name: At_Drought_Reproduction_P Parameter: Tissue Value: Siliques
  misc_feature: MA Experiment 20001908 PARAMETER Experiment Name: At_Drought_Reproduction_P Parameter: Treatment Value: Drought vs. No Drought
agactcactaaacaaaaatgatgatcggcgaaaataaaaaccggccacatccaacgatccatatccctcaatgggatcaaatcaacgatccaacggccacaatctcttcaccattctcttccgtcaaccttaacagcgttaacgactacccacactctccgtcaccgtatctcgactccttcgcttctctcttccgttacctcccgtcaaacgagttaacaaacgattcagactcatcaagtggcgacgagtcatcaccactcaccgactcattctcctccgacgagtttcgcatctacgagttcaaaatccggcgatgcgctcgaggtcgatctcatgattggacggagtgtccgttcgcacatcccggaggaaaaagctcgacgacgtgatccgagaaagtttcattactccggcaccgcttgtcctgagtttcgtaaaggaagttgtagaagaggtgattcgtgtgagttctctcatggagttttcgagtgttggctccatccttctcgttaccgtactcagccgtgtaaagacggaactagctgccggagaagaatctgtttcttcgctcatacgacggagcagttacgtgtattaccttgttcgttagatccagatcttggattcttctcaggattagctacttctccgacttcgattcttgtttctccttcgttttcaccaccgtcggaatctccgccgctttctccgagtaccggtgaacttattgcgtcgatgaggaaaatgcaattgaacggaggtggttgttcgtggagttctccgatgagatctgcagttaggttacctttttcgtcgtctctgcgtccgattcaggcggcaacgtggccgaggataagagagtttgagatcgaagaagctccggcgatggaatttgtggaatctgggaaagagctgagagcggagatgtatgcaagactcagtagagagaactcactcggttgagtcgacttggatcgagtctttgatgacgtggcgactcgatctgattttgtgaatattttagagatttttaaggtgttgtggataaatgacgtggcgggtcgatcttagtgacggtacaatcggacgatgaagaaaaaagcgttaagagtaacaaaaaaaggaagaatttgtaaagagatgataatgagagaatttgagagctattcttctggcttttttctctgcagttttttttattgttttcgttattttcttgtttttattttggttttcggctttattttgtttgttgtttattaatgttatatcattttgtaattagttctcaaatgtatttggataacatcttagtttgagactttagaaaagaacatttcattt

SEQ ID NO: 25121 - protein, 209 aa, Arabidopsis thaliana
  peptide (1)..(209): Ceres Seq. ID no. 12335739
  misc_feature (25)..(50): Pfam Name: Zinc finger C-x8-C-x5-C-x3-H type (and similar) Pfam Description: Zinc finger C-x8-C-x5-C-x3-H type (and similar)
  misc_feature (11)..(127): Homolog of NCBI NO: 26449538 NR Description: unknown protein [Arabidopsis thaliana]
  misc_feature (11)..(127): Homolog of NCBI NO: 15219557 NR Description: hypothetical protein; protein id: At1g03790.1
  misc_feature (11)..(161): Homolog of NCBI NO: 15233491 NR Description: putative protein
  misc_feature (102)..(126): Homolog of NCBI NO: 34906436 NR Description: putative zinc finger transcription factor
  misc_feature (11)..(89): Homolog of NCBI NO: 34906436 NR Description: putative zinc finger transcription factor
  misc_feature (132)..(209): Homolog of NCBI NO: 15224852 NR Description: putative CCCH-type zinc finger protein
  misc_feature (11)..(126): Homolog of NCBI NO: 15224852 NR Description: putative CCCH-type zinc finger protein
  misc_feature (1)..(209): Homolog of NCBI NO: 1800279 NR Description: putative Cys3His zinc finger protein ATCTH
  misc_feature (11)..(209): Homolog of NCBI NO: 21593538 NR Description: putative CCCH-type zinc finger protein
  misc_feature (11)..(209): Homolog of NCBI NO: 15225213 NR Description: putative CCCH-type zinc finger protein
MIGRSVRSHIPEEKARRRDPRKFHYSGTACPEFRKGSCRRGDSCEFSHGVFECWLHPSRYRTQPCKDGTSCRRRICFFAHTTEQLRVLPCSLDPDLGFFSGLATSPTSILVSPSFSPPSESPPLSPSTGELIASMRKMQLNGGGCSWSSPMRSAVRLPFSSSLRPIQAATWPRIREFEIEEAPAMEFVESGKELRAEMYARLSRENSLG

SEQ ID NO: 25122 - protein, 124 aa, Arabidopsis thaliana
  peptide (1)..(124): Ceres Seq. ID no. 12335740
  misc_feature (77)..(118): Homolog of NCBI NO: 18405834 NR Description: putative CCCH-type zinc finger protein
  misc_feature (84)..(121): Homolog of NCBI NO: 15241451 NR Description: putative protein
  misc_feature (26)..(118): Homolog of NCBI NO: 28273376 NR Description: unknown protein [Oryza sativa (japonica
  misc_feature (21)..(121): Homolog of NCBI NO: 26449538 NR Description: unknown protein [Arabidopsis thaliana]
  misc_feature (21)..(121): Homolog of NCBI NO: 15219557 NR Description: hypothetical protein; protein id: At1g03790.1
  misc_feature (1)..(121): Homolog of NCBI NO: 15233491 NR Description: putative protein
  misc_feature (49)..(121): Homolog of NCBI NO: 34906436 NR Description: putative zinc finger transcription factor
  misc_feature (1)..(121): Homolog of NCBI NO: 15224852 NR Description: putative CCCH-type zinc finger protein
  misc_feature (1)..(121): Homolog of NCBI NO: 21593538 NR Description: putative CCCH-type zinc finger protein
  misc_feature (1)..(121): Homolog of NCBI NO: 15225213 NR Description: putative CCCH-type zinc finger protein
MMIGENKNRPHPTIHIPQWDQINDPTATISSPFSSVNLNSVNDYPHSPSPYLDSFASLFRYLPSNELTNDSDSSSGDESSPLTDSFSSDEFRIYEFKIRRCARGRSHDWTECPFAHPGGKSSTT

SEQ ID NO: 25123 - protein, 123 aa, Arabidopsis thaliana
  peptide (1)..(123): Ceres Seq. ID no. 12335741
  misc_feature (76)..(117): Homolog of NCBI NO: 18405834 NR Description: putative CCCH-type zinc finger protein
  misc_feature (83)..(120): Homolog of NCBI NO: 15241451 NR Description: putative protein
  misc_feature (25)..(117): Homolog of NCBI NO: 28273376 NR Description: unknown protein [Oryza sativa (japonica
  misc_feature (20)..(120): Homolog of NCBI NO: 26449538 NR Description: unknown protein [Arabidopsis thaliana]
  misc_feature (20)..(120): Homolog of NCBI NO: 15219557 NR Description: hypothetical protein; protein id: At1g03790.1
  misc_feature (1)..(120): Homolog of NCBI NO: 15233491 NR Description: putative protein
  misc_feature (48)..(120): Homolog of NCBI NO: 34906436 NR Description: putative zinc finger transcription factor
  misc_feature (1)..(120): Homolog of NCBI NO: 15224852 NR Description: putative CCCH-type zinc finger protein
  misc_feature (1)..(120): Homolog of NCBI NO: 21593538 NR Description: putative CCCH-type zinc finger protein
  misc_feature (1)..(120): Homolog of NCBI NO: 15225213 NR Description: putative CCCH-type zinc finger protein
MIGENKNRPHPTIHIPQWDQINDPTATISSPFSSVNLNSVNDYPHSPSPYLDSFASLFRYLPSNELTNDSDSSSGDESSPLTDSFSSDEFRIYEFKIRRCARGRSHDWTECPFAHPGGKSSTT

SEQ ID NO: 25124 - DNA, 1189 bp, Arabidopsis thaliana
  misc_feature (1)..(1189): Ceres Seq. ID no. 12329063
  misc_feature: MA Experiment ID: 108434 Result: Down-regulated in Transcription
  misc_feature: MA Experiment 108434 PARAMETER Experiment Name: At_Root_Tips_cDNA_P Parameter: Tissue Value: Root Tips
  misc_feature: MA Experiment ID: 108462 Result: Up-regulated in Transcription
  misc_feature: MA Experiment 108462 PARAMETER Experiment Name: At_Germinating_Seeds_cDNA_P Parameter: Age (day) Value: 2 vs. 0
  misc_feature: MA Experiment 108462 PARAMETER Experiment Name: At_Germinating_Seeds_cDNA_P Parameter: Tissue Value: Germinating Seeds
  misc_feature: MA Experiment ID: 108464 Result: Up-regulated in Transcription
  misc_feature: MA Experiment 108464 PARAMETER Experiment Name: At_Germinating_Seeds_cDNA_P Parameter: Age (day) Value: 4 vs. 0
  misc_feature: MA Experiment 108464 PARAMETER Experiment Name: At_Germinating_Seeds_cDNA_P Parameter: Tissue Value: Germinating Seeds
  misc_feature: MA Experiment ID: 108573 Result: Up-regulated in Transcription
  misc_feature: MA Experiment 108573 PARAMETER Experiment Name: At_Drought_cDNA_P Parameter: Timepoint (hr) Value: 6
  misc_feature: MA Experiment 108573 PARAMETER Experiment Name: At_Drought_cDNA_P Parameter: Tissue Value: Aerial
  misc_feature: MA Experiment 108573 PARAMETER Experiment Name: At_Drought_cDNA_P Parameter: Treatment Value: Drought vs. No Drought
  misc_feature: MA Experiment ID: 108595 Result: Down-regulated in Transcription
  misc_feature: MA Experiment 108595 PARAMETER Experiment Name: At_Ler-pi_Ovule_cDNA_P Parameter: Plant Line Value: null
  misc_feature: MA Experiment ID: 20000087 Result: Down-regulated in Transcription
  misc_feature: MA Experiment 20000087 PARAMETER Experiment Name: At_100uM_ABA_Mutants_cDNA_P Parameter: Plant Line Value: WS
  misc_feature: MA Experiment 20000087 PARAMETER Experiment Name: At_100uM_ABA_Mutants_cDNA_P Parameter: Timepoint (hr) Value: 6
  misc_feature: MA Experiment 20000087 PARAMETER Experiment Name: At_100uM_ABA_Mutants_cDNA_P Parameter: Tissue Value: Aerial
  misc_feature: MA Experiment 20000087 PARAMETER Experiment Name: At_100uM_ABA_Mutants_cDNA_P Parameter: Treatment Value: 100uM ABA vs. No Treatment
  misc_feature: MA Experiment ID: 20000089 Result: Down-regulated in Transcription
  misc_feature: MA Experiment ID: 20000090 Result: Down-regulated in Transcription
  misc_feature: MA Experiment ID: 20000180 Result: Up-regulated in Transcription
  misc_feature: MA Experiment 20000180 PARAMETER Experiment Name: At_Germinating_Seeds_P Parameter: Age (hr) Value: 24 vs. 0
  misc_feature: MA Experiment 20000180 PARAMETER Experiment Name: At_Germinating_Seeds_P Parameter: Tissue Value: Germinating Seeds
  misc_feature: MA Experiment ID: 20000224 Result: Down-regulated in Transcription
  misc_feature: MA Experiment ID: 20000438 Result: Up-regulated in Transcription
  misc_feature: MA Experiment 20000438 PARAMETER Experiment Name: At_Shoots__P Parameter: Age (day) Value: 14
  misc_feature: MA Experiment 20000438 PARAMETER Experiment Name: At_Shoots__P Parameter: Tissue Value: Shoots vs. Whole Plant
  misc_feature: MA Experiment ID: 20000439 Result: Up-regulated in Transcription
  misc_feature: MA Experiment 20000439 PARAMETER Experiment Name: At_Roots__P Parameter: Age (day) Value: 14 vs. 21
  misc_feature: MA Experiment 20000439 PARAMETER Experiment Name: At_Roots__P Parameter: Organism Value: A. thaliana
  misc_feature: MA Experiment 20000439 PARAMETER Experiment Name: At_Roots__P Parameter: Tissue Value: Roots vs. Whole Plant
  misc_feature: MA Experiment ID: 20000441 Result: Up-regulated in Transcription
  misc_feature: MA Experiment 20000441 PARAMETER Experiment Name: At_1uM_BR-BRZ__P Parameter: Tissue Value: Shoot Apices
  misc_feature: MA Experiment 20000441 PARAMETER Experiment Name: At_1uM_BR-BRZ__P Parameter: Treatment Value: 1uM BR vs. No Treatment
  misc_feature: MA Experiment ID: 20000443 Result: Up-regulated in Transcription
  misc_feature: MA Experiment 20000443 PARAMETER Experiment Name: At_1uM_BR-BRZ__P Parameter: Tissue Value: Shoot Apices
  misc_feature: MA Experiment 20000443 PARAMETER Experiment Name: At_1uM_BR-BRZ__P Parameter: Treatment Value: 1uM BRZ vs. No Treatment
  misc_feature: MA Experiment ID: 20000573 Result: Down-regulated in Transcription
  misc_feature: MA Experiment 20000573 PARAMETER Experiment Name: At_100uM_ABA_Mutants__P Parameter: Organism Value: A. thaliana
  misc_feature: MA Experiment 20000573 PARAMETER Experiment Name: At_100uM_ABA_Mutants__P Parameter: Plant Line Value: CS22 vs. Ler wt
  misc_feature: MA Experiment 20000573 PARAMETER Experiment Name: At_100uM_ABA_Mutants__P Parameter: Timepoint (hr) Value: N/A
  misc_feature: MA Experiment 20000573 PARAMETER Experiment Name: At_100uM_ABA_Mutants__P Parameter: Tissue Value: Whole Plant
  misc_feature: MA Experiment 20000573 PARAMETER Experiment Name: At_100uM_ABA_Mutants__P Parameter: Treatment Value: None
  misc_feature: MA Experiment ID: 20000574 Result: Down-regulated in Transcription
  misc_feature: MA Experiment 20000574 PARAMETER Experiment Name: At_100uM_ABA_Mutants__P Parameter: Organism Value: A. thaliana
  misc_feature: MA Experiment 20000574 PARAMETER Experiment Name: At_100uM_ABA_Mutants__P Parameter: Plant Line Value: CS23 vs. Ler wt
  misc_feature: MA Experiment 20000574 PARAMETER Experiment Name: At_100uM_ABA_Mutants__P Parameter: Timepoint (hr) Value: N/A
  misc_feature: MA Experiment 20000574 PARAMETER Experiment Name: At_100uM_ABA_Mutants__P Parameter: Tissue Value: Whole Plant
  misc_feature: MA Experiment 20000574 PARAMETER Experiment Name: At_100uM_ABA_Mutants__P Parameter: Treatment Value: None
  misc_feature: MA Experiment ID: 20001248 Result: Down-regulated in Transcription
  misc_feature: MA Experiment 20001248 PARAMETER Experiment Name: At_Far-red-induction_P Parameter: Age (day) Value: 7
  misc_feature: MA Experiment 20001248 PARAMETER Experiment Name: At_Far-red-induction_P Parameter: Light Value: Far-red vs. White
  misc_feature: MA Experiment 20001248 PARAMETER Experiment Name: At_Far-red-induction_P Parameter: Organism Value: A. thaliana
  misc_feature: MA Experiment 20001248 PARAMETER Experiment Name: At_Far-red-induction_P Parameter: Plant Line Value: Columbia
  misc_feature: MA Experiment 20001248 PARAMETER Experiment Name: At_Far-red-induction_P Parameter: Timepoint (hr) Value: 4
  misc_feature: MA Experiment 20001248 PARAMETER Experiment Name: At_Far-red-induction_P Parameter: Tissue Value: Whole Plant
  misc_feature: MA Experiment ID: 20001911 Result: Up-regulated in Transcription
  misc_feature: MA Experiment 20001911 PARAMETER Experiment Name: At_Drought_Reproduction_P Parameter: Age (day) Value: 40
  misc_feature: MA Experiment 20001911 PARAMETER Experiment Name: At_Drought_Reproduction_P Parameter: Organism Value: A. thaliana
  misc_feature: MA Experiment 20001911 PARAMETER Experiment Name: At_Drought_Reproduction_P Parameter: Plant Line Value: WS
  misc_feature: MA Experiment 20001911 PARAMETER Experiment Name: At_Drought_Reproduction_P Parameter: Timepoint (day) Value: 10
  misc_feature: MA Experiment 20001911 PARAMETER Experiment Name: At_Drought_Reproduction_P Parameter: Tissue Value: Flowers
  misc_feature: MA Experiment 20001911 PARAMETER Experiment Name: At_Drought_Reproduction_P Parameter: Treatment Value: Drought vs. No Drought
aaatccttatcttctctctttcactcacaaccaattgctcatcccacctacttgttccccacaaaacactctctccctctttgttctttcatcttctctaagctctttctctgaacctacgcttctgctaagctattctaagagaagccagactagcaataaacccttcattttaagcattctgtttccttcttgagaaacctagatattttggtttcttgtatccggtgatgaagatacagtgtgatgtgtgtgagaaagctccggcgacggtgatttgttgcgccgacgaagctgctctctgtcctcaatgcgacatcgagattcacgccgctaacaaactcgctagcaagcaccaacgtcttcatcttaattccctctccaccaaattccctcgttgcgatatctgccaagagaaggcagctttcattttctgtgtagaggatagagctctgctttgcagggactgcgatgaatccatccacgtggctaattctcgatctgctaatcaccagaggttcttagccactgggatcaaagtagctctgacctcaactatatgtagtaaagaaattgagaagaatcaacctgagccttccaacaaccaacagaaggctaatcagattcctgctaaatccacaagccagcagcaacaacaaccttcttctgctactccacttccctgggctgttgacgatttctttcacttctctgatattgaatccaccgacaagaaaggacagcttgatcttggggcaggggagttggattggttttcagacatgggattcttcggtgatcagattaatgacaaggctcttcctgcagctgaagttcctgagctttctgtttcgcatttaggtcatgttcattcatacaaacctatgaagtcaaatgtttcacacaagaagccgaggtttgagaccagatatgatgatgatgatgaggaacacttcattgtccctgatcttggctaaaaagctatatgtaatctatgtgtagacattcttcaatgtaaaagaacaaacaagaaacctatctgcatgtgtggagttaatgtcatatacattttagttttgtcttaagttgtgtaagatatgttgagagcttataacaaatgtctgtgtttgagttttgttcatacctcttgaacatggtctatgcttaatgctttgatgctacaaacttg

SEQ ID NO: 25125 - protein, 248 aa, Arabidopsis thaliana
  peptide (1)..(248): Ceres Seq. ID no. 12329064
  misc_feature (52)..(99): Pfam Name: B-box zinc finger Pfam Description: B-box zinc finger
  misc_feature (1)..(198): Homolog of NCBI NO: 34903708 NR Description: putative zinc-finger protein
  misc_feature (1)..(149): Homolog of NCBI NO: 15222289 NR Description: CONSTANS B-box zinc finger family protein
  misc_feature (1)..(108): Homolog of NCBI NO: 18412037 NR Description: CONSTANS B-box zinc finger family protein
  misc_feature (1)..(108): Homolog of NCBI NO: 17433085 NR Description: Zinc finger protein constans-like 7
  misc_feature (1)..(218): Homolog of NCBI NO: 3618314 NR Description: zinc finger protein [Oryza sativa (japonica
  misc_feature (1)..(248): Homolog of NCBI NO: 3618310 NR Description: zinc finger protein [Oryza sativa (japonica
  misc_feature (1)..(248): Homolog of NCBI NO: 18402646 NR Description: salt tolerance-like protein
  misc_feature (1)..(168): Homolog of NCBI NO: 30679541 NR Description: salt-tolerance protein [Arabidopsis thaliana]
  misc_feature (1)..(248): Homolog of NCBI NO: 25408150 NR Description: hypothetical protein At2g31380 [imported] -
  misc_feature (1)..(248): Homolog of NCBI NO: 15221367 NR Description: salt-tolerance protein
MKIQCDVCEKAPATVICCADEAALCPQCDIEIHAANKLASKHQRLHLNSLSTKFPRCDICQEKAAFIFCVEDRALLCRDCDESIHVANSRSANHQRFLATGIKVALTSTICSKEIEKNQPEPSNNQQKANQIPAKSTSQQQQQPSSATPLPWAVDDFFHFSDIESTDKKGQLDLGAGELDWFSDMGFFGDQINDKALPAAEVPELSVSHLGHVHSYKPMKSNVSHKKPRFETRYDDDDEEHFIVPDLG

SEQ ID NO: 25126 - DNA, 1254 bp, Arabidopsis thaliana
  misc_feature (1)..(1254): Ceres Seq. ID no. 12384844
  misc_feature: MA Experiment ID: 108434 Result: Down-regulated in Transcription
  misc_feature: MA Experiment 108434 PARAMETER Experiment Name: At_Root_Tips_cDNA_P Parameter: Tissue Value: Root Tips
  misc_feature: MA Experiment ID: 108435 Result: Down-regulated in Transcription
  misc_feature: MA Experiment 108435 PARAMETER Experiment Name: At_stm_Mutants_cDNA_P Parameter: Plant Line Value: wt Landsburg vs stm
  misc_feature: MA Experiment 108435 PARAMETER Experiment Name: At_stm_Mutants_cDNA_P Parameter: Tissue Value: Shoot Apical Meristem Region
  misc_feature: MA Experiment ID: 108461 Result: Down-regulated in Transcription
  misc_feature: MA Experiment 108461 PARAMETER Experiment Name: At_Germinating_Seeds_cDNA_P Parameter: Age (day) Value: 1 vs. 0
  misc_feature: MA Experiment 108461 PARAMETER Experiment Name: At_Germinating_Seeds_cDNA_P Parameter: Tissue Value: Germinating Seeds
  misc_feature: MA Experiment ID: 108462 Result: Down-regulated in Transcription
  misc_feature: MA Experiment 108462 PARAMETER Experiment Name: At_Germinating_Seeds_cDNA_P Parameter: Age (day) Value: 2 vs. 0
  misc_feature: MA Experiment 108462 PARAMETER Experiment Name: At_Germinating_Seeds_cDNA_P Parameter: Tissue Value: Germinating Seeds
  misc_feature: MA Experiment ID: 108579 Result: Up-regulated in Transcription
  misc_feature: MA Experiment 108579 PARAMETER Experiment Name: At_4deg_Cold_cDNA_P Parameter: Temperature (deg C) Value: 4 vs. 22
  misc_feature: MA Experiment 108579 PARAMETER Experiment Name: At_4deg_Cold_cDNA_P Parameter: Timepoint (hr) Value: 6
  misc_feature: MA Experiment 108579 PARAMETER Experiment Name: At_4deg_Cold_cDNA_P Parameter: Tissue Value: Aerial
  misc_feature: MA Experiment ID: 108585 Result: Up-regulated in Transcription
  misc_feature: MA Experiment 108585 PARAMETER Experiment Name: At_5mM_NaNP_cDNA_P Parameter: Timepoint (hr) Value: 6
  misc_feature: MA Experiment 108585 PARAMETER Experiment Name: At_5mM_NaNP_cDNA_P Parameter: Tissue Value: Aerial
  misc_feature: MA Experiment 108585 PARAMETER Experiment Name: At_5mM_NaNP_cDNA_P Parameter: Treatment Value: null
  misc_feature: MA Experiment ID: 108594 Result: Down-regulated in Transcription
  misc_feature: MA Experiment 108594 PARAMETER Experiment Name: At_Ler-rhl_Root_cDNA_P Parameter: Plant Line Value: null
  misc_feature: MA Experiment ID: 20000070 Result: Up-regulated in Transcription
  misc_feature: MA Experiment 20000070 PARAMETER Experiment Name: At_100uM_ABA_Mutants_cDNA_P Parameter: Plant Line Value: CS24
  misc_feature: MA Experiment 20000070 PARAMETER Experiment Name: At_100uM_ABA_Mutants_cDNA_P Parameter: Timepoint (hr) Value: 6
  misc_feature: MA Experiment 20000070 PARAMETER Experiment Name: At_100uM_ABA_Mutants_cDNA_P Parameter: Tissue Value: Aerial
  misc_feature: MA Experiment 20000070 PARAMETER Experiment Name: At_100uM_ABA_Mutants_cDNA_P Parameter: Treatment Value: 100uM ABA vs. No Treatment
  misc_feature: MA Experiment ID: 20000071 Result: Up-regulated in Transcription
  misc_feature: MA Experiment 20000071 PARAMETER Experiment Name: At_100uM_ABA_Mutants_cDNA_P Parameter: Plant Line Value: CS8104
  misc_feature: MA Experiment 20000071 PARAMETER Experiment Name: At_100uM_ABA_Mutants_cDNA_P Parameter: Timepoint (hr) Value: 6
  misc_feature: MA Experiment 20000071 PARAMETER Experiment Name: At_100uM_ABA_Mutants_cDNA_P Parameter: Tissue Value: Aerial
  misc_feature: MA Experiment 20000071 PARAMETER Experiment Name: At_100uM_ABA_Mutants_cDNA_P Parameter: Treatment Value: 100uM ABA vs. No Treatment
  misc_feature: MA Experiment ID: 20000086 Result: Up-regulated in Transcription
  misc_feature: MA Experiment 20000086 PARAMETER Experiment Name: At_100uM_ABA_Mutants_cDNA_P Parameter: Plant Line Value: CS22
  misc_feature: MA Experiment 20000086 PARAMETER Experiment Name: At_100uM_ABA_Mutants_cDNA_P Parameter: Timepoint (hr) Value: 6
  misc_feature: MA Experiment 20000086 PARAMETER Experiment Name: At_100uM_ABA_Mutants_cDNA_P Parameter: Tissue Value: Aerial
  misc_feature: MA Experiment 20000086 PARAMETER Experiment Name: At_100uM_ABA_Mutants_cDNA_P Parameter: Treatment Value: 100uM ABA vs. No Treatment
  misc_feature: MA Experiment ID: 20000087 Result: Up-regulated in Transcription
  misc_feature: MA Experiment 20000087 PARAMETER Experiment Name: At_100uM_ABA_Mutants_cDNA_P Parameter: Plant Line Value: WS
  misc_feature: MA Experiment 20000087 PARAMETER Experiment Name: At_100uM_ABA_Mutants_cDNA_P Parameter: Timepoint (hr) Value: 6
  misc_feature: MA Experiment 20000087 PARAMETER Experiment Name: At_100uM_ABA_Mutants_cDNA_P Parameter: Tissue Value: Aerial
  misc_feature: MA Experiment 20000087 PARAMETER Experiment Name: At_100uM_ABA_Mutants_cDNA_P Parameter: Treatment Value: 100uM ABA vs. No Treatment
  misc_feature: MA Experiment ID: 20000088 Result: Up-regulated in Transcription
  misc_feature: MA Experiment 20000088 PARAMETER Experiment Name: At_100uM_ABA_Mutants_cDNA_P Parameter: Plant Line Value: Landsberg
  misc_feature: MA Experiment 20000088 PARAMETER Experiment Name: At_100uM_ABA_Mutants_cDNA_P Parameter: Timepoint (hr) Value: 6
  misc_feature: MA Experiment 20000088 PARAMETER Experiment Name: At_100uM_ABA_Mutants_cDNA_P Parameter: Tissue Value: Aerial
  misc_feature: MA Experiment 20000088 PARAMETER Experiment Name: At_100uM_ABA_Mutants_cDNA_P Parameter: Treatment Value: 100uM ABA vs. No Treatment
  misc_feature: MA Experiment ID: 20000089 Result: Up-regulated in Transcription
  misc_feature: MA Experiment ID: 20000117 Result: Up-regulated in Transcription
  misc_feature: MA Experiment 20000117 PARAMETER Experiment Name: At_100uM_ABA_Mutants_cDNA_P Parameter: Plant Line Value: Columbia
  misc_feature: MA Experiment 20000117 PARAMETER Experiment Name: At_100uM_ABA_Mutants_cDNA_P Parameter: Timepoint (hr) Value: 6
  misc_feature: MA Experiment 20000117 PARAMETER Experiment Name: At_100uM_ABA_Mutants_cDNA_P Parameter: Tissue Value: Aerial
  misc_feature: MA Experiment 20000117 PARAMETER Experiment Name: At_100uM_ABA_Mutants_cDNA_P Parameter: Treatment Value: 100uM ABA vs. No Treatment
  misc_feature: MA Experiment ID: 20000179 Result: Down-regulated in Transcription
  misc_feature: MA Experiment 20000179 PARAMETER Experiment Name: At_Germinating_Seeds_P Parameter: Age (hr) Value: 6 vs. 0
  misc_feature: MA Experiment 20000179 PARAMETER Experiment Name: At_Germinating_Seeds_P Parameter: Tissue Value: Germinating Seeds
  misc_feature: MA Experiment ID: 20000180 Result: Down-regulated in Transcription
  misc_feature: MA Experiment 20000180 PARAMETER Experiment Name: At_Germinating_Seeds_P Parameter: Age (hr) Value: 24 vs. 0
  misc_feature: MA Experiment 20000180 PARAMETER Experiment Name: At_Germinating_Seeds_P Parameter: Tissue Value: Germinating Seeds
  misc_feature: MA Experiment ID: 20000184 Result: Down-regulated in Transcription
  misc_feature: MA Experiment 20000184 PARAMETER Experiment Name: At_Shoots__P Parameter: Age (day) Value: 7
  misc_feature: MA Experiment 20000184 PARAMETER Experiment Name: At_Shoots__P Parameter: Tissue Value: Shoots vs. Whole Plant
  misc_feature: MA Experiment ID: 20000227 Result: Down-regulated in Transcription
  misc_feature: MA Experiment 20000227 PARAMETER Experiment Name: At_Root-Tips-vs-Tops_P Parameter: Tissue Value: Root Tips vs. Root Tops
  misc_feature: MA Experiment ID: 20000234 Result: Down-regulated in Transcription
  misc_feature: MA Experiment 20000234 PARAMETER Experiment Name: At_Siliques_P Parameter: Age (day) Value: 21
  misc_feature: MA Experiment 20000234 PARAMETER Experiment Name: At_Siliques_P Parameter: Organism Value: A. thaliana
  misc_feature: MA Experiment 20000234 PARAMETER Experiment Name: At_Siliques_P Parameter: Plant Line Value: WS
  misc_feature: MA Experiment 20000234 PARAMETER Experiment Name: At_Siliques_P Parameter: Tissue Value: Less Than 5mm Siliques vs. Whole Plant
  misc_feature: MA Experiment ID: 20000265 Result: Down-regulated in Transcription
  misc_feature: MA Experiment 20000265 PARAMETER Experiment Name: At_Open_Flower_P Parameter: Age (day) Value: 21
  misc_feature: MA Experiment 20000265 PARAMETER Experiment Name: At_Open_Flower_P Parameter: Plant Line Value: WS
  misc_feature: MA Experiment 20000265 PARAMETER Experiment Name: At_Open_Flower_P Parameter: Tissue Value: Closed Flower vs. Whole Plant
  misc_feature: MA Experiment ID: 20000437 Result: Up-regulated in Transcription
  misc_feature: MA Experiment 20000437 PARAMETER Experiment Name: At_Drought_P Parameter: Age (day) Value: 8
  misc_feature: MA Experiment 20000437 PARAMETER Experiment Name: At_Drought_P Parameter: Organism Value: A. thaliana
  misc_feature: MA Experiment 20000437 PARAMETER Experiment Name: At_Drought_P Parameter: Plant Line Value: WS
  misc_feature: MA Experiment 20000437 PARAMETER Experiment Name: At_Drought_P Parameter: Timepoint (hr) Value: 24
  misc_feature: MA Experiment 20000437 PARAMETER Experiment Name: At_Drought_P Parameter: Tissue Value: Whole Plant
  misc_feature: MA Experiment 20000437 PARAMETER Experiment Name: At_Drought_P Parameter: Treatment Value: Drought vs. No Drought
  misc_feature: MA Experiment ID: 20000438 Result: Down-regulated in Transcription
  misc_feature: MA Experiment 20000438 PARAMETER Experiment Name: At_Shoots__P Parameter: Age (day) Value: 14
  misc_feature: MA Experiment 20000438 PARAMETER Experiment Name: At_Shoots__P Parameter: Tissue Value: Shoots vs. Whole Plant
  misc_feature: MA Experiment ID: 20000439 Result: Up-regulated in Transcription
  misc_feature: MA Experiment 20000439 PARAMETER Experiment Name: At_Roots__P Parameter: Age (day) Value: 14 vs. 21
  misc_feature: MA Experiment 20000439 PARAMETER Experiment Name: At_Roots__P Parameter: Organism Value: A. thaliana
  misc_feature: MA Experiment 20000439 PARAMETER Experiment Name: At_Roots__P Parameter: Tissue Value: Roots vs. Whole Plant
  misc_feature: MA Experiment ID: 20000443 Result: Down-regulated in Transcription
  misc_feature: MA Experiment 20000443 PARAMETER Experiment Name: At_1uM_BR-BRZ__P Parameter: Tissue Value: Shoot Apices
  misc_feature: MA Experiment 20000443 PARAMETER Experiment Name: At_1uM_BR-BRZ__P Parameter: Treatment Value: 1uM BRZ vs. No Treatment
  misc_feature: MA Experiment ID: 20000709 Result: Up-regulated in Transcription
  misc_feature: MA Experiment 20000709 PARAMETER Experiment Name: At_15mM_NH4NO3_L-to-H_P Parameter: Age (hr) Value: 14
  misc_feature: MA Experiment 20000709 PARAMETER Experiment Name: At_15mM_NH4NO3_L-to-H_P Parameter: Organism Value: A. thaliana
  misc_feature: MA Experiment 20000709 PARAMETER Experiment Name: At_15mM_NH4NO3_L-to-H_P Parameter: Plant Line Value: WS
  misc_feature: MA Experiment 20000709 PARAMETER Experiment Name: At_15mM_NH4NO3_L-to-H_P Parameter: Timepoint (hr) Value: 4
  misc_feature: MA Experiment 20000709 PARAMETER Experiment Name: At_15mM_NH4NO3_L-to-H_P Parameter: Tissue Value: Aerial
  misc_feature: MA Experiment 20000709 PARAMETER Experiment Name: At_15mM_NH4NO3_L-to-H_P Parameter: Treatment Value: 15mM NH4NO3 vs. 30mM Mannitol
  misc_feature: MA Experiment ID: 20001247 Result: Down-regulated in Transcription
  misc_feature: MA Experiment 20001247 PARAMETER Experiment Name: At_Far-red-induction_P Parameter: Age (day) Value: 7
  misc_feature: MA Experiment 20001247 PARAMETER Experiment Name: At_Far-red-induction_P Parameter: Light Value: Far-red vs. White
  misc_feature: MA Experiment 20001247 PARAMETER Experiment Name: At_Far-red-induction_P Parameter: Organism Value: A. thaliana
  misc_feature: MA Experiment 20001247 PARAMETER Experiment Name: At_Far-red-induction_P Parameter: Plant Line Value: Columbia
  misc_feature: MA Experiment 20001247 PARAMETER Experiment Name: At_Far-red-induction_P Parameter: Timepoint (hr) Value: 1
  misc_feature: MA Experiment 20001247 PARAMETER Experiment Name: At_Far-red-induction_P Parameter: Tissue Value: Whole Plant
  misc_feature: MA Experiment ID: 20001248 Result: Up-regulated in Transcription
  misc_feature: MA Experiment 20001248 PARAMETER Experiment Name: At_Far-red-induction_P Parameter: Age (day) Value: 7
  misc_feature: MA Experiment 20001248 PARAMETER Experiment Name: At_Far-red-induction_P Parameter: Light Value: Far-red vs. White
  misc_feature: MA Experiment 20001248 PARAMETER Experiment Name: At_Far-red-induction_P Parameter: Organism Value: A. thaliana
  misc_feature: MA Experiment 20001248 PARAMETER Experiment Name: At_Far-red-induction_P Parameter: Plant Line Value: Columbia
  misc_feature: MA Experiment 20001248 PARAMETER Experiment Name: At_Far-red-induction_P Parameter: Timepoint (hr) Value: 4
  misc_feature: MA Experiment 20001248 PARAMETER Experiment Name: At_Far-red-induction_P Parameter: Tissue Value: Whole Plant
atttggttttgttgccccaaaatatcccaagaaaagatcaacttcttcttcttaccaaaactgtcggcgtcgtctcctctaagctcctcccattgaagcagaagaaggtcatcagcgtgaccgcctctgcgactattgcgactcctccgtggctcttgtctactgcaaagctgactccgccaagctctgcctcgcctgcgacaagcaagtccacgtcgccaaccaactcttcgccaaacacttcaggtcacttctctgcgactcctgcaacgaatctccctcttcccttttctgcgagactgaaaggtctgttctttgccagaactgcgactggcaacaccacactgcctcttcctcccttcatagccgcagaccctttgaaggatttaccggctgtccctccgtgcctgagttgctggccatcgttggcctcgatgacctcactctcgattccggattgctttgggagtcacctgagatcgttagcctcaacgaccttattgtttcgggcgggtccggtactcataacttccgggccacggatgttcctcctctgcctaagaatcgtcacgccacctgcgggaaatacaaagatgagatgatccgacagctccgtggactatccagatctgagcctggttgtctgaaatttgaaaccccagatgctgagatcgatgccgggttccaattcctagcgccggatttgttttctacatgcgagctggagagtggactgaaatggttctatcagcaagatcatgaggactttccatattgctctctgctaaagaacttgtcggagtcagatgagaaacctgagaatgtagaccgagagtcatcggtgatggttcccgtttccggctgcttaaaccgatgtgaggaagagactgtgatggttccggttatcactagtacaaggtcgatgacacatgagatcaacagtcttgagaggaactctgctctctctcgctacaaagaaaagaagaagtctcgaaggtacgagaaacacatcaggtatgaatcacgcaaggttcgtgcagaaagcaggacaagaatcaggggacgtttcgccaaggcagcagatccatgaatgatgatgaggttactttgataatcaaaaatcttttgtattaatcgaatcatatagtgtgtatgatcagataagtttttgtattctaagcttaggagttatcactgtatatcgaccacactctcaaaattgtcacttaagaatagttttttttttgttttgcc

SEQ ID NO: 25127 - protein, 199 aa, Arabidopsis thaliana
  peptide (1)..(199): Ceres Seq. ID no. 12384845
LVLLPQNIPRKDQLLLLTKTVGVVSSKLLPLKQKKVISVTASATIATPPWLLSTAKLTPPSSASPATSKSTSPTNSSPNTSGHFSATPATNLPLPFSARLKGLFFARTATGNTTLPLPPFIAADPLKDLPAVPPCLSCWPSLASMTSLSIPDCFGSHLRSLASTTLLFRAGPVLITSGPRMFLLCLRIVTPPAGNTKMR

SEQ ID NO: 25128 - protein, 163 aa, Arabidopsis thaliana
  peptide (1)..(163): Ceres Seq. ID no. 12384846
  misc_feature (123)..(162): Pfam Name: CCT motif Pfam Description: CCT motif
  misc_feature (118)..(162): Homolog of NCBI NO: 17433065 NR Description: Zinc finger protein constans-like 12
  misc_feature (77)..(160): Homolog of NCBI NO: 38175538 NR Description: zinc-finger protein C60910-like
  misc_feature (99)..(160): Homolog of NCBI NO: 34899270 NR Description: putative zinc-finger protein
  misc_feature (101)..(162): Homolog of NCBI NO: 15231491 NR Description: CONSTANS B-box zinc finger family protein
  misc_feature (118)..(162): Homolog of NCBI NO: 7489605 NR Description: zinc-finger protein S3574 [imported] - rice
  misc_feature (118)..(162): Homolog of NCBI NO: 15238918 NR Description: CONSTANS B-box zinc finger family protein
  misc_feature (118)..(162): Homolog of NCBI NO: 15217814 NR Description: CONSTANS B-box zinc finger family protein
  misc_feature (1)..(11): Homolog of NCBI NO: 15217814 NR Description: CONSTANS B-box zinc finger family protein
  misc_feature (44)..(163): Homolog of NCBI NO: 30685731 NR Description: CONSTANS B-box zinc finger family protein
  misc_feature (1)..(163): Homolog of NCBI NO: 15227152 NR Description: CONSTANS B-box zinc finger family protein
MIRQLRGLSRSEPGCLKFETPDAEIDAGFQFLAPDLFSTCELESGLKWFYQQDHEDFPYCSLLKNLSESDEKPENVDRESSVMVPVSGCLNRCEEETVMVPVITSTRSMTHEINSLERNSALSRYKEKKKSRRYEKHIRYESRKVRAESRTRIRGRFAKAADP

SEQ ID NO: 25129 - DNA, 1009 bp, Arabidopsis thaliana
  misc_feature (1)..(1009): Ceres Seq. ID no. 13488493
  misc_feature: MA Experiment ID: 108434 Result: Down-regulated in Transcription
  misc_feature: MA Experiment 108434 PARAMETER Experiment Name: At_Root_Tips_cDNA_P Parameter: Tissue Value: Root Tips
  misc_feature: MA Experiment ID: 108461 Result: Up-regulated in Transcription
  misc_feature: MA Experiment 108461 PARAMETER Experiment Name: At_Germinating_Seeds_cDNA_P Parameter: Age (day) Value: 1 vs. 0
  misc_feature: MA Experiment 108461 PARAMETER Experiment Name: At_Germinating_Seeds_cDNA_P Parameter: Tissue Value: Germinating Seeds
  misc_feature: MA Experiment ID: 108462 Result: Up-regulated in Transcription
  misc_feature: MA Experiment 108462 PARAMETER Experiment Name: At_Germinating_Seeds_cDNA_P Parameter: Age (day) Value: 2 vs. 0
  misc_feature: MA Experiment 108462 PARAMETER Experiment Name: At_Germinating_Seeds_cDNA_P Parameter: Tissue Value: Germinating Seeds
  misc_feature: MA Experiment ID: 108488 Result: Up-regulated in Transcription
  misc_feature: MA Experiment ID: 108594 Result: Down-regulated in Transcription
  misc_feature: MA Experiment 108594 PARAMETER Experiment Name: At_Ler-rhl_Root_cDNA_P Parameter: Plant Line Value: null
  misc_feature: MA Experiment ID: 108595 Result: Down-regulated in Transcription
  misc_feature: MA Experiment 108595 PARAMETER Experiment Name: At_Ler-pi_Ovule_cDNA_P Parameter: Plant Line Value: null
  misc_feature: MA Experiment ID: 20000090 Result: Down-regulated in Transcription
aataactcacactctctcttatctcctttcctttcattgtagttaacgaaaagattacgataatgggaacatcagctatccagcaatcctccttcgccggccaaacggctctcaagccctccaacgaactcctccgcaaggttggtgtctccggtggtggccgtgtgaccatgcgtcgtaccgtcaagtctactcctcaaagcatttggtacggaccagaccgtcccaagtacttgggaccattctcggagaacacaccgtcctacctaaccggagaataccccggagactacggctgggacaccgctggactctcggctgacccggagacattcgctaagaaccgtgagcttgaagtaatccacaacagatgggctatgttgggtgctctcggatgcacattccctgagattctctccaagaacggtgttaaattcggagaagccgtgtggttcaaggcaggctctcagattttctcagaaggaggtcttgattacctcggaaaccctaacttgatccacgcgcaaagcatcttagccatctgggctgttcaagttgtgctcatggggttcattgaaggctacagaatcggaggtggaccactcggagaaggacttgacccgctttatcccggaggtgcgttcgacccattgaacttggctgaggatccagaggctttctctgagctgaaggtgaaggagctcaagaacggtcgtcttgccatgttctctatgtttggattctttgtccaagccattgttactggtaaaggtcccattgagaacttatttgatcatttggctgatcctgtggctaacaacgcctggtcttacgctactaactttgtccccggaaagtaattatctwagattgtatttgcttccataatctctctgctttgtaaastcgtgaatgtacttattggtgttttatgatgartttggyacttaatgmbwwttattttgtgggkdcttttttttgaatcgtgatgaaagattttgtttcacag

SEQ ID NO: 25130 - protein, 265 aa, Arabidopsis thaliana
  peptide (1)..(265): Ceres Seq. ID no. 15218578
  misc_feature (64)..(232): Pfam Name: Chlorophyll A-B binding protein Pfam Description: Chlorophyll A-B binding protein
  misc_feature (64)..(232): Pfam Name: Chlorophyll A-B binding protein Pfam Description: Chlorophyll A-B binding protein
  misc_feature (1)..(265): Homolog of NCBI NO: 1345698 NR Description: Chlorophyll A-B binding protein 151, chloroplast
  misc_feature (1)..(265): Homolog of NCBI NO: 3560529 NR Description: light harvesting chlorophyll A/B binding protein
  misc_feature (1)..(265): Homolog of NCBI NO: 15232249 NR Description: light harvesting chlorophyll A/B binding protein,
  misc_feature (1)..(265): Homolog of NCBI NO: 15224465 NR Description: light-harvesting chlorophyll a/b binding protein
  misc_feature (1)..(265): Homolog of NCBI NO: 3560529 NR Description: light harvesting chlorophyll A/B binding protein
  misc_feature (1)..(265): Homolog of NCBI NO: 15224465 NR Description: light-harvesting chlorophyll a/b binding protein
  misc_feature (1)..(265): Homolog of NCBI NO: 25299029 NR Description: chlorophyll a/b-binding protein Lhcb2
  misc_feature (1)..(265): Homolog of NCBI NO: 25299022 NR Description: chlorophyll a/b-binding protein Lhcb2
  misc_feature (1)..(264): Homolog of NCBI NO: 15224471 NR Description: light-harvesting chlorophyll a/b binding protein
  misc_feature (1)..(265): Homolog of NCBI NO: 15232249 NR Description: light harvesting chlorophyll A/B binding protein,
  misc_feature (1)..(265): Homolog of NCBI NO: 1345698 NR Description: Chlorophyll A-B binding protein 151, chloroplast
  misc_feature (1)..(264): Homolog of NCBI NO: 15224471 NR Description: light-harvesting chlorophyll a/b binding protein
  misc_feature (1)..(265): Homolog of NCBI NO: 25299029 NR Description: chlorophyll a/b-binding protein Lhcb2
  misc_feature (1)..(265): Homolog of NCBI NO: 25299022 NR Description: chlorophyll a/b-binding protein Lhcb2
MGTSAIQQSSFAGQTALKPSNELLRKVGVSGGGRVTMRRTVKSTPQSIWYGPDRPKYLGPFSENTPSYLTGEYPGDYGWDTAGLSADPETFAKNRELEVIHNRWAMLGALGCTFPEILSKNGVKFGEAVWFKAGSQIFSEGGLDYLGNPNLIHAQSILAIWAVQVVLMGFIEGYRIGGGPLGEGLDPLYPGGAFDPLNLAEDPEAFSELKVKELKNGRLAMFSMFGFFVQAIVTGKGPIENLFDHLADPVANNAWSYATNFVPGK

SEQ ID NO: 25131 - protein, 229 aa, Arabidopsis thaliana
  peptide (1)..(229): Ceres Seq. ID no. 15218579
  misc_feature (28)..(196): Pfam Name: Chlorophyll A-B binding protein Pfam Description: Chlorophyll A-B binding protein
  misc_feature (28)..(196): Pfam Name: Chlorophyll A-B binding protein Pfam Description: Chlorophyll A-B binding protein
  misc_feature (1)..(229): Homolog of NCBI NO: 1345698 NR Description: Chlorophyll A-B binding protein 151, chloroplast
  misc_feature (1)..(229): Homolog of NCBI NO: 3560529 NR Description: light harvesting chlorophyll A/B binding protein
  misc_feature (1)..(229): Homolog of NCBI NO: 15232249 NR Description: light harvesting chlorophyll A/B binding protein,
  misc_feature (1)..(229): Homolog of NCBI NO: 15224465 NR Description: light-harvesting chlorophyll a/b binding protein
  misc_feature (1)..(229): Homolog of NCBI NO: 1345698 NR Description: Chlorophyll A-B binding protein 151, chloroplast
  misc_feature (1)..(229): Homolog of NCBI NO: 15232249 NR Description: light harvesting chlorophyll A/B binding protein,
  misc_feature (1)..(228): Homolog of NCBI NO: 15224471 NR Description: light-harvesting chlorophyll a/b binding protein
  misc_feature (1)..(229): Homolog of NCBI NO: 15224465 NR Description: light-harvesting chlorophyll a/b binding protein
  misc_feature (1)..(229): Homolog of NCBI NO: 3560529 NR Description: light harvesting chlorophyll A/B binding protein
  misc_feature (1)..(229): Homolog of NCBI NO: 25299022 NR Description: chlorophyll a/b-binding protein Lhcb2
  misc_feature (1)..(229): Homolog of NCBI NO: 25299029 NR Description: chlorophyll a/b-binding protein Lhcb2
  misc_feature (1)..(228): Homolog of NCBI NO: 15224471 NR Description: light-harvesting chlorophyll a/b binding protein
  misc_feature (1)..(229): Homolog of NCBI NO: 25299029 NR Description: chlorophyll a/b-binding protein Lhcb2
  misc_feature (1)..(229): Homolog of NCBI NO: 25299022 NR Description: chlorophyll a/b-binding protein Lhcb2
MRRTVKSTPQSIWYGPDRPKYLGPFSENTPSYLTGEYPGDYGWDTAGLSADPETFAKNRELEVIHNRWAMLGALGCTFPEILSKNGVKFGEAVWFKAGSQIFSEGGLDYLGNPNLIHAQSILAIWAVQVVLMGFIEGYRIGGGPLGEGLDPLYPGGAFDPLNLAEDPEAFSELKVKELKNGRLAMFSMFGFFVQAIVTGKGPIENLFDHLADPVANNAWSYATNFVPGK

SEQ ID NO: 25132 - protein, 160 aa, Arabidopsis thaliana
  peptide (1)..(160): Ceres Seq. ID no. 15218580
  misc_feature (1)..(127): Pfam Name: Chlorophyll A-B binding protein Pfam Description: Chlorophyll A-B binding protein
  misc_feature (1)..(127): Pfam Name: Chlorophyll A-B binding protein Pfam Description: Chlorophyll A-B binding protein
  misc_feature (1)..(160): Homolog of NCBI NO: 1345698 NR Description: Chlorophyll A-B binding protein 151, chloroplast
  misc_feature (1)..(160): Homolog of NCBI NO: 3560529 NR Description: light harvesting chlorophyll A/B binding protein
  misc_feature (1)..(160): Homolog of NCBI NO: 15232249 NR Description: light harvesting chlorophyll A/B binding protein,
  misc_feature (1)..(160): Homolog of NCBI NO: 15224465 NR Description: light-harvesting chlorophyll a/b binding protein
  misc_feature (1)..(160): Homolog of NCBI NO: 3560529 NR Description: light harvesting chlorophyll A/B binding protein
  misc_feature (1)..(160): Homolog of NCBI NO: 15224465 NR Description: light-harvesting chlorophyll a/b binding protein
  misc_feature (1)..(160): Homolog of NCBI NO: 25299029 NR Description: chlorophyll a/b-binding protein Lhcb2
  misc_feature (1)..(160): Homolog of NCBI NO: 25299022 NR Description: chlorophyll a/b-binding protein Lhcb2
  misc_feature (1)..(159): Homolog of NCBI NO: 15224471 NR Description: light-harvesting chlorophyll a/b binding protein
  misc_feature (1)..(160): Homolog of NCBI NO: 15232249 NR Description: light harvesting chlorophyll A/B binding protein,
  misc_feature (1)..(160): Homolog of NCBI NO: 1345698 NR Description: Chlorophyll A-B binding protein 151, chloroplast
  misc_feature (1)..(159): Homolog of NCBI NO: 15224471 NR Description: light-harvesting chlorophyll a/b binding protein
  misc_feature (1)..(160): Homolog of NCBI NO: 25299029 NR Description: chlorophyll a/b-binding protein Lhcb2
  misc_feature (1)..(160): Homolog of NCBI NO: 25299022 NR Description: chlorophyll a/b-binding protein Lhcb2
MLGALGCTFPEILSKNGVKFGEAVWFKAGSQIFSEGGLDYLGNPNLIHAQSILAIWAVQVVLMGFIEGYRIGGGPLGEGLDPLYPGGAFDPLNLAEDPEAFSELKVKELKNGRLAMFSMFGFFVQAIVTGKGPIENLFDHLADPVANNAWSYATNFVPGK

SEQ ID NO: 25133 - DNA, 1321 bp, Arabidopsis thaliana
  misc_feature (1)..(1321): Ceres Seq. ID no. 13490759
  misc_feature: MA Experiment ID: 108585 Result: Up-regulated in Transcription
  misc_feature: MA Experiment 108585 PARAMETER Experiment Name: At_5mM_NaNP_cDNA_P Parameter: Timepoint (hr) Value: 6
  misc_feature: MA Experiment 108585 PARAMETER Experiment Name: At_5mM_NaNP_cDNA_P Parameter: Tissue Value: Aerial
  misc_feature: MA Experiment 108585 PARAMETER Experiment Name: At_5mM_NaNP_cDNA_P Parameter: Treatment Value: null
  misc_feature: MA Experiment ID: 108668 Result: Up-regulated in Transcription
  misc_feature: MA Experiment 108668 PARAMETER Experiment Name: At_2mM_SA_cDNA_P Parameter: Plant Line Value: WS
  misc_feature: MA Experiment 108668 PARAMETER Experiment Name: At_2mM_SA_cDNA_P Parameter: Timepoint (hr) Value: 6
  misc_feature: MA Experiment 108668 PARAMETER Experiment Name: At_2mM_SA_cDNA_P Parameter: Treatment Value: 2mM SA vs. No Treatment
  misc_feature: MA Experiment ID: 20000182 Result: Up-regulated in Transcription
  misc_feature: MA Experiment 20000182 PARAMETER Experiment Name: At_2mM_SA_P Parameter: Age (day) Value: 14
  misc_feature: MA Experiment 20000182 PARAMETER Experiment Name: At_2mM_SA_P Parameter: Organism Value: A. thaliana
  misc_feature: MA Experiment 20000182 PARAMETER Experiment Name: At_2mM_SA_P Parameter: Plant Line Value: WS
  misc_feature: MA Experiment 20000182 PARAMETER Experiment Name: At_2mM_SA_P Parameter: Timepoint (hr) Value: 6
  misc_feature: MA Experiment 20000182 PARAMETER Experiment Name: At_2mM_SA_P Parameter: Tissue Value: Aerial
  misc_feature: MA Experiment 20000182 PARAMETER Experiment Name: At_2mM_SA_P Parameter: Treatment Value: 2mM SA vs. No Treatment
  misc_feature: MA Experiment ID: 20000184 Result: Down-regulated in Transcription
  misc_feature: MA Experiment 20000184 PARAMETER Experiment Name: At_Shoots__P Parameter: Age (day) Value: 7
  misc_feature: MA Experiment 20000184 PARAMETER Experiment Name: At_Shoots__P Parameter: Tissue Value: Shoots vs. Whole Plant
aggtcccacttttttcttttatttttcactcttcttcacatcaaatccgcgaccagagatttttctttcctttgatttttcgtttcgtttcgtttcaaatattgttcctcctgtgtgaaggaaaaacaatcttccatttcaatccgcgtcaacgcgattttcttcatgacgatgacaacagttaaagtgagcaatgtttctctaggagcaaccgatagagatctcaaggagttcttttccttttctggcgatattctgtaccttgagacgcagagcgagactgagcggactaaactggcatatgtcacttttaaggatctacaaggagctgaaactgcggttcttctctcgggagcaacgattgttgattcttcagtcattgtctctatggctcctgattaccaactgtcccctgaggctttagcttccttggaacccaaggacagcaataaatctcccaaggcaggtgactccgtgttgagaaaagccgaagatgttgtgagcagcatgcttgcaaagggctttatcctgggaaaagatgccatagctaaagccaaaagtgttgacgagaagcaccagctaacatctacagcatcagccaaagtcgcatcttttgacaagaaaattggtttcactgataagatcaacacaggcacggtggtagtgggagaaaaggtcagggaagttgatcagaagtaccaagtctcagagaaaaccaaatcagcaatcgctgcagcggagcagacagtgagcaatgcaggttcagctataatgaagaaccggtatgttctcacaggtgccacgtgggttactggagcattcaacaaagttgctaaagctgcagaagaagttggacaaaaggctaaagagaaagttggtatggctgaggaagaggataagaggaaagtggttgatgagtttgctagagttcacttgtctgaatcaccaaaggcagcttcatcaacgcaagaagccgaacgtgaatcaaaactctctgaatctcctgaagcaaagaaagattctgaacatcttgagccacaatcgaaaccattgcagcaacaatctcctccacctatggcttcagctcctgctccggctcaaccttgagatatgcaatcaaagacctttctgattcttgttgtaaacggtaaaacttggaactaatctctctcagattgttgaagatgaagattgaacttgttatttaggacgaagacttgtgttcttgtaacattggattcatggtcgatttggtaattagaccttaaaaagaaaacaattttgttcttttcgtttttcttaaacttatttaaaccgggct

SEQ ID NO: 25134 - protein, 313 aa, Arabidopsis thaliana
  peptide (1)..(313): Ceres Seq. ID no. 13490760
  misc_feature (6)..(74): Pfam Name: RNA recognition motif. (a.k.a. RRM, RBD, or RNP domain) Pfam Description: RNA recognition motif. (a.k.a. RRM, RBD, or RNP
  misc_feature (5)..(262): Homolog of NCBI NO: 15237419 NR Description: RNA recognition motif (RRM)-containing protein
  misc_feature (5)..(262): Homolog of NCBI NO: 21592997 NR Description: unknown [Arabidopsis thaliana]
  misc_feature (1)..(276): Homolog of NCBI NO: 18071362 NR Description: putative splicing regulatory protein
  misc_feature (5)..(245): Homolog of NCBI NO: 34897896 NR Description: ESTs D15336(C0474),C98053(C0474) correspond to a of the predicted gene.~Similar to Arabidopsis thaliana DNA
  misc_feature (3)..(290): Homolog of NCBI NO: 38344181 NR Description: OSJNBa0053K19.20 [Oryza sativa (japonica
  misc_feature (2)..(312): Homolog of NCBI NO: 38347069 NR Description: OSJNBa0006A01.10 [Oryza sativa (japonica
  misc_feature (3)..(279): Homolog of NCBI NO: 8809670 NR Description: gene_id:MSD23.5~pir||C71447~similar to unknown
  misc_feature (1)..(279): Homolog of NCBI NO: 30695063 NR Description: RNA recognition motif (RRM)-containing protein
  misc_feature (3)..(313): Homolog of NCBI NO: 7485085 NR Description: hypothetical protein - Arabidopsis thaliana
  misc_feature (1)..(313): Homolog of NCBI NO: 18414951 NR Description: RNA recognition motif (RRM)-containing protein
MTMTTVKVSNVSLGATDRDLKEFFSFSGDILYLETQSETERTKLAYVTFKDLQGAETAVLLSGATIVDSSVIVSMAPDYQLSPEALASLEPKDSNKSPKAGDSVLRKAEDVVSSMLAKGFILGKDAIAKAKSVDEKHQLTSTASAKVASFDKKIGFTDKINTGTVVVGEKVREVDQKYQVSEKTKSAIAAAEQTVSNAGSAIMKNRYVLTGATWVTGAFNKVAKAAEEVGQKAKEKVGMAEEEDKRKVVDEFARVHLSESPKAASSTQEAERESKLSESPEAKKDSEHLEPQSKPLQQQSPPPMASAPAPAQP

SEQ ID NO: 25135 - protein, 311 aa, Arabidopsis thaliana
  peptide (1)..(311): Ceres Seq. ID no. 13490761
  misc_feature (4)..(72): Pfam Name: RNA recognition motif. (a.k.a. RRM, RBD, or RNP domain) Pfam Description: RNA recognition motif. (a.k.a. RRM, RBD, or RNP
  misc_feature (3)..(260): Homolog of NCBI NO: 15237419 NR Description: RNA recognition motif (RRM)-containing protein
  misc_feature (3)..(260): Homolog of NCBI NO: 21592997 NR Description: unknown [Arabidopsis thaliana]
  misc_feature (1)..(274): Homolog of NCBI NO: 18071362 NR Description: putative splicing regulatory protein
  misc_feature (3)..(243): Homolog of NCBI NO: 34897896 NR Description: ESTs D15336(C0474),C98053(C0474) correspond to a of the predicted gene.~Similar to Arabidopsis thaliana DNA
  misc_feature (1)..(288): Homolog of NCBI NO: 38344181 NR Description: OSJNBa0053K19.20 [Oryza sativa (japonica
  misc_feature (1)..(310): Homolog of NCBI NO: 38347069 NR Description: OSJNBa0006A01.10 [Oryza sativa (japonica
  misc_feature (1)..(277): Homolog of NCBI NO: 8809670 NR Description: gene_id:MSD23.5~pir||C71447~similar to unknown
  misc_feature (1)..(277): Homolog of NCBI NO: 30695063 NR Description: RNA recognition motif (RRM)-containing protein
  misc_feature (1)..(311): Homolog of NCBI NO: 7485085 NR Description: hypothetical protein - Arabidopsis thaliana
  misc_feature (1)..(311): Homolog of NCBI NO: 18414951 NR Description: RNA recognition motif (RRM)-containing protein
MTTVKVSNVSLGATDRDLKEFFSFSGDILYLETQSETERTKLAYVTFKDLQGAETAVLLSGATIVDSSVIVSMAPDYQLSPEALASLEPKDSNKSPKAGDSVLRKAEDVVSSMLAKGFILGKDAIAKAKSVDEKHQLTSTASAKVASFDKKIGFTDKINTGTVVVGEKVREVDQKYQVSEKTKSAIAAAEQTVSNAGSAIMKNRYVLTGATWVTGAFNKVAKAAEEVGQKAKEKVGMAEEEDKRKVVDEFARVHLSESPKAASSTQEAERESKLSESPEAKKDSEHLEPQSKPLQQQSPPPMASAPAPAQP

SEQ ID NO: 25136 - protein, 239 aa, Arabidopsis thaliana
  peptide (1)..(239): Ceres Seq. ID no. 13490762
  misc_feature (1)..(188): Homolog of NCBI NO: 15237419 NR Description: RNA recognition motif (RRM)-containing protein
  misc_feature (1)..(188): Homolog of NCBI NO: 21592997 NR Description: unknown [Arabidopsis thaliana]
  misc_feature (1)..(202): Homolog of NCBI NO: 18071362 NR Description: putative splicing regulatory protein
  misc_feature (1)..(171): Homolog of NCBI NO: 34897896 NR Description: ESTs D15336(C0474),C98053(C0474) correspond to a of the predicted gene.~Similar to Arabidopsis thaliana DNA
  misc_feature (1)..(216): Homolog of NCBI NO: 38344181 NR Description: OSJNBa0053K19.20 [Oryza sativa (japonica
  misc_feature (1)..(238): Homolog of NCBI NO: 38347069 NR Description: OSJNBa0006A01.10 [Oryza sativa (japonica
  misc_feature (1)..(205): Homolog of NCBI NO: 8809670 NR Description: gene_id:MSD23.5~pir||C71447~similar to unknown
  misc_feature (1)..(205): Homolog of NCBI NO: 30695063 NR Description: RNA recognition motif (RRM)-containing protein
  misc_feature (1)..(239): Homolog of NCBI NO: 7485085 NR Description: hypothetical protein - Arabidopsis thaliana
  misc_feature (1)..(239): Homolog of NCBI NO: 18414951 NR Description: RNA recognition motif (RRM)-containing protein
MAPDYQLSPEALASLEPKDSNKSPKAGDSVLRKAEDVVSSMLAKGFILGKDAIAKAKSVDEKHQLTSTASAKVASFDKKIGFTDKINTGTVVVGEKVREVDQKYQVSEKTKSAIAAAEQTVSNAGSAIMKNRYVLTGATWVTGAFNKVAKAAEEVGQKAKEKVGMAEEEDKRKVVDEFARVHLSESPKAASSTQEAERESKLSESPEAKKDSEHLEPQSKPLQQQSPPPMASAPAPAQP

SEQ ID NO: 25137 - DNA, 1058 bp, Arabidopsis thaliana
  misc_feature (1)..(1058): Ceres Seq. ID no. 12561501
  misc_feature: MA Experiment ID: 108461 Result: Down-regulated in Transcription
  misc_feature: MA Experiment 108461 PARAMETER Experiment Name: At_Germinating_Seeds_cDNA_P Parameter: Age (day) Value: 1 vs. 0
  misc_feature: MA Experiment 108461 PARAMETER Experiment Name: At_Germinating_Seeds_cDNA_P Parameter: Tissue Value: Germinating Seeds
  misc_feature: MA Experiment ID: 108572 Result: Up-regulated in Transcription
  misc_feature: MA Experiment 108572 PARAMETER Experiment Name: At_Drought_cDNA_P Parameter: Timepoint (hr) Value: 1
  misc_feature: MA Experiment 108572 PARAMETER Experiment Name: At_Drought_cDNA_P Parameter: Tissue Value: Aerial
  misc_feature: MA Experiment 108572 PARAMETER Experiment Name: At_Drought_cDNA_P Parameter: Treatment Value: Drought vs. No Drought
  misc_feature: MA Experiment ID: 108576 Result: Up-regulated in Transcription
  misc_feature: MA Experiment 108576 PARAMETER Experiment Name: At_42deg_Heat_cDNA_P Parameter: Temperature (deg C) Value: 42 vs. 22
  misc_feature: MA Experiment 108576 PARAMETER Experiment Name: At_42deg_Heat_cDNA_P Parameter: Timepoint (hr) Value: 1
  misc_feature: MA Experiment 108576 PARAMETER Experiment Name: At_42deg_Heat_cDNA_P Parameter: Tissue Value: Aerial
  misc_feature: MA Experiment ID: 108577 Result: Up-regulated in Transcription
  misc_feature: MA Experiment 108577 PARAMETER Experiment Name: At_42deg_Heat_cDNA_P Parameter: Temperature (deg C) Value: 42 vs. 22
  misc_feature: MA Experiment 108577 PARAMETER Experiment Name: At_42deg_Heat_cDNA_P Parameter: Timepoint (hr) Value: 6
  misc_feature: MA Experiment 108577 PARAMETER Experiment Name: At_42deg_Heat_cDNA_P Parameter: Tissue Value: Aerial
  misc_feature: MA Experiment ID: 108595 Result: Up-regulated in Transcription
  misc_feature: MA Experiment 108595 PARAMETER Experiment Name: At_Ler-pi_Ovule_cDNA_P Parameter: Plant Line Value: null
  misc_feature: MA Experiment ID: 108607 Result: Up-regulated in Transcription
  misc_feature: MA Experiment 108607 PARAMETER Experiment Name: At_100uM_ABA_cDNA_P Parameter: Timepoint (hr) Value: 4
  misc_feature: MA Experiment 108607 PARAMETER Experiment Name: At_100uM_ABA_cDNA_P Parameter: Tissue Value: Aerial
  misc_feature: MA Experiment 108607 PARAMETER Experiment Name: At_100uM_ABA_cDNA_P Parameter: Treatment Value: 100uM ABA vs. No Treatment
  misc_feature: MA Experiment ID: 108608 Result: Up-regulated in Transcription
  misc_feature: MA Experiment 108608 PARAMETER Experiment Name: At_100uM_ABA_cDNA_P Parameter: Timepoint (hr) Value: 1
  misc_feature: MA Experiment 108608 PARAMETER Experiment Name: At_100uM_ABA_cDNA_P Parameter: Tissue Value: Aerial
  misc_feature: MA Experiment 108608 PARAMETER Experiment Name: At_100uM_ABA_cDNA_P Parameter: Treatment Value: 100uM ABA vs. No Treatment
  misc_feature: MA Experiment ID: 20000089 Result: Down-regulated in Transcription
  misc_feature: MA Experiment ID: 20000093 Result: Up-regulated in Transcription
  misc_feature: MA Experiment 20000093 PARAMETER Experiment Name: At_42deg_Heat_cDNA_P Parameter: Temperature (deg C) Value: 42 vs. 22
  misc_feature: MA Experiment 20000093 PARAMETER Experiment Name: At_42deg_Heat_cDNA_P Parameter: Timepoint (hr) Value: 0.5
  misc_feature: MA Experiment 20000093 PARAMETER Experiment Name: At_42deg_Heat_cDNA_P Parameter: Tissue Value: Aerial
  misc_feature: MA Experiment ID: 20000111 Result: Up-regulated in Transcription
  misc_feature: MA Experiment 20000111 PARAMETER Experiment Name: At_42deg_Heat_cDNA_P Parameter: Temperature (deg C) Value: 42 vs. 22
  misc_feature: MA Experiment 20000111 PARAMETER Experiment Name: At_42deg_Heat_cDNA_P Parameter: Timepoint (hr) Value: 6
  misc_feature: MA Experiment 20000111 PARAMETER Experiment Name: At_42deg_Heat_cDNA_P Parameter: Tissue Value: Aerial
  misc_feature: MA Experiment ID: 20000112 Result: Up-regulated in Transcription
  misc_feature: MA Experiment 20000112 PARAMETER Experiment Name: At_42deg_Heat_cDNA_P Parameter: Temperature (deg C) Value: 42 vs. 22
  misc_feature: MA Experiment 20000112 PARAMETER Experiment Name: At_42deg_Heat_cDNA_P Parameter: Timepoint (hr) Value: 2
  misc_feature: MA Experiment 20000112 PARAMETER Experiment Name: At_42deg_Heat_cDNA_P Parameter: Tissue Value: Aerial
  misc_feature: MA Experiment ID: 20000113 Result: Up-regulated in Transcription
  misc_feature: MA Experiment 20000113 PARAMETER Experiment Name: At_42deg_Heat_cDNA_P Parameter: Temperature (deg C) Value: 42 vs. 22
  misc_feature: MA Experiment 20000113 PARAMETER Experiment Name: At_42deg_Heat_cDNA_P Parameter: Timepoint (hr) Value: 8
  misc_feature: MA Experiment 20000113 PARAMETER Experiment Name: At_42deg_Heat_cDNA_P Parameter: Tissue Value: Aerial
  misc_feature: MA Experiment ID: 20000144 Result: Up-regulated in Transcription
  misc_feature: MA Experiment 20000144 PARAMETER Experiment Name: At_42deg_Heat_cDNA_P Parameter: Temperature (deg C) Value: 42 vs. 22
  misc_feature: MA Experiment 20000144 PARAMETER Experiment Name: At_42deg_Heat_cDNA_P Parameter: Timepoint (hr) Value: 1
  misc_feature: MA Experiment 20000144 PARAMETER Experiment Name: At_42deg_Heat_cDNA_P Parameter: Tissue Value: Aerial
  misc_feature: MA Experiment ID: 20000166 Result: Up-regulated in Transcription
  misc_feature: MA Experiment 20000166 PARAMETER Experiment Name: At_100uM_ABA_P Parameter: Age (day) Value: 14
  misc_feature: MA Experiment 20000166 PARAMETER Experiment Name: At_100uM_ABA_P Parameter: Organism Value: A. thaliana
  misc_feature: MA Experiment 20000166 PARAMETER Experiment Name: At_100uM_ABA_P Parameter: Plant Line Value: WS
  misc_feature: MA Experiment 20000166 PARAMETER Experiment Name: At_100uM_ABA_P Parameter: Timepoint (hr) Value: 1
  misc_feature: MA Experiment 20000166 PARAMETER Experiment Name: At_100uM_ABA_P Parameter: Tissue Value: Aerial
  misc_feature: MA Experiment 20000166 PARAMETER Experiment Name: At_100uM_ABA_P Parameter: Treatment Value: 100uM ABA vs. No Treatment
  misc_feature: MA Experiment ID: 20000171 Result: Up-regulated in Transcription
  misc_feature: MA Experiment 20000171 PARAMETER Experiment Name: At_42deg_Heat_P Parameter: Age (day) Value: 14
  misc_feature: MA Experiment 20000171 PARAMETER Experiment Name: At_42deg_Heat_P Parameter: Organism Value: A. thaliana
  misc_feature: MA Experiment 20000171 PARAMETER Experiment Name: At_42deg_Heat_P Parameter: Plant Line Value: WS
  misc_feature: MA Experiment 20000171 PARAMETER Experiment Name: At_42deg_Heat_P Parameter: Temperature (deg C) Value: 42 vs. 22
  misc_feature: MA Experiment 20000171 PARAMETER Experiment Name: At_42deg_Heat_P Parameter: Timepoint (hr) Value: 1
  misc_feature: MA Experiment 20000171 PARAMETER Experiment Name: At_42deg_Heat_P Parameter: Tissue Value: Aerial
  misc_feature: MA Experiment ID: 20000173 Result: Up-regulated in Transcription
  misc_feature: MA Experiment 20000173 PARAMETER Experiment Name: At_42deg_Heat_P Parameter: Age (day) Value: 14
  misc_feature: MA Experiment 20000173 PARAMETER Experiment Name: At_42deg_Heat_P Parameter: Organism Value: A. thaliana
  misc_feature: MA Experiment 20000173 PARAMETER Experiment Name: At_42deg_Heat_P Parameter: Plant Line Value: WS
  misc_feature: MA Experiment 20000173 PARAMETER Experiment Name: At_42deg_Heat_P Parameter: Temperature (deg C) Value: 42 vs. 22
  misc_feature: MA Experiment 20000173 PARAMETER Experiment Name: At_42deg_Heat_P Parameter: Timepoint (hr) Value: 6
  misc_feature: MA Experiment 20000173 PARAMETER Experiment Name: At_42deg_Heat_P Parameter: Tissue Value: Aerial
  misc_feature: MA Experiment ID: 20000234 Result: Up-regulated in Transcription
  misc_feature: MA Experiment 20000234 PARAMETER Experiment Name: At_Siliques_P Parameter: Age (day) Value: 21
  misc_feature: MA Experiment 20000234 PARAMETER Experiment Name: At_Siliques_P Parameter: Organism Value: A. thaliana
  misc_feature: MA Experiment 20000234 PARAMETER Experiment Name: At_Siliques_P Parameter: Plant Line Value: WS
  misc_feature: MA Experiment 20000234 PARAMETER Experiment Name: At_Siliques_P Parameter: Tissue Value: Less Than 5mm Siliques vs. Whole Plant
  misc_feature: MA Experiment ID: 20001248 Result: Down-regulated in Transcription
  misc_feature: MA Experiment 20001248 PARAMETER Experiment Name: At_Far-red-induction_P Parameter: Age (day) Value: 7
  misc_feature: MA Experiment 20001248 PARAMETER Experiment Name: At_Far-red-induction_P Parameter: Light Value: Far-red vs. White
  misc_feature: MA Experiment 20001248 PARAMETER Experiment Name: At_Far-red-induction_P Parameter: Organism Value: A. thaliana
  misc_feature: MA Experiment 20001248 PARAMETER Experiment Name: At_Far-red-induction_P Parameter: Plant Line Value: Columbia
  misc_feature: MA Experiment 20001248 PARAMETER Experiment Name: At_Far-red-induction_P Parameter: Timepoint (hr) Value: 4
  misc_feature: MA Experiment 20001248 PARAMETER Experiment Name: At_Far-red-induction_P Parameter: Tissue Value: Whole Plant
  misc_feature: MA Experiment ID: 20001450 Result: Down-regulated in Transcription
  misc_feature: MA Experiment 20001450 PARAMETER Experiment Name: At_Far-red-induction_P Parameter: Age (day) Value: 7
  misc_feature: MA Experiment 20001450 PARAMETER Experiment Name: At_Far-red-induction_P Parameter: Light Value: Far-red vs. White
  misc_feature: MA Experiment 20001450 PARAMETER Experiment Name: At_Far-red-induction_P Parameter: Organism Value: A. thaliana
  misc_feature: MA Experiment 20001450 PARAMETER Experiment Name: At_Far-red-induction_P Parameter: Plant Line Value: Columbia
  misc_feature: MA Experiment 20001450 PARAMETER Experiment Name: At_Far-red-induction_P Parameter: Timepoint (hr) Value: 8
  misc_feature: MA Experiment 20001450 PARAMETER Experiment Name: At_Far-red-induction_P Parameter: Tissue Value: Whole Plant
  misc_feature: MA Experiment ID: 20001554 Result: Up-regulated in Transcription
  misc_feature: MA Experiment 20001554 PARAMETER Experiment Name: At_Drought_Soil_Dry_P Parameter: Age (day) Value: 21
  misc_feature: MA Experiment 20001554 PARAMETER Experiment Name: At_Drought_Soil_Dry_P Parameter: Organism Value: A. thaliana
  misc_feature: MA Experiment 20001554 PARAMETER Experiment Name: At_Drought_Soil_Dry_P Parameter: Plant Line Value: WS
  misc_feature: MA Experiment 20001554 PARAMETER Experiment Name: At_Drought_Soil_Dry_P Parameter: Post Timepoint (hr) Value: None
  misc_feature: MA Experiment 20001554 PARAMETER Experiment Name: At_Drought_Soil_Dry_P Parameter: Post-Treatment Value: None
  misc_feature: MA Experiment 20001554 PARAMETER Experiment Name: At_Drought_Soil_Dry_P Parameter: Timepoint (day) Value: 7
  misc_feature: MA Experiment 20001554 PARAMETER Experiment Name: At_Drought_Soil_Dry_P Parameter: Treatment Value: Drought vs. No Drought
  misc_feature: MA Experiment ID: 20001555 Result: Up-regulated in Transcription
  misc_feature: MA Experiment 20001555 PARAMETER Experiment Name: At_Drought_Soil_Dry_P Parameter: Age (day) Value: 24
  misc_feature: MA Experiment 20001555 PARAMETER Experiment Name: At_Drought_Soil_Dry_P Parameter: Organism Value: A. thaliana
  misc_feature: MA Experiment 20001555 PARAMETER Experiment Name: At_Drought_Soil_Dry_P Parameter: Plant Line Value: WS
  misc_feature: MA Experiment 20001555 PARAMETER Experiment Name: At_Drought_Soil_Dry_P Parameter: Post Timepoint (hr) Value: None
  misc_feature: MA Experiment 20001555 PARAMETER Experiment Name: At_Drought_Soil_Dry_P Parameter: Post-Treatment Value: None
  misc_feature: MA Experiment 20001555 PARAMETER Experiment Name: At_Drought_Soil_Dry_P Parameter: Timepoint (day) Value: 10
  misc_feature: MA Experiment 20001555 PARAMETER Experiment Name: At_Drought_Soil_Dry_P Parameter: Treatment Value: Drought vs. No Drought
  misc_feature: MA Experiment ID: 20001556 Result: Up-regulated in Transcription
  misc_feature: MA Experiment 20001556 PARAMETER Experiment Name: At_Drought_Soil_Dry_P Parameter: Age (day) Value: 26
  misc_feature: MA Experiment 20001556 PARAMETER Experiment Name: At_Drought_Soil_Dry_P Parameter: Organism Value: A. thaliana
  misc_feature: MA Experiment 20001556 PARAMETER Experiment Name: At_Drought_Soil_Dry_P Parameter: Plant Line Value: WS
  misc_feature: MA Experiment 20001556 PARAMETER Experiment Name: At_Drought_Soil_Dry_P Parameter: Post Timepoint (hr) Value: None
  misc_feature: MA Experiment 20001556 PARAMETER Experiment Name: At_Drought_Soil_Dry_P Parameter: Post-Treatment Value: None
  misc_feature: MA Experiment 20001556 PARAMETER Experiment Name: At_Drought_Soil_Dry_P Parameter: Timepoint (day) Value: 12
  misc_feature: MA Experiment 20001556 PARAMETER Experiment Name: At_Drought_Soil_Dry_P Parameter: Treatment Value: Drought vs. No Drought
  misc_feature: MA Experiment ID: 20001558 Result: Down-regulated in Transcription
  misc_feature: MA Experiment 20001558 PARAMETER Experiment Name: At_Drought_Soil_Dry_P Parameter: Age (day) Value: 27
  misc_feature: MA Experiment 20001558 PARAMETER Experiment Name: At_Drought_Soil_Dry_P Parameter: Organism Value: A. thaliana
  misc_feature: MA Experiment 20001558 PARAMETER Experiment Name: At_Drought_Soil_Dry_P Parameter: Plant Line Value: WS
  misc_feature: MA Experiment 20001558 PARAMETER Experiment Name: At_Drought_Soil_Dry_P Parameter: Post Timepoint (hr) Value: 6
  misc_feature: MA Experiment 20001558 PARAMETER Experiment Name: At_Drought_Soil_Dry_P Parameter: Post-Treatment Value: Re-Water vs. No Drought
  misc_feature: MA Experiment 20001558 PARAMETER Experiment Name: At_Drought_Soil_Dry_P Parameter: Timepoint (day) Value: 13
  misc_feature: MA Experiment 20001558 PARAMETER Experiment Name: At_Drought_Soil_Dry_P Parameter: Treatment Value: Drought vs. No Drought
  misc_feature: MA Experiment ID: 20001559 Result: Up-regulated in Transcription
  misc_feature: MA Experiment 20001559 PARAMETER Experiment Name: At_Drought_Soil_Dry_P Parameter: Age (day) Value: 28
  misc_feature: MA Experiment 20001559 PARAMETER Experiment Name: At_Drought_Soil_Dry_P Parameter: Organism Value: A. thaliana
  misc_feature: MA Experiment 20001559 PARAMETER Experiment Name: At_Drought_Soil_Dry_P Parameter: Plant Line Value: WS
  misc_feature: MA Experiment 20001559 PARAMETER Experiment Name: At_Drought_Soil_Dry_P Parameter: Post Timepoint (hr) Value: 29
  misc_feature: MA Experiment 20001559 PARAMETER Experiment Name: At_Drought_Soil_Dry_P Parameter: Post-Treatment Value: Re-Water vs. No Drought
  misc_feature: MA Experiment 20001559 PARAMETER Experiment Name: At_Drought_Soil_Dry_P Parameter: Timepoint (day) Value: 14
  misc_feature: MA Experiment 20001559 PARAMETER Experiment Name: At_Drought_Soil_Dry_P Parameter: Treatment Value: Drought vs. No Drought
  misc_feature: MA Experiment ID: 20001906 Result: Up-regulated in Transcription
  misc_feature: MA Experiment 20001906 PARAMETER Experiment Name: At_Drought_Reproduction_P Parameter: Age (day) Value: 35
  misc_feature: MA Experiment 20001906 PARAMETER Experiment Name: At_Drought_Reproduction_P Parameter: Organism Value: A. thaliana
  misc_feature: MA Experiment 20001906 PARAMETER Experiment Name: At_Drought_Reproduction_P Parameter: Plant Line Value: WS
  misc_feature: MA Experiment 20001906 PARAMETER Experiment Name: At_Drought_Reproduction_P Parameter: Timepoint (day) Value: 5
  misc_feature: MA Experiment 20001906 PARAMETER Experiment Name: At_Drought_Reproduction_P Parameter: Tissue Value: Siliques
  misc_feature: MA Experiment 20001906 PARAMETER Experiment Name: At_Drought_Reproduction_P Parameter: Treatment Value: Drought vs. No Drought
actggtatgtctgtgtttcttcttccattttctgtttctattggaaacttctctctccaatttcgttttcttcacttctttgatcctttagctttgacaaaaccgtagtaaaggatcaaaagttatcatctttggtccatgttgtgaatcgtgctctgcttgggtcgtgactcccaaatccggatttgaaaccagcatatctgagcttaattcgagcatgcatgcgcttctttttttctgattttttttagactttggttctaaatcccttaactttggattaactgtcaatctacaattttatattaacagagatagcttagcaatggagcagtcagaagagggtcaacagcaacagcaacagggagtgatggattatgtacctcctcatgcttatcagagtgggccagtaaatgcagcttcccatatggcattccaacaagctcaccacttccaccaccaccatcagcagcaacaacagcagcagcttcagatgttctgggctaaccaaatgcaagagatcgagcataccactgatttcaagaaccacacccttcccctagcccgcatcaagaagatcatgaaagctgatgaagatgtgaggatgatctctgcggaggctcctgtgatttttgccaaggcctgtgagatgttcattttggagctcactctacgtgcttggatccacaccgaggagaacaagaggaggaccttgcagaagaacgacatcgccgctgccatttccaggaccgacgtgtttgatttccttgtggacataatcccgagggacgagctgaaagaagaaggtttaggcgtgaccaaagggaccataccatcggtggtgggttccccgccatactattacttgcaacaacaggggatgatgcaacactggccccaggagcaacaccctgatgagtcttaaaacttttcccctttcgtttgtttggttgtatcgtagtaaggtagctctgctctgctgggaaccatttctattgtgttctgtaatgacatgttagtatatccccagtctatatctatggcaatgcagtttctgt

SEQ ID NO: 25138 - protein, 199 aa, Arabidopsis thaliana
  peptide (1)..(199): Ceres Seq. ID no. 12561502
  misc_feature (1)..(180): Homolog of NCBI NO: 15242784 NR Description: transcription factor Hap5a-like protein
  misc_feature (20)..(180): Homolog of NCBI NO: 15228405 NR Description: transcription factor Hap5a
  misc_feature (9)..(181): Homolog of NCBI NO: 15221912 NR Description: heme activated protein, putative; protein id:
  misc_feature (38)..(181): Homolog of NCBI NO: 25372763 NR Description: hypothetical protein [imported] - Arabidopsis
  misc_feature (1)..(181): Homolog of NCBI NO: 6289057 NR Description: heme activated protein [Arabidopsis thaliana]
  misc_feature (1)..(181): Homolog of NCBI NO: 15223986 NR Description: putative transcription factor
  misc_feature (63)..(193): Homolog of NCBI NO: 2398533 NR Description: Transcription factor [Arabidopsis thaliana]
  misc_feature (63)..(199): Homolog of NCBI NO: 25404100 NR Description: transcription factor [imported] - Arabidopsis
  misc_feature (1)..(199): Homolog of NCBI NO: 21554704 NR Description: transcription factor, putative [Arabidopsis
  misc_feature (1)..(199): Homolog of NCBI NO: 15223482 NR Description: transcription factor, putative
MEQSEEGQQQQQQGVMDYVPPHAYQSGPVNAASHMAFQQAHHFHHHHQQQQQQQLQMFWANQMQEIEHTTDFKNHTLPLARIKKIMKADEDVRMISAEAPVIFAKACEMFILELTLRAWIHTEENKRRTLQKNDIAAAISRTDVFDFLVDIIPRDELKEEGLGVTKGTIPSVVGSPPYYYLQQQGMMQHWPQEQHPDES

SEQ ID NO: 25139 - protein, 184 aa, Arabidopsis thaliana
  peptide (1)..(184): Ceres Seq. ID no. 12561503
  misc_feature (1)..(165): Homolog of NCBI NO: 15242784 NR Description: transcription factor Hap5a-like protein
  misc_feature (5)..(165): Homolog of NCBI NO: 15228405 NR Description: transcription factor Hap5a
  misc_feature (1)..(166): Homolog of NCBI NO: 15221912 NR Description: heme activated protein, putative; protein id:
  misc_feature (23)..(166): Homolog of NCBI NO: 25372763 NR Description: hypothetical protein [imported] - Arabidopsis
  misc_feature (1)..(166): Homolog of NCBI NO: 6289057 NR Description: heme activated protein [Arabidopsis thaliana]
  misc_feature (1)..(166): Homolog of NCBI NO: 15223986 NR Description: putative transcription factor
  misc_feature (48)..(178): Homolog of NCBI NO: 2398533 NR Description: Transcription factor [Arabidopsis thaliana]
  misc_feature (48)..(184): Homolog of NCBI NO: 25404100 NR Description: transcription factor [imported] - Arabidopsis
  misc_feature (1)..(184): Homolog of NCBI NO: 21554704 NR Description: transcription factor, putative [Arabidopsis
  misc_feature (1)..(184): Homolog of NCBI NO: 15223482 NR Description: transcription factor, putative
MDYVPPHAYQSGPVNAASHMAFQQAHHFHHHHQQQQQQQLQMFWANQMQEIEHTTDFKNHTLPLARIKKIMKADEDVRMISAEAPVIFAKACEMFILELTLRAWIHTEENKRRTLQKNDIAAAISRTDVFDFLVDIIPRDELKEEGLGVTKGTIPSVVGSPPYYYLQQQGMMQHWPQEQHPDES

SEQ ID NO: 25140 - protein, 165 aa, Arabidopsis thaliana
  peptide (1)..(165): Ceres Seq. ID no. 12561504
  misc_feature (1)..(146): Homolog of NCBI NO: 15242784 NR Description: transcription factor Hap5a-like protein
  misc_feature (1)..(146): Homolog of NCBI NO: 15228405 NR Description: transcription factor Hap5a
  misc_feature (1)..(147): Homolog of NCBI NO: 15221912 NR Description: heme activated protein, putative; protein id:
  misc_feature (4)..(147): Homolog of NCBI NO: 25372763 NR Description: hypothetical protein [imported] - Arabidopsis
  misc_feature (1)..(147): Homolog of NCBI NO: 6289057 NR Description: heme activated protein [Arabidopsis thaliana]
  misc_feature (1)..(147): Homolog of NCBI NO: 15223986 NR Description: putative transcription factor
  misc_feature (29)..(159): Homolog of NCBI NO: 2398533 NR Description: Transcription factor [Arabidopsis thaliana]
  misc_feature (29)..(165): Homolog of NCBI NO: 25404100 NR Description: transcription factor [imported] - Arabidopsis
  misc_feature (1)..(165): Homolog of NCBI NO: 21554704 NR Description: transcription factor, putative [Arabidopsis
  misc_feature (1)..(165): Homolog of NCBI NO: 15223482 NR Description: transcription factor, putative
MAFQQAHHFHHHHQQQQQQQLQMFWANQMQEIEHTTDFKNHTLPLARIKKIMKADEDVRMISAEAPVIFAKACEMFILELTLRAWIHTEENKRRTLQKNDIAAAISRTDVFDFLVDIIPRDELKEEGLGVTKGTIPSVVGSPPYYYLQQQGMMQHWPQEQHPDES

SEQ ID NO: 25141 - DNA, 1406 bp, Arabidopsis thaliana
  misc_feature (1)..(1406): Ceres Seq. ID no. 12338475
  misc_feature: MA Experiment ID: 20000184 Result: Up-regulated in Transcription
  misc_feature: MA Experiment 20000184 PARAMETER Experiment Name: At_Shoots__P Parameter: Age (day) Value: 7
  misc_feature: MA Experiment 20000184 PARAMETER Experiment Name: At_Shoots__P Parameter: Tissue Value: Shoots vs. Whole Plant
  misc_feature: MA Experiment ID: 20000227 Result: Up-regulated in Transcription
  misc_feature: MA Experiment 20000227 PARAMETER Experiment Name: At_Root-Tips-vs-Tops_P Parameter: Tissue Value: Root Tips vs. Root Tops
  misc_feature: MA Experiment ID: 20000234 Result: Up-regulated in Transcription
  misc_feature: MA Experiment 20000234 PARAMETER Experiment Name: At_Siliques_P Parameter: Age (day) Value: 21
  misc_feature: MA Experiment 20000234 PARAMETER Experiment Name: At_Siliques_P Parameter: Organism Value: A. thaliana
  misc_feature: MA Experiment 20000234 PARAMETER Experiment Name: At_Siliques_P Parameter: Plant Line Value: WS
  misc_feature: MA Experiment 20000234 PARAMETER Experiment Name: At_Siliques_P Parameter: Tissue Value: Less Than 5mm Siliques vs. Whole Plant
  misc_feature: MA Experiment ID: 20001557 Result: Up-regulated in Transcription
  misc_feature: MA Experiment 20001557 PARAMETER Experiment Name: At_Drought_Soil_Dry_P Parameter: Age (day) Value: 27
  misc_feature: MA Experiment 20001557 PARAMETER Experiment Name: At_Drought_Soil_Dry_P Parameter: Organism Value: A. thaliana
  misc_feature: MA Experiment 20001557 PARAMETER Experiment Name: At_Drought_Soil_Dry_P Parameter: Plant Line Value: WS
  misc_feature: MA Experiment 20001557 PARAMETER Experiment Name: At_Drought_Soil_Dry_P Parameter: Post Timepoint (hr) Value: 3
  misc_feature: MA Experiment 20001557 PARAMETER Experiment Name: At_Drought_Soil_Dry_P Parameter: Post-Treatment Value: Re-Water vs. No Drought
  misc_feature: MA Experiment 20001557 PARAMETER Experiment Name: At_Drought_Soil_Dry_P Parameter: Timepoint (day) Value: 13
  misc_feature: MA Experiment 20001557 PARAMETER Experiment Name: At_Drought_Soil_Dry_P Parameter: Treatment Value: Drought vs. No Drought
  misc_feature: MA Experiment ID: 20001558 Result: Up-regulated in Transcription
  misc_feature: MA Experiment 20001558 PARAMETER Experiment Name: At_Drought_Soil_Dry_P Parameter: Age (day) Value: 27
  misc_feature: MA Experiment 20001558 PARAMETER Experiment Name: At_Drought_Soil_Dry_P Parameter: Organism Value: A. thaliana
  misc_feature: MA Experiment 20001558 PARAMETER Experiment Name: At_Drought_Soil_Dry_P Parameter: Plant Line Value: WS
  misc_feature: MA Experiment 20001558 PARAMETER Experiment Name: At_Drought_Soil_Dry_P Parameter: Post Timepoint (hr) Value: 6
  misc_feature: MA Experiment 20001558 PARAMETER Experiment Name: At_Drought_Soil_Dry_P Parameter: Post-Treatment Value: Re-Water vs. No Drought
  misc_feature: MA Experiment 20001558 PARAMETER Experiment Name: At_Drought_Soil_Dry_P Parameter: Timepoint (day) Value: 13
  misc_feature: MA Experiment 20001558 PARAMETER Experiment Name: At_Drought_Soil_Dry_P Parameter: Treatment Value: Drought vs. No Drought
  misc_feature: MA Experiment ID: 20001560 Result: Up-regulated in Transcription
  misc_feature: MA Experiment 20001560 PARAMETER Experiment Name: At_Drought_Soil_Dry_P Parameter: Age (day) Value: 28
  misc_feature: MA Experiment 20001560 PARAMETER Experiment Name: At_Drought_Soil_Dry_P Parameter: Organism Value: A. thaliana
  misc_feature: MA Experiment 20001560 PARAMETER Experiment Name: At_Drought_Soil_Dry_P Parameter: Plant Line Value: WS
  misc_feature: MA Experiment 20001560 PARAMETER Experiment Name: At_Drought_Soil_Dry_P Parameter: Post Timepoint (hr) Value: None
  misc_feature: MA Experiment 20001560 PARAMETER Experiment Name: At_Drought_Soil_Dry_P Parameter: Post-Treatment Value: None
  misc_feature: MA Experiment 20001560 PARAMETER Experiment Name: At_Drought_Soil_Dry_P Parameter: Timepoint (day) Value: 14
  misc_feature: MA Experiment 20001560 PARAMETER Experiment Name: At_Drought_Soil_Dry_P Parameter: Treatment Value: Drought vs. No Drought
  misc_feature: MA Experiment ID: 20001757 Result: Up-regulated in Transcription
  misc_feature: MA Experiment 20001757 PARAMETER Experiment Name: At_50mM_NH4NO3_L-to-H_P Parameter: Timepoint (hr) Value: 6
  misc_feature: MA Experiment 20001757 PARAMETER Experiment Name: At_50mM_NH4NO3_L-to-H_P Parameter: Tissue Value: Leaf
  misc_feature: MA Experiment 20001757 PARAMETER Experiment Name: At_50mM_NH4NO3_L-to-H_P Parameter: Treatment Value: 50mM NH4NO3 vs 100mM Mannitol
aaaaaaccctaatttctcaaagagtctaaagagacggagagtgagagaagagagaaacatttcgagacaaatggccgccgccgctgctcgtcctctcgtcaccatccaaaccttggatggtgacatttccaccgatcaatcctccaccgtcgtacttcccgacgtcatgacggcgccagttcgaccagacatcgttaacttcgttcacgcccaaatctccaacaacagccgtcagccatacgccgtatcgaagaaggccggtcaccagacctccgccgagtcctgcggaaccggacgtgccgtgtctcgtatccctcgtgttcccggtggtggtactcaccgtgctggtcaagctgcgttcggtaacatgtgtcgtggtggtcgtatgttcgctccaaccaagatctggcgccgctggcaccgtcgtgtcaatgtcaacatgaagcgtcacgcaatcgtctcagctatcgctgcaactgctgttcctgcgcttgtgatggctcgtggtcacaagatcgagaatgttcctgagatgcctcttgttgtgagtgactccgccgaagctgtggagaagacctcagctgcgatcaaggttttgaaacagatcggtgcttatgatgatgctgagaaggcaaagaacagcattggaatccgtcctggtaaaggtaaaatgaggaaccgtcgttacatttctaggaaaggtcctctggtggtttatggaactgaaggatctaagatagttaaggcgtttagaaaccttcctggtgttgagctttgtcatgtggagaggcttaatttgttgaagcttgctcctggtggtcaccttggtcggtttgtgatctggaccaagtctgcctttgagaagcttgagtctatctatggttcgtttgagaagccatcagagaagaagaaggggtatgtgcttcctcgtgcaaagatggtgaatgctgatcttgccaggattatcaattcagatgagattcagagtgttgtgaatccgatcaagaaggatgcgaagagggctgttcttaagaagaatccattgaagaatctcaatgtgatgttgaagttgaatccttatgctaagaccgcgaagaggatgtcactattagctgaagcacagagagttaaggctaagaaggagaagctcgccaagaagaggaaaaccgttaccaaggaggaggcgttggcaatcaaagcagcaggcaagtcgtggtacaagactatgatctccgacagtgattacaccgagtttgataacttcaccaaatggctcggtgctagccagtaataatctcgtctgctttggaacactttccatattttagtcaaaagattttggtttttttaatctgttttgtctttgggtgtctggatatcaagttgaattatgaacaagtttcacc

SEQ ID NO: 25142 - protein, 429 aa, Arabidopsis thaliana
  peptide (1)..(429): Ceres Seq. ID no. 12338476
  misc_feature (48)..(292): Pfam Name: Ribosomal protein L4/L1 family Pfam Description: Ribosomal protein L4/L1 family
  misc_feature (24)..(429): Homolog of NCBI NO: 21593543 NR Description: 60S ribosomal protein L4-B (L1) [Arabidopsis
  misc_feature (28)..(394): Homolog of NCBI NO: 1350686 NR Description: 60S RIBOSOMAL PROTEIN L4 (L1)
  misc_feature (72)..(429): Homolog of NCBI NO: 6441068 NR Description: 60S ribosomal protein L4 [Chlamydomonas sp. HS-5]
  misc_feature (123)..(429): Homolog of NCBI NO: 13605831 NR Description: AT5g02870/F9G14_180 [Arabidopsis thaliana]
  misc_feature (26)..(429): Homolog of NCBI NO: 34897236 NR Description: putative 60S ribosomal protein L1
  misc_feature (26)..(429): Homolog of NCBI NO: 34393487 NR Description: putative 60S ribosomal protein L4/L1
  misc_feature (25)..(429): Homolog of NCBI NO: 17367847 NR Description: 60S ribosomal protein L4 (L1)
  misc_feature (24)..(429): Homolog of NCBI NO: 26450328 NR Description: putative 60S ribosomal protein [Arabidopsis
  misc_feature (24)..(429): Homolog of NCBI NO: 15242558 NR Description: 60S ribosomal protein - like
  misc_feature (24)..(429): Homolog of NCBI NO: 15232723 NR Description: putative 60S ribosomal protein L1
KNPNFSKSLKRRRVREERNISRQMAAAAARPLVTIQTLDGDISTDQSSTVVLPDVMTAPVRPDIVNFVHAQISNNSRQPYAVSKKAGHQTSAESCGTGRAVSRIPRVPGGGTHRAGQAAFGNMCRGGRMFAPTKIWRRWHRRVNVNMKRHAIVSAIAATAVPALVMARGHKIENVPEMPLVVSDSAEAVEKTSAAIKVLKQIGAYDDAEKAKNSIGIRPGKGKMRNRRYISRKGPLVVYGTEGSKIVKAFRNLPGVELCHVERLNLLKLAPGGHLGRFVIWTKSAFEKLESIYGSFEKPSEKKKGYVLPRAKMVNADLARIINSDEIQSVVNPIKKDAKRAVLKKNPLKNLNVMLKLNPYAKTAKRMSLLAEAQRVKAKKEKLAKKRKTVTKEEALAIKAAGKSWYKTMISDSDYTEFDNFTKWLGASQ

SEQ ID NO: 25143 - protein, 406 aa, Arabidopsis thaliana
  peptide (1)..(406): Ceres Seq. ID no. 12338478
  misc_feature (25)..(269): Pfam Name: Ribosomal protein L4/L1 family Pfam Description: Ribosomal protein L4/L1 family
  misc_feature (5)..(371): Homolog of NCBI NO: 1350686 NR Description: 60S RIBOSOMAL PROTEIN L4 (L1)
  misc_feature (49)..(406): Homolog of NCBI NO: 6441068 NR Description: 60S ribosomal protein L4 [Chlamydomonas sp. HS-5]
  misc_feature (100)..(406): Homolog of NCBI NO: 13605831 NR Description: AT5g02870/F9G14_180 [Arabidopsis thaliana]
  misc_feature (3)..(406): Homolog of NCBI NO: 34897236 NR Description: putative 60S ribosomal protein L1
  misc_feature (3)..(406): Homolog of NCBI NO: 34393487 NR Description: putative 60S ribosomal protein L4/L1
  misc_feature (2)..(406): Homolog of NCBI NO: 17367847 NR Description: 60S ribosomal protein L4 (L1)
  misc_feature (1)..(406): Homolog of NCBI NO: 26450328 NR Description: putative 60S ribosomal protein [Arabidopsis
  misc_feature (1)..(406): Homolog of NCBI NO: 15242558 NR Description: 60S ribosomal protein - like
  misc_feature (1)..(406): Homolog of NCBI NO: 15232723 NR Description: putative 60S ribosomal protein L1
  misc_feature (1)..(406): Homolog of NCBI NO: 21593543 NR Description: 60S ribosomal protein L4-B (L1) [Arabidopsis
MAAAAARPLVTIQTLDGDISTDQSSTVVLPDVMTAPVRPDIVNFVHAQISNNSRQPYAVSKKAGHQTSAESCGTGRAVSRIPRVPGGGTHRAGQAAFGNMCRGGRMFAPTKIWRRWHRRVNVNMKRHAIVSAIAATAVPALVMARGHKIENVPEMPLVVSDSAEAVEKTSAAIKVLKQIGAYDDAEKAKNSIGIRPGKGKMRNRRYISRKGPLVVYGTEGSKIVKAFRNLPGVELCHVERLNLLKLAPGGHLGRFVIWTKSAFEKLESIYGSFEKPSEKKKGYVLPRAKMVNADLARIINSDEIQSVVNPIKKDAKRAVLKKNPLKNLNVMLKLNPYAKTAKRMSLLAEAQRVKAKKEKLAKKRKTVTKEEALAIKAAGKSWYKTMISDSDYTEFDNFTKWLGASQ

SEQ ID NO: 25144 - protein, 374 aa, Arabidopsis thaliana
  peptide (1)..(374): Ceres Seq. ID no. 12338479
  misc_feature (1)..(237): Pfam Name: Ribosomal protein L4/L1 family Pfam Description: Ribosomal protein L4/L1 family
  misc_feature (1)..(339): Homolog of NCBI NO: 1350686 NR Description: 60S RIBOSOMAL PROTEIN L4 (L1)
  misc_feature (17)..(374): Homolog of NCBI NO: 6441068 NR Description: 60S ribosomal protein L4 [Chlamydomonas sp. HS-5]
  misc_feature (68)..(374): Homolog of NCBI NO: 13605831 NR Description: AT5g02870/F9G14_180 [Arabidopsis thaliana]
  misc_feature (1)..(374): Homolog of NCBI NO: 34897236 NR Description: putative 60S ribosomal protein L1
  misc_feature (1)..(374): Homolog of NCBI NO: 34393487 NR Description: putative 60S ribosomal protein L4/L1
  misc_feature (1)..(374): Homolog of NCBI NO: 17367847 NR Description: 60S ribosomal protein L4 (L1)
  misc_feature (1)..(374): Homolog of NCBI NO: 26450328 NR Description: putative 60S ribosomal protein [Arabidopsis
  misc_feature (1)..(374): Homolog of NCBI NO: 15242558 NR Description: 60S ribosomal protein - like
  misc_feature (1)..(374): Homolog of NCBI NO: 15232723 NR Description: putative 60S ribosomal protein L1
  misc_feature (1)..(374): Homolog of NCBI NO: 21593543 NR Description: 60S ribosomal protein L4-B (L1) [Arabidopsis
MTAPVRPDIVNFVHAQISNNSRQPYAVSKKAGHQTSAESCGTGRAVSRIPRVPGGGTHRAGQAAFGNMCRGGRMFAPTKIWRRWHRRVNVNMKRHAIVSAIAATAVPALVMARGHKIENVPEMPLVVSDSAEAVEKTSAAIKVLKQIGAYDDAEKAKNSIGIRPGKGKMRNRRYISRKGPLVVYGTEGSKIVKAFRNLPGVELCHVERLNLLKLAPGGHLGRFVIWTKSAFEKLESIYGSFEKPSEKKKGYVLPRAKMVNADLARIINSDEIQSVVNPIKKDAKRAVLKKNPLKNLNVMLKLNPYAKTAKRMSLLAEAQRVKAKKEKLAKKRKTVTKEEALAIKAAGKSWYKTMISDSDYTEFDNFTKWLGASQ

SEQ ID NO: 25145 - DNA, 1183 bp, Arabidopsis thaliana
  misc_feature (1)..(1183): Ceres Seq. ID no. 13490825
  misc_feature: MA Experiment ID: 108462 Result: Up-regulated in Transcription
  misc_feature: MA Experiment 108462 PARAMETER Experiment Name: At_Germinating_Seeds_cDNA_P Parameter: Age (day) Value: 2 vs. 0
  misc_feature: MA Experiment 108462 PARAMETER Experiment Name: At_Germinating_Seeds_cDNA_P Parameter: Tissue Value: Germinating Seeds
  misc_feature: MA Experiment ID: 108463 Result: Up-regulated in Transcription
  misc_feature: MA Experiment 108463 PARAMETER Experiment Name: At_Germinating_Seeds_cDNA_P Parameter: Age (day) Value: 3 vs. 0
  misc_feature: MA Experiment 108463 PARAMETER Experiment Name: At_Germinating_Seeds_cDNA_P Parameter: Tissue Value: Germinating Seeds
  misc_feature: MA Experiment ID: 108464 Result: Up-regulated in Transcription
  misc_feature: MA Experiment 108464 PARAMETER Experiment Name: At_Germinating_Seeds_cDNA_P Parameter: Age (day) Value: 4 vs. 0
  misc_feature: MA Experiment 108464 PARAMETER Experiment Name: At_Germinating_Seeds_cDNA_P Parameter: Tissue Value: Germinating Seeds
  misc_feature: MA Experiment ID: 108594 Result: Down-regulated in Transcription
  misc_feature: MA Experiment 108594 PARAMETER Experiment Name: At_Ler-rhl_Root_cDNA_P Parameter: Plant Line Value: null
  misc_feature: MA Experiment ID: 108595 Result: Up-regulated in Transcription
  misc_feature: MA Experiment 108595 PARAMETER Experiment Name: At_Ler-pi_Ovule_cDNA_P Parameter: Plant Line Value: null
  misc_feature: MA Experiment ID: 20000171 Result: Up-regulated in Transcription
  misc_feature: MA Experiment 20000171 PARAMETER Experiment Name: At_42deg_Heat_P Parameter: Age (day) Value: 14
  misc_feature: MA Experiment 20000171 PARAMETER Experiment Name: At_42deg_Heat_P Parameter: Organism Value: A. thaliana
  misc_feature: MA Experiment 20000171 PARAMETER Experiment Name: At_42deg_Heat_P Parameter: Plant Line Value: WS
  misc_feature: MA Experiment 20000171 PARAMETER Experiment Name: At_42deg_Heat_P Parameter: Temperature (deg C) Value: 42 vs. 22
  misc_feature: MA Experiment 20000171 PARAMETER Experiment Name: At_42deg_Heat_P Parameter: Timepoint (hr) Value: 1
  misc_feature: MA Experiment 20000171 PARAMETER Experiment Name: At_42deg_Heat_P Parameter: Tissue Value: Aerial
  misc_feature: MA Experiment ID: 20000185 Result: Up-regulated in Transcription
  misc_feature: MA Experiment 20000185 PARAMETER Experiment Name: At_Roots__P Parameter: Age (day) Value: 7 vs. 21
  misc_feature: MA Experiment 20000185 PARAMETER Experiment Name: At_Roots__P Parameter: Organism Value: A. thaliana
  misc_feature: MA Experiment 20000185 PARAMETER Experiment Name: At_Roots__P Parameter: Tissue Value: Roots vs. Whole Plant
  misc_feature: MA Experiment ID: 20000227 Result: Up-regulated in Transcription
  misc_feature: MA Experiment 20000227 PARAMETER Experiment Name: At_Root-Tips-vs-Tops_P Parameter: Tissue Value: Root Tips vs. Root Tops
  misc_feature: MA Experiment ID: 20000234 Result: Down-regulated in Transcription
  misc_feature: MA Experiment 20000234 PARAMETER Experiment Name: At_Siliques_P Parameter: Age (day) Value: 21
  misc_feature: MA Experiment 20000234 PARAMETER Experiment Name: At_Siliques_P Parameter: Organism Value: A. thaliana
  misc_feature: MA Experiment 20000234 PARAMETER Experiment Name: At_Siliques_P Parameter: Plant Line Value: WS
  misc_feature: MA Experiment 20000234 PARAMETER Experiment Name: At_Siliques_P Parameter: Tissue Value: Less Than 5mm Siliques vs. Whole Plant
  misc_feature: MA Experiment ID: 20000439 Result: Up-regulated in Transcription
  misc_feature: MA Experiment 20000439 PARAMETER Experiment Name: At_Roots__P Parameter: Age (day) Value: 14 vs. 21
  misc_feature: MA Experiment 20000439 PARAMETER Experiment Name: At_Roots__P Parameter: Organism Value: A. thaliana
  misc_feature: MA Experiment 20000439 PARAMETER Experiment Name: At_Roots__P Parameter: Tissue Value: Roots vs. Whole Plant
  misc_feature: MA Experiment ID: 20000451 Result: Down-regulated in Transcription
  misc_feature: MA Experiment 20000451 PARAMETER Experiment Name: At_CS6879_Shoots-Roots_P Parameter: Age (day) Value: 14
  misc_feature: MA Experiment 20000451 PARAMETER Experiment Name: At_CS6879_Shoots-Roots_P Parameter: Organism Value: A. thaliana
  misc_feature: MA Experiment 20000451 PARAMETER Experiment Name: At_CS6879_Shoots-Roots_P Parameter: Plant Line Value: CS6879 vs. WS
  misc_feature: MA Experiment 20000451 PARAMETER Experiment Name: At_CS6879_Shoots-Roots_P Parameter: Tissue Value: Roots
  misc_feature: MA Experiment ID: 20000495 Result: Down-regulated in Transcription
  misc_feature: MA Experiment 20000495 PARAMETER Experiment Name: At_Guard_Cells_P Parameter: Harvest Date Value: 8/2/2002
  misc_feature: MA Experiment 20000495 PARAMETER Experiment Name: At_Guard_Cells_P Parameter: Organism Value: A. thaliana
  misc_feature: MA Experiment 20000495 PARAMETER Experiment Name: At_Guard_Cells_P Parameter: Tissue Value: Guard Cells vs. Leaves
  misc_feature: MA Experiment ID: 20000527 Result: Down-regulated in Transcription
  misc_feature: MA Experiment 20000527 PARAMETER Experiment Name: At_10percent_PEG_P Parameter: Age (day) Value: 20
  misc_feature: MA Experiment 20000527 PARAMETER Experiment Name: At_10percent_PEG_P Parameter: Organism Value: A. thaliana
  misc_feature: MA Experiment 20000527 PARAMETER Experiment Name: At_10percent_PEG_P Parameter: Plant Line Value: WS
  misc_feature: MA Experiment 20000527 PARAMETER Experiment Name: At_10percent_PEG_P Parameter: Timepoint (day) Value: 20
  misc_feature: MA Experiment 20000527 PARAMETER Experiment Name: At_10percent_PEG_P Parameter: Tissue Value: Whole Plant
  misc_feature: MA Experiment 20000527 PARAMETER Experiment Name: At_10percent_PEG_P Parameter: Treatment Value: 10percent PEG vs. No Treatment
  misc_feature: MA Experiment ID: 20000576 Result: Up-regulated in Transcription
  misc_feature: MA Experiment 20000576 PARAMETER Experiment Name: At_100uM_ABA_Mutants__P Parameter: Organism Value: A. thaliana
  misc_feature: MA Experiment 20000576 PARAMETER Experiment Name: At_100uM_ABA_Mutants__P Parameter: Plant Line Value: CS23
  misc_feature: MA Experiment 20000576 PARAMETER Experiment Name: At_100uM_ABA_Mutants__P Parameter: Timepoint (hr) Value: 6
  misc_feature: MA Experiment 20000576 PARAMETER Experiment Name: At_100uM_ABA_Mutants__P Parameter: Tissue Value: Whole Plant
  misc_feature: MA Experiment 20000576 PARAMETER Experiment Name: At_100uM_ABA_Mutants__P Parameter: Treatment Value: 1uM ABA vs. No Treatment
  misc_feature: MA Experiment ID: 20001904 Result: Up-regulated in Transcription
  misc_feature: MA Experiment 20001904 PARAMETER Experiment Name: At_Drought_Reproduction_P Parameter: Age (day) Value: 37
  misc_feature: MA Experiment 20001904 PARAMETER Experiment Name: At_Drought_Reproduction_P Parameter: Organism Value: A. thaliana
  misc_feature: MA Experiment 20001904 PARAMETER Experiment Name: At_Drought_Reproduction_P Parameter: Plant Line Value: WS
  misc_feature: MA Experiment 20001904 PARAMETER Experiment Name: At_Drought_Reproduction_P Parameter: Timepoint (day) Value: 7
  misc_feature: MA Experiment 20001904 PARAMETER Experiment Name: At_Drought_Reproduction_P Parameter: Tissue Value: Rosettes
  misc_feature: MA Experiment 20001904 PARAMETER Experiment Name: At_Drought_Reproduction_P Parameter: Treatment Value: Drought vs. No Drought
  misc_feature: MA Experiment ID: 20001911 Result: Up-regulated in Transcription
  misc_feature: MA Experiment 20001911 PARAMETER Experiment Name: At_Drought_Reproduction_P Parameter: Age (day) Value: 40
  misc_feature: MA Experiment 20001911 PARAMETER Experiment Name: At_Drought_Reproduction_P Parameter: Organism Value: A. thaliana
  misc_feature: MA Experiment 20001911 PARAMETER Experiment Name: At_Drought_Reproduction_P Parameter: Plant Line Value: WS
  misc_feature: MA Experiment 20001911 PARAMETER Experiment Name: At_Drought_Reproduction_P Parameter: Timepoint (day) Value: 10
  misc_feature: MA Experiment 20001911 PARAMETER Experiment Name: At_Drought_Reproduction_P Parameter: Tissue Value: Flowers
  misc_feature: MA Experiment 20001911 PARAMETER Experiment Name: At_Drought_Reproduction_P Parameter: Treatment Value: Drought vs. No Drought
agtatcatcgatcatctgtcaaaaagaggagctaataataatatggctgctttgaagatgactatctcttgtttcttgtttcttcaagtaatatattgcttgctctcttcatttgctccaacaaatgtgcaaggattgaaagttggattctacgacaaggcatgccccaaagccgagcttattgtcaaaaagtctgtcttcgaggctgtgaagaatgatcggacaattgcagctcctttgctcaggatgttcttccacgattgcttcgttaggggatgcgaagggtcggtattgctagagctaaagaacaaaaaagatgagaaaaactcaattcctaacctcacccttcgaggatttgagatcatagacaatgtcaaggcagctctagaaaaggagtgtccgggcattgtttcttgctctgatgtattggctcttgtcgctagagacgcaatggttgcgctcaatggaccgtcgtgggaggttgaaacgggacgaagagacggtctggttacaaacatcactgaggccttattaaacttaccatcaccatttaataatatcagtagccttatcactcaattccagtccaaaggcctcgacaagaaagacctcgttgtgctttcaggtgggcacacaattgggaatggacattgtccacagatcacaaaccgtctctacaacttcaccggaaaaggagatagtgacccgaacttagacacggaatacgcagtcaaactcagaggaaaatgcaagccaactgataccacaacggctctagaaatggatccaggaagctttaaaacgttcgatgaaagttacttcaagcttgtgtctcaaagaagaggattgtttcaatctgatgcagctcttttagacaatcaagaaactaagtcttatgttctcaagagtttgaatagtgatgggtctactttctttaaagactttggtgtctccatggtaaaaatgggtcggattggagttttaacgggtcaggttggggaagttcgcaagaagtgcagaatggttaattaagtatattttatatagatatgtctgtgagattgttttatgattatgtatgtgtttttccctaagaatattgtgtggagttatatgtattgtacaatggaatgttaaattgtaaaatatgtcatgttttatttatcacaaaagaaaaaattcg

SEQ ID NO: 25146 - protein, 343 aa, Arabidopsis thaliana
  peptide (1)..(343): Ceres Seq. ID no. 13490826
  misc_feature (62)..(306): Pfam Name: Peroxidase Pfam Description: Peroxidase
  misc_feature (46)..(343): Homolog of NCBI NO: 7259219 NR Description: peroxidase [Spinacia oleracea]
  misc_feature (15)..(343): Homolog of NCBI NO: 15232058 NR Description: peroxidase, putative [Arabidopsis thaliana]
  misc_feature (15)..(343): Homolog of NCBI NO: 15242237 NR Description: peroxidase, putative [Arabidopsis thaliana]
SIIDHLSKRGANNNMAALKMTISCFLFLQVIYCLLSSFAPTNVQGLKVGFYDKACPKAELIVKKSVFEAVKNDRTIAAPLLRMFFHDCFVRGCEGSVLLELKNKKDEKNSIPNLTLRGFEIIDNVKAALEKECPGIVSCSDVLALVARDAMVALNGPSWEVETGRRDGLVTNITEALLNLPSPFNNISSLITQFQSKGLDKKDLVVLSGGHTIGNGHCPQITNRLYNFTGKGDSDPNLDTEYAVKLRGKCKPTDTTTALEMDPGSFKTFDESYFKLVSQRRGLFQSDAALLDNQETKSYVLKSLNSDGSTFFKDFGVSMVKMGRIGVLTGQVGEVRKKCRMVN

SEQ ID NO: 25147 - protein, 329 aa, Arabidopsis thaliana
  peptide (1)..(329): Ceres Seq. ID no. 13490827
  misc_feature (48)..(292): Pfam Name: Peroxidase Pfam Description: Peroxidase
  misc_feature (32)..(329): Homolog of NCBI NO: 7259219 NR Description: peroxidase [Spinacia oleracea]
  misc_feature (1)..(329): Homolog of NCBI NO: 15232058 NR Description: peroxidase, putative [Arabidopsis thaliana]
  misc_feature (1)..(329): Homolog of NCBI NO: 15242237 NR Description: peroxidase, putative [Arabidopsis thaliana]
MAALKMTISCFLFLQVIYCLLSSFAPTNVQGLKVGFYDKACPKAELIVKKSVFEAVKNDRTIAAPLLRMFFHDCFVRGCEGSVLLELKNKKDEKNSIPNLTLRGFEIIDNVKAALEKECPGIVSCSDVLALVARDAMVALNGPSWEVETGRRDGLVTNITEALLNLPSPFNNISSLITQFQSKGLDKKDLVVLSGGHTIGNGHCPQITNRLYNFTGKGDSDPNLDTEYAVKLRGKCKPTDTTTALEMDPGSFKTFDESYFKLVSQRRGLFQSDAALLDNQETKSYVLKSLNSDGSTFFKDFGVSMVKMGRIGVLTGQVGEVRKKCRMVN

SEQ ID NO: 25148 - protein, 324 aa, Arabidopsis thaliana
  peptide (1)..(324): Ceres Seq. ID no. 13490828
  misc_feature (43)..(287): Pfam Name: Peroxidase Pfam Description: Peroxidase
  misc_feature (27)..(324): Homolog of NCBI NO: 7259219 NR Description: peroxidase [Spinacia oleracea]
  misc_feature (1)..(324): Homolog of NCBI NO: 15232058 NR Description: peroxidase, putative [Arabidopsis thaliana]
  misc_feature (1)..(324): Homolog of NCBI NO: 15242237 NR Description: peroxidase, putative [Arabidopsis thaliana]
MTISCFLFLQVIYCLLSSFAPTNVQGLKVGFYDKACPKAELIVKKSVFEAVKNDRTIAAPLLRMFFHDCFVRGCEGSVLLELKNKKDEKNSIPNLTLRGFEIIDNVKAALEKECPGIVSCSDVLALVARDAMVALNGPSWEVETGRRDGLVTNITEALLNLPSPFNNISSLITQFQSKGLDKKDLVVLSGGHTIGNGHCPQITNRLYNFTGKGDSDPNLDTEYAVKLRGKCKPTDTTTALEMDPGSFKTFDESYFKLVSQRRGLFQSDAALLDNQETKSYVLKSLNSDGSTFFKDFGVSMVKMGRIGVLTGQVGEVRKKCRMVN

SEQ ID NO: 25149 - DNA, 1483 bp, Arabidopsis thaliana
  misc_feature (1)..(1483): Ceres Seq. ID no. 12329362
  misc_feature: MA Experiment ID: 20000437 Result: Down-regulated in Transcription
  misc_feature: MA Experiment 20000437 PARAMETER Experiment Name: At_Drought_P Parameter: Age (day) Value: 8
  misc_feature: MA Experiment 20000437 PARAMETER Experiment Name: At_Drought_P Parameter: Organism Value: A. thaliana
  misc_feature: MA Experiment 20000437 PARAMETER Experiment Name: At_Drought_P Parameter: Plant Line Value: WS
  misc_feature: MA Experiment 20000437 PARAMETER Experiment Name: At_Drought_P Parameter: Timepoint (hr) Value: 24
  misc_feature: MA Experiment 20000437 PARAMETER Experiment Name: At_Drought_P Parameter: Tissue Value: Whole Plant
  misc_feature: MA Experiment 20000437 PARAMETER Experiment Name: At_Drought_P Parameter: Treatment Value: Drought vs. No Drought
  misc_feature: MA Experiment ID: 20001557 Result: Up-regulated in Transcription
  misc_feature: MA Experiment 20001557 PARAMETER Experiment Name: At_Drought_Soil_Dry_P Parameter: Age (day) Value: 27
  misc_feature: MA Experiment 20001557 PARAMETER Experiment Name: At_Drought_Soil_Dry_P Parameter: Organism Value: A. thaliana
  misc_feature: MA Experiment 20001557 PARAMETER Experiment Name: At_Drought_Soil_Dry_P Parameter: Plant Line Value: WS
  misc_feature: MA Experiment 20001557 PARAMETER Experiment Name: At_Drought_Soil_Dry_P Parameter: Post Timepoint (hr) Value: 3
  misc_feature: MA Experiment 20001557 PARAMETER Experiment Name: At_Drought_Soil_Dry_P Parameter: Post-Treatment Value: Re-Water vs. No Drought
  misc_feature: MA Experiment 20001557 PARAMETER Experiment Name: At_Drought_Soil_Dry_P Parameter: Timepoint (day) Value: 13
  misc_feature: MA Experiment 20001557 PARAMETER Experiment Name: At_Drought_Soil_Dry_P Parameter: Treatment Value: Drought vs. No Drought
  misc_feature: MA Experiment ID: 20001558 Result: Up-regulated in Transcription
  misc_feature: MA Experiment 20001558 PARAMETER Experiment Name: At_Drought_Soil_Dry_P Parameter: Age (day) Value: 27
  misc_feature: MA Experiment 20001558 PARAMETER Experiment Name: At_Drought_Soil_Dry_P Parameter: Organism Value: A. thaliana
  misc_feature: MA Experiment 20001558 PARAMETER Experiment Name: At_Drought_Soil_Dry_P Parameter: Plant Line Value: WS
  misc_feature: MA Experiment 20001558 PARAMETER Experiment Name: At_Drought_Soil_Dry_P Parameter: Post Timepoint (hr) Value: 6
  misc_feature: MA Experiment 20001558 PARAMETER Experiment Name: At_Drought_Soil_Dry_P Parameter: Post-Treatment Value: Re-Water vs. No Drought
  misc_feature: MA Experiment 20001558 PARAMETER Experiment Name: At_Drought_Soil_Dry_P Parameter: Timepoint (day) Value: 13
  misc_feature: MA Experiment 20001558 PARAMETER Experiment Name: At_Drought_Soil_Dry_P Parameter: Treatment Value: Drought vs. No Drought
caggaagggtttatagattaggtttttaagtcgcacctctctctctcactgccgcatcttttcttagggttcttgtttcgctatctcttaaacacaaacagctctgtccgaataatctctcttcaagtacctcttttttctgattctgtatatcgccatgaattactgatttccctctctataaacccatcaaagtaaaccaatttctcctgtgacttgtacctaactcgatcttaccagactggtgatggcgtctttgaaccctttcgatcttctaggagatgatgctgaggatccaagccagctcgctgtggctttgtctcagaaagtcgagaaagctgctgctgctgttcagcctcctaaggccgctaagttcccaaccaagccggctcctccttctcaagcagtgagggagtcgaggaatgctcctcaaggaggtcgtggtgggactggtggacgtggtggattttcccgtggcaggggtaatggtggatacaaccgggacaacaggaacaatgatgctcctggaaatgagaatggattttctggaggatacaggagaccttctgaagatgctgatggagcaagccgtggtgggtctgttggtggataccgtgttggcggtggtcgtgaaggacctcgccgtggtggagttgccaacggggaatctggtgatgttgaacgcccaccgaggaattatgaccgccatagcaggacaggtcatggtactggcatgaaacgtaatggtggaggtcgtggaaactggggcactactgaagatgatatccctccaacgtctgaggaacctaccacagaggttgagaagagccctgttgctgagaagcaaggaggtgaggatgaaacccctgaagcaaagaaagaactcactgcggaagagaaagcacagaaagaagctgaagaagctgaagccagggagatgactctagaagagtatgagaaaattctggaggagaagaagaaggctctgcaagccacaaaggttgaggaaaggaaagttgacaccaaagtgtttgagtccatgcaacagctctctaacaagaagaacaccgatgaagaaatcttcatcaagctgggatctgacaaggaaaaacgcaaagatgctactgagaaggccaaaaagtcgttgagcattaatgagttcttgaagccggctgatggaaagaggtacaacgggagaggtggaggctcccgcggaagaggaggtcgcggtggtcgtggtgaaggaggaaaccaaaggtatgcaaaagaagctgcagctccggcgattggagacacagctcagttcccttcgttgggctagtaaagacccctggtccttcagcctcgctatctctgtctttcgtttctctttggttgaattttgttagttttataattttttgttacactttctgaaggtcttttctgcgaaactattacgttttttaagttatgaaaaaaattattaagatatttttctctc

SEQ ID NO: 25150 - protein, 357 aa, Arabidopsis thaliana
  peptide (1)..(357): Ceres Seq. ID no. 12329363
  misc_feature (131)..(303): Pfam Name: Hyaluronan / mRNA binding family Pfam Description: Hyaluronan / mRNA binding family
  misc_feature (131)..(303): Pfam Name: Hyaluronan / mRNA binding family Pfam Description: Hyaluronan / mRNA binding family
  misc_feature (1)..(357): Homolog of NCBI NO: 7488863 NR Description: probable transcription factor - fava bean
  misc_feature (1)..(357): Homolog of NCBI NO: 6492266 NR Description: nuclear RNA binding protein A [Spinacia oleracea]
  misc_feature (1)..(357): Homolog of NCBI NO: 34910712 NR Description: putative nuclear RNA binding protein A
  misc_feature (1)..(357): Homolog of NCBI NO: 21537052 NR Description: nuclear antigen homolog [Arabidopsis thaliana]
  misc_feature (1)..(357): Homolog of NCBI NO: 15235894 NR Description: nuclear antigen homolog
  misc_feature (1)..(357): Homolog of NCBI NO: 7488863 NR Description: probable transcription factor - fava bean
  misc_feature (1)..(357): Homolog of NCBI NO: 34910712 NR Description: putative nuclear RNA binding protein A
  misc_feature (1)..(357): Homolog of NCBI NO: 15235894 NR Description: nuclear antigen homolog
  misc_feature (1)..(357): Homolog of NCBI NO: 15238039 NR Description: putative protein
  misc_feature (1)..(357): Homolog of NCBI NO: 21553991 NR Description: nuclear RNA binding protein A-like protein
  misc_feature (1)..(337): Homolog of NCBI NO: 15236552 NR Description: nuclear RNA binding protein A-like protein
  misc_feature (1)..(337): Homolog of NCBI NO: 21593013 NR Description: nuclear RNA binding protein A-like protein
  misc_feature (1)..(357): Homolog of NCBI NO: 39725278 NR Description: salt tolerance protein 2 [Beta vulgaris]
  misc_feature (1)..(357): Homolog of NCBI NO: 21537052 NR Description: nuclear antigen homolog [Arabidopsis thaliana]
  misc_feature (1)..(357): Homolog of NCBI NO: 6492266 NR Description: nuclear RNA binding protein A [Spinacia oleracea]
  misc_feature (1)..(357): Homolog of NCBI NO: 39725278 NR Description: salt tolerance protein 2 [Beta vulgaris]
  misc_feature (1)..(337): Homolog of NCBI NO: 21593013 NR Description: nuclear RNA binding protein A-like protein
  misc_feature (1)..(337): Homolog of NCBI NO: 15236552 NR Description: nuclear RNA binding protein A-like protein
  misc_feature (1)..(357): Homolog of NCBI NO: 21553991 NR Description: nuclear RNA binding protein A-like protein
  misc_feature (1)..(357): Homolog of NCBI NO: 15238039 NR Description: putative protein
MASLNPFDLLGDDAEDPSQLAVALSQKVEKAAAAVQPPKAAKFPTKPAPPSQAVRESRNAPQGGRGGTGGRGGFSRGRGNGGYNRDNRNNDAPGNENGFSGGYRRPSEDADGASRGGSVGGYRVGGGREGPRRGGVANGESGDVERPPRNYDRHSRTGHGTGMKRNGGGRGNWGTTEDDIPPTSEEPTTEVEKSPVAEKQGGEDETPEAKKELTAEEKAQKEAEEAEAREMTLEEYEKILEEKKKALQATKVEERKVDTKVFESMQQLSNKKNTDEEIFIKLGSDKEKRKDATEKAKKSLSINEFLKPADGKRYNGRGGGSRGRGGRGGRGEGGNQRYAKEAAAPAIGDTAQFPSLG

SEQ ID NO: 25151 - protein, 195 aa, Arabidopsis thaliana; identical to SEQ ID NO: 24160
  peptide (1)..(195): Ceres Seq. ID no. 12329364
  misc_feature (1)..(141): Pfam Name: Hyaluronan / mRNA binding family Pfam Description: Hyaluronan / mRNA binding family
  misc_feature (1)..(141): Pfam Name: Hyaluronan / mRNA binding family Pfam Description: Hyaluronan / mRNA binding family
  misc_feature (1)..(195): Homolog of NCBI NO: 7488863 NR Description: probable transcription factor - fava bean
  misc_feature (1)..(195): Homolog of NCBI NO: 6492266 NR Description: nuclear RNA binding protein A [Spinacia oleracea]
  misc_feature (1)..(195): Homolog of NCBI NO: 34910712 NR Description: putative nuclear RNA binding protein A
  misc_feature (1)..(195): Homolog of NCBI NO: 21537052 NR Description: nuclear antigen homolog [Arabidopsis thaliana]
  misc_feature (1)..(195): Homolog of NCBI NO: 15235894 NR Description: nuclear antigen homolog
  misc_feature (1)..(195): Homolog of NCBI NO: 7488863 NR Description: probable transcription factor - fava bean
  misc_feature (1)..(195): Homolog of NCBI NO: 34910712 NR Description: putative nuclear RNA binding protein A
  misc_feature (1)..(195): Homolog of NCBI NO: 15235894 NR Description: nuclear antigen homolog
  misc_feature (1)..(195): Homolog of NCBI NO: 15238039 NR Description: putative protein
  misc_feature (1)..(195): Homolog of NCBI NO: 21553991 NR Description: nuclear RNA binding protein A-like protein
  misc_feature (1)..(175): Homolog of NCBI NO: 15236552 NR Description: nuclear RNA binding protein A-like protein
  misc_feature (1)..(175): Homolog of NCBI NO: 21593013 NR Description: nuclear RNA binding protein A-like protein
  misc_feature (1)..(195): Homolog of NCBI NO: 39725278 NR Description: salt tolerance protein 2 [Beta vulgaris]
  misc_feature (1)..(195): Homolog of NCBI NO: 21537052 NR Description: nuclear antigen homolog [Arabidopsis thaliana]
  misc_feature (1)..(195): Homolog of NCBI NO: 6492266 NR Description: nuclear RNA binding protein A [Spinacia oleracea]
  misc_feature (1)..(195): Homolog of NCBI NO: 39725278 NR Description: salt tolerance protein 2 [Beta vulgaris]
  misc_feature (1)..(175): Homolog of NCBI NO: 21593013 NR Description: nuclear RNA binding protein A-like protein
  misc_feature (1)..(175): Homolog of NCBI NO: 15236552 NR Description: nuclear RNA binding protein A-like protein
  misc_feature (1)..(195): Homolog of NCBI NO: 21553991 NR Description: nuclear RNA binding protein A-like protein
  misc_feature (1)..(195): Homolog of NCBI NO: 15238039 NR Description: putative protein

SEQ ID NO: 25152 - DNA, 1398 bp, Arabidopsis thaliana
  misc_feature (1)..(1398): Ceres Seq. ID no. 12324536
  misc_feature: MA Experiment ID: 108474 Result: Down-regulated in Transcription
  misc_feature: MA Experiment 108474 PARAMETER Experiment Name: At_Drought_Flowers_cDNA_P Parameter: Timepoint (hr) Value: null
  misc_feature: MA Experiment 108474 PARAMETER Experiment Name: At_Drought_Flowers_cDNA_P Parameter: Treatment Value: Drought vs. No Drought
  misc_feature: MA Experiment ID: 108488 Result: Down-regulated in Transcription
  misc_feature: MA Experiment ID: 108573 Result: Up-regulated in Transcription
  misc_feature: MA Experiment 108573 PARAMETER Experiment Name: At_Drought_cDNA_P Parameter: Timepoint (hr) Value: 6
  misc_feature: MA Experiment 108573 PARAMETER Experiment Name: At_Drought_cDNA_P Parameter: Tissue Value: Aerial
  misc_feature: MA Experiment 108573 PARAMETER Experiment Name: At_Drought_cDNA_P Parameter: Treatment Value: Drought vs. No Drought
  misc_feature: MA Experiment ID: 20000184 Result: Down-regulated in Transcription
  misc_feature: MA Experiment 20000184 PARAMETER Experiment Name: At_Shoots__P Parameter: Age (day) Value: 7
  misc_feature: MA Experiment 20000184 PARAMETER Experiment Name: At_Shoots__P Parameter: Tissue Value: Shoots vs. Whole Plant
  misc_feature: MA Experiment ID: 20000794 Result: Up-regulated in Transcription
  misc_feature: MA Experiment 20000794 PARAMETER Experiment Name: At_Petals_P Parameter: Age (day) Value: 23-25 days
  misc_feature: MA Experiment 20000794 PARAMETER Experiment Name: At_Petals_P Parameter: Plant Line Value: WS
  misc_feature: MA Experiment 20000794 PARAMETER Experiment Name: At_Petals_P Parameter: Tissue Value: Petals vs. Whole plant
  misc_feature: MA Experiment ID: 20001905 Result: Up-regulated in Transcription
  misc_feature: MA Experiment 20001905 PARAMETER Experiment Name: At_Drought_Reproduction_P Parameter: Age (day) Value: 40
  misc_feature: MA Experiment 20001905 PARAMETER Experiment Name: At_Drought_Reproduction_P Parameter: Organism Value: A. thaliana
  misc_feature: MA Experiment 20001905 PARAMETER Experiment Name: At_Drought_Reproduction_P Parameter: Plant Line Value: WS
  misc_feature: MA Experiment 20001905 PARAMETER Experiment Name: At_Drought_Reproduction_P Parameter: Timepoint (day) Value: 10
  misc_feature: MA Experiment 20001905 PARAMETER Experiment Name: At_Drought_Reproduction_P Parameter: Tissue Value: Rosettes
  misc_feature: MA Experiment 20001905 PARAMETER Experiment Name: At_Drought_Reproduction_P Parameter: Treatment Value: Drought vs. No Drought
atagatacgcattggttttttcttttttgaagattctcgcttcttactacatgtgtatcaatcgatctctacccagattctccggaggagctttgagtcttgtcgtatagatgcagtgaaggtcctttgttagatgggaaaacttgttcttgagttgtcaaaagagaatcagttggagactaccgattgtggagtcagtgatcacggttctccacctatcaagaatgaagaacatgaggcaccacgttacagttcagacaaagacacgggtttaccaacttgccgtgtatgccagtgtgcagaatctgatagaagaggagatgctgctttagggtttttgggaattactcctccggtttcagaacctcgtagaagcaatgcgggtgaagaaaccgttgatcagagaagctcggttgtcaaatctagcggattcatcgaactgataagtcctgatggagaagtttttgtttgtgcaaacgacgatatagaaatgggagcgtggcagcatcgagataagttgctagaacttggatgttcttgcaagaatgatctcgctttggtacactatgcttgtgcattgaaatggtttgtcaaccacggatcaactgtttgtgagatatgcggaaaaaccacggagaatataagaacagttgatttcaacaaagtggttatcgccttaaaagattacgcagcgctaagagaaagaacagcggatggagatccaaatcctgtagtggttaacaacaacaccagttcgtcagggattgatcctgatgcagttgcagccattcgaaggcaacgacttagtgagatatcgttatggtttggtcctcattgttcaaccaacaacaacaatagtagtaattccgctgctgcagggacggcttcttctcaggttacatctgaacaacctgtgggtatagtaaactttgatatcttgcctatggaaagccgtgcgactaaatgggcggtggaaggtaccggaatactacttgcaaccggattactcacagttactttggcttggctcattgctcctcgtgtcggaaagagaactgcaaagagtggtctacacatacttctaggtggtctctgtgctttaacagtagtcatcttcttcagattcgttgtgctgacaagaatcaggtacggaccagcacgttactgggcaatattgttcgccttctggtttcttgtgtttggcatttgggcttcacgttcacacgcttctcactcctccacatgataaattctccatcatccttcaagacacaaaatgtactctttttggtctctgtcaatatcatgtacgttattctctttcaagacacaaaatgtacaattaattactcttatcaaaaagaaaaaaaggggtgaaactgaatgttatcatctcac

SEQ ID NO: 25153 - protein, 370 aa, Arabidopsis thaliana
  peptide (1)..(370): Ceres Seq. ID no. 12324537
  misc_feature (112)..(163): Pfam Name: Zinc finger, C3HC4 type (RING finger) Pfam Description: Zinc finger, C3HC4 type (RING finger)
  misc_feature (128)..(195): Homolog of NCBI NO: 29725746 NR Description: hypothetical protein [Arabidopsis thaliana]
  misc_feature (33)..(360): Homolog of NCBI NO: 38567835 NR Description: OSJNBb0020J19.13 [Oryza sativa (japonica
  misc_feature (8)..(313): Homolog of NCBI NO: 10177059 NR Description: gb|AAD32776.1~gene_id:MBK5.26~similar to unknown
  misc_feature (8)..(369): Homolog of NCBI NO: 30697894 NR Description: zinc finger (C3HC4-type RING finger) protein
  misc_feature (8)..(370): Homolog of NCBI NO: 16209722 NR Description: AT5g63780/MBK5_26 [Arabidopsis thaliana]
  misc_feature (8)..(370): Homolog of NCBI NO: 18415916 NR Description: Expressed protein
MGKLVLELSKENQLETTDCGVSDHGSPPIKNEEHEAPRYSSDKDTGLPTCRVCQCAESDRRGDAALGFLGITPPVSEPRRSNAGEETVDQRSSVVKSSGFIELISPDGEVFVCANDDIEMGAWQHRDKLLELGCSCKNDLALVHYACALKWFVNHGSTVCEICGKTTENIRTVDFNKVVIALKDYAALRERTADGDPNPVVVNNNTSSSGIDPDAVAAIRRQRLSEISLWFGPHCSTNNNNSSNSAAAGTASSQVTSEQPVGIVNFDILPMESRATKWAVEGTGILLATGLLTVTLAWLIAPRVGKRTAKSGLHILLGGLCALTVVIFFRFVVLTRIRYGPARYWAILFAFWFLVFGIWASRSHASHSST

SEQ ID NO: 25154 - protein, 251 aa, Arabidopsis thaliana
  peptide (1)..(251): Ceres Seq. ID no. 12324538
  misc_feature (1)..(44): Pfam Name: Zinc finger, C3HC4 type (RING finger) Pfam Description: Zinc finger, C3HC4 type (RING finger)
  misc_feature (9)..(76): Homolog of NCBI NO: 29725746 NR Description: hypothetical protein [Arabidopsis thaliana]
  misc_feature (1)..(241): Homolog of NCBI NO: 38567835 NR Description: OSJNBb0020J19.13 [Oryza sativa (japonica
  misc_feature (1)..(194): Homolog of NCBI NO: 10177059 NR Description: gb|AAD32776.1~gene_id:MBK5.26~similar to unknown
  misc_feature (1)..(250): Homolog of NCBI NO: 30697894 NR Description: zinc finger (C3HC4-type RING finger) protein
  misc_feature (1)..(251): Homolog of NCBI NO: 16209722 NR Description: AT5g63780/MBK5_26 [Arabidopsis thaliana]
  misc_feature (1)..(251): Homolog of NCBI NO: 18415916 NR Description: Expressed protein
MGAWQHRDKLLELGCSCKNDLALVHYACALKWFVNHGSTVCEICGKTTENIRTVDFNKVVIALKDYAALRERTADGDPNPVVVNNNTSSSGIDPDAVAAIRRQRLSEISLWFGPHCSTNNNNSSNSAAAGTASSQVTSEQPVGIVNFDILPMESRATKWAVEGTGILLATGLLTVTLAWLIAPRVGKRTAKSGLHILLGGLCALTVVIFFRFVVLTRIRYGPARYWAILFAFWFLVFGIWASRSHASHSST

SEQ ID NO: 25155 - DNA, 1253 bp, Arabidopsis thaliana
  misc_feature (1)..(1253): Ceres Seq. ID no. 12483453
  misc_feature: MA Experiment ID: 108433 Result: Up-regulated in Transcription
  misc_feature: MA Experiment 108433 PARAMETER Experiment Name: At_rhl_Mutant2_cDNA_P Parameter: Age (day) Value: 7
  misc_feature: MA Experiment 108433 PARAMETER Experiment Name: At_rhl_Mutant2_cDNA_P Parameter: Organism Value: A. thaliana
  misc_feature: MA Experiment 108433 PARAMETER Experiment Name: At_rhl_Mutant2_cDNA_P Parameter: Plant Line Value: rhl Mutant vs. wt landsburg
  misc_feature: MA Experiment 108433 PARAMETER Experiment Name: At_rhl_Mutant2_cDNA_P Parameter: Tissue Value: Roots
  misc_feature: MA Experiment ID: 108488 Result: Down-regulated in Transcription
  misc_feature: MA Experiment ID: 108577 Result: Down-regulated in Transcription
  misc_feature: MA Experiment 108577 PARAMETER Experiment Name: At_42deg_Heat_cDNA_P Parameter: Temperature (deg C) Value: 42 vs. 22
  misc_feature: MA Experiment 108577 PARAMETER Experiment Name: At_42deg_Heat_cDNA_P Parameter: Timepoint (hr) Value: 6
  misc_feature: MA Experiment 108577 PARAMETER Experiment Name: At_42deg_Heat_cDNA_P Parameter: Tissue Value: Aerial
  misc_feature: MA Experiment ID: 20000069 Result: Up-regulated in Transcription
  misc_feature: MA Experiment 20000069 PARAMETER Experiment Name: At_100uM_ABA_Mutants_cDNA_P Parameter: Plant Line Value: CS23
  misc_feature: MA Experiment 20000069 PARAMETER Experiment Name: At_100uM_ABA_Mutants_cDNA_P Parameter: Timepoint (hr) Value: 6
  misc_feature: MA Experiment 20000069 PARAMETER Experiment Name: At_100uM_ABA_Mutants_cDNA_P Parameter: Tissue Value: Aerial
  misc_feature: MA Experiment 20000069 PARAMETER Experiment Name: At_100uM_ABA_Mutants_cDNA_P Parameter: Treatment Value: 100uM ABA vs. No Treatment
  misc_feature: MA Experiment ID: 20000072 Result: Up-regulated in Transcription
  misc_feature: MA Experiment 20000072 PARAMETER Experiment Name: At_100uM_ABA_Mutants_cDNA_P Parameter: Plant Line Value: CS8105
  misc_feature: MA Experiment 20000072 PARAMETER Experiment Name: At_100uM_ABA_Mutants_cDNA_P Parameter: Timepoint (hr) Value: 6
  misc_feature: MA Experiment 20000072 PARAMETER Experiment Name: At_100uM_ABA_Mutants_cDNA_P Parameter: Tissue Value: Aerial
  misc_feature: MA Experiment 20000072 PARAMETER Experiment Name: At_100uM_ABA_Mutants_cDNA_P Parameter: Treatment Value: 100uM ABA vs. No Treatment
  misc_feature: MA Experiment ID: 20000086 Result: Up-regulated in Transcription
  misc_feature: MA Experiment 20000086 PARAMETER Experiment Name: At_100uM_ABA_Mutants_cDNA_P Parameter: Plant Line Value: CS22
  misc_feature: MA Experiment 20000086 PARAMETER Experiment Name: At_100uM_ABA_Mutants_cDNA_P Parameter: Timepoint (hr) Value: 6
  misc_feature: MA Experiment 20000086 PARAMETER Experiment Name: At_100uM_ABA_Mutants_cDNA_P Parameter: Tissue Value: Aerial
  misc_feature: MA Experiment 20000086 PARAMETER Experiment Name: At_100uM_ABA_Mutants_cDNA_P Parameter: Treatment Value: 100uM ABA vs. No Treatment
  misc_feature: MA Experiment ID: 20000088 Result: Up-regulated in Transcription
  misc_feature: MA Experiment 20000088 PARAMETER Experiment Name: At_100uM_ABA_Mutants_cDNA_P Parameter: Plant Line Value: Landsberg
  misc_feature: MA Experiment 20000088 PARAMETER Experiment Name: At_100uM_ABA_Mutants_cDNA_P Parameter: Timepoint (hr) Value: 6
  misc_feature: MA Experiment 20000088 PARAMETER Experiment Name: At_100uM_ABA_Mutants_cDNA_P Parameter: Tissue Value: Aerial
  misc_feature: MA Experiment 20000088 PARAMETER Experiment Name: At_100uM_ABA_Mutants_cDNA_P Parameter: Treatment Value: 100uM ABA vs. No Treatment
  misc_feature: MA Experiment ID: 20000234 Result: Down-regulated in Transcription
  misc_feature: MA Experiment 20000234 PARAMETER Experiment Name: At_Siliques_P Parameter: Age (day) Value: 21
  misc_feature: MA Experiment 20000234 PARAMETER Experiment Name: At_Siliques_P Parameter: Organism Value: A. thaliana
  misc_feature: MA Experiment 20000234 PARAMETER Experiment Name: At_Siliques_P Parameter: Plant Line Value: WS
  misc_feature: MA Experiment 20000234 PARAMETER Experiment Name: At_Siliques_P Parameter: Tissue Value: Less Than 5mm Siliques vs. Whole Plant
  misc_feature: MA Experiment ID: 20001558 Result: Down-regulated in Transcription
  misc_feature: MA Experiment 20001558 PARAMETER Experiment Name: At_Drought_Soil_Dry_P Parameter: Age (day) Value: 27
  misc_feature: MA Experiment 20001558 PARAMETER Experiment Name: At_Drought_Soil_Dry_P Parameter: Organism Value: A. thaliana
  misc_feature: MA Experiment 20001558 PARAMETER Experiment Name: At_Drought_Soil_Dry_P Parameter: Plant Line Value: WS
  misc_feature: MA Experiment 20001558 PARAMETER Experiment Name: At_Drought_Soil_Dry_P Parameter: Post Timepoint (hr) Value: 6
  misc_feature: MA Experiment 20001558 PARAMETER Experiment Name: At_Drought_Soil_Dry_P Parameter: Post-Treatment Value: Re-Water vs. No Drought
  misc_feature: MA Experiment 20001558 PARAMETER Experiment Name: At_Drought_Soil_Dry_P Parameter: Timepoint (day) Value: 13
  misc_feature: MA Experiment 20001558 PARAMETER Experiment Name: At_Drought_Soil_Dry_P Parameter: Treatment Value: Drought vs. No Drought
gatttagccatggtgagctcaattttctcttgtttctgttttaagtttttcgattttgaagctttcttctcgaaaatttcgattgcctgctagtcgatttcgagttcaaatccgtttgcttctcttttggataacgattctcgctcgtttagatagatctggagatgatttcagatactcgatctttggtagttgtagtgtgtgatcggattagagatccgattaaagaactcgtaactttgttgttctgcttcttcgctagtttatctgaaatcaggaagaatctgctgtttttcacttcaagttcaaatcaagtgttaaattctacgaatttttgactttttcatcagtgtttgtcaattgttcgatctatgttgtgcttcttgcctcttgatgtgtcaaaattgaagtcaaaatcgttctacaaagttgtgaggagctacttagcttctcttccttgtgatgttaacaatgttagagatgatgataatattatccaatttctgtgttaagttgtgatctttgttttagaaaatgtgtttttgaagagatgtgcatcttctcagtgttttgttatgtgtattgatatgataacaggcaaacgcggcatcgggaatggctgtgcatgatgattgcaagctgaaatttatggaactgaaggcgaaaagaacattccgtaccatagtctacaagattgaggataagcaagtgattgtagagaaactcggtgaacctgaacaatcatatgatgactttgcagctagtcttccagctgatgattgccgatattgcatttacgatttcgactttgtcactgcggagaactgccagaagagcaagatcttcttcattgcatggtctccggacactgccaaagtgagagacaagatgatttacgcgagctctaaagataggttcaagagagaactagatggaattcaagtggaacttcaagctactgatccaacagaaatgggtcttgatgttttcaaaagccgcaccaactaagtaaaacaaaaccctgtaagggcatttgaataagtttggtttctggagtgaatatgtttcctctgactgttatgaaaactttttaacaccttcaacttcattctacttggtattattttatgtctttgatgtgttatgtgtgccttgtgatggttttcaattagttttacatgtacaatacttgaaatcagattgttgctaggcttcaagccttgtctcagttatctatctgataatttattcgc

SEQ ID NO: 25156 - protein, 130 aa, Arabidopsis thaliana
  peptide (1)..(130): Ceres Seq. ID no. 12483454
  misc_feature (5)..(130): Pfam Name: Cofilin/tropomyosin-type actin-binding protein Pfam Description: Cofilin/tropomyosin-type actin-binding protein
  misc_feature (1)..(130): Homolog of NCBI NO: 30697303 NR Description: actin depolymerizing factor 4 - like protein
  misc_feature (1)..(130): Homolog of NCBI NO: 30697295 NR Description: actin depolymerizing factor 3 - like protein
  misc_feature (1)..(130): Homolog of NCBI NO: 17366768 NR Description: Actin-depolymerizing factor 1 (ADF 1)
  misc_feature (1)..(130): Homolog of NCBI NO: 4185511 NR Description: actin depolymerizing factor 4 [Arabidopsis
  misc_feature (1)..(128): Homolog of NCBI NO: 17366765 NR Description: Actin-depolymerizing factor 2 (ADF 2)
  misc_feature (1)..(128): Homolog of NCBI NO: 22857914 NR Description: pollen specific actin-depolymerizing factor 2
  misc_feature (1)..(130): Homolog of NCBI NO: 15231309 NR Description: actin depolymerizing factor 1 (ADF1)
  misc_feature (1)..(130): Homolog of NCBI NO: 30697300 NR Description: actin depolymerizing factor 4 - like protein
  misc_feature (1)..(130): Homolog of NCBI NO: 11276987 NR Description: actin depolymerizing factor 2 - Arabidopsis
  misc_feature (1)..(130): Homolog of NCBI NO: 18408116 NR Description: actin depolymerizing factor 2 (ADF2)
MAVHDDCKLKFMELKAKRTFRTIVYKIEDKQVIVEKLGEPEQSYDDFAASLPADDCRYCIYDFDFVTAENCQKSKIFFIAWSPDTAKVRDKMIYASSKDRFKRELDGIQVELQATDPTEMGLDVFKSRTN

SEQ ID NO: 25157 - protein, 119 aa, Arabidopsis thaliana
  peptide (1)..(119): Ceres Seq. ID no. 12483455
  misc_feature (1)..(119): Pfam Name: Cofilin/tropomyosin-type actin-binding protein Pfam Description: Cofilin/tropomyosin-type actin-binding protein
  misc_feature (1)..(117): Homolog of NCBI NO: 22857914 NR Description: pollen specific actin-depolymerizing factor 2
  misc_feature (1)..(119): Homolog of NCBI NO: 30697303 NR Description: actin depolymerizing factor 4 - like protein
  misc_feature (1)..(119): Homolog of NCBI NO: 30697295 NR Description: actin depolymerizing factor 3 - like protein
  misc_feature (1)..(119): Homolog of NCBI NO: 17366768 NR Description: Actin-depolymerizing factor 1 (ADF 1)
  misc_feature (1)..(119): Homolog of NCBI NO: 4185511 NR Description: actin depolymerizing factor 4 [Arabidopsis
  misc_feature (1)..(117): Homolog of NCBI NO: 17366765 NR Description: Actin-depolymerizing factor 2 (ADF 2)
  misc_feature (1)..(119): Homolog of NCBI NO: 15231309 NR Description: actin depolymerizing factor 1 (ADF1)
  misc_feature (1)..(119): Homolog of NCBI NO: 30697300 NR Description: actin depolymerizing factor 4 - like protein
  misc_feature (1)..(119): Homolog of NCBI NO: 11276987 NR Description: actin depolymerizing factor 2 - Arabidopsis
  misc_feature (1)..(119): Homolog of NCBI NO: 18408116 NR Description: actin depolymerizing factor 2 (ADF2)
MELKAKRTFRTIVYKIEDKQVIVEKLGEPEQSYDDFAASLPADDCRYCIYDFDFVTAENCQKSKIFFIAWSPDTAKVRDKMIYASSKDRFKRELDGIQVELQATDPTEMGLDVFKSRTN

SEQ ID NO: 25158 - DNA, 1245 bp, Arabidopsis thaliana
  misc_feature (1)..(1245): Ceres Seq. ID no. 13490807
  misc_feature: MA Experiment ID: 108462 Result: Up-regulated in Transcription
  misc_feature: MA Experiment 108462 PARAMETER Experiment Name: At_Germinating_Seeds_cDNA_P Parameter: Age (day) Value: 2 vs. 0
  misc_feature: MA Experiment 108462 PARAMETER Experiment Name: At_Germinating_Seeds_cDNA_P Parameter: Tissue Value: Germinating Seeds
  misc_feature: MA Experiment ID: 108463 Result: Up-regulated in Transcription
  misc_feature: MA Experiment 108463 PARAMETER Experiment Name: At_Germinating_Seeds_cDNA_P Parameter: Age (day) Value: 3 vs. 0
  misc_feature: MA Experiment 108463 PARAMETER Experiment Name: At_Germinating_Seeds_cDNA_P Parameter: Tissue Value: Germinating Seeds
  misc_feature: MA Experiment ID: 108464 Result: Up-regulated in Transcription
  misc_feature: MA Experiment 108464 PARAMETER Experiment Name: At_Germinating_Seeds_cDNA_P Parameter: Age (day) Value: 4 vs. 0
  misc_feature: MA Experiment 108464 PARAMETER Experiment Name: At_Germinating_Seeds_cDNA_P Parameter: Tissue Value: Germinating Seeds
  misc_feature: MA Experiment ID: 108573 Result: Up-regulated in Transcription
  misc_feature: MA Experiment 108573 PARAMETER Experiment Name: At_Drought_cDNA_P Parameter: Timepoint (hr) Value: 6
  misc_feature: MA Experiment 108573 PARAMETER Experiment Name: At_Drought_cDNA_P Parameter: Tissue Value: Aerial
  misc_feature: MA Experiment 108573 PARAMETER Experiment Name: At_Drought_cDNA_P Parameter: Treatment Value: Drought vs. No Drought
  misc_feature: MA Experiment ID: 108577 Result: Down-regulated in Transcription
  misc_feature: MA Experiment 108577 PARAMETER Experiment Name: At_42deg_Heat_cDNA_P Parameter: Temperature (deg C) Value: 42 vs. 22
  misc_feature: MA Experiment 108577 PARAMETER Experiment Name: At_42deg_Heat_cDNA_P Parameter: Timepoint (hr) Value: 6
  misc_feature: MA Experiment 108577 PARAMETER Experiment Name: At_42deg_Heat_cDNA_P Parameter: Tissue Value: Aerial
  misc_feature: MA Experiment ID: 20000112 Result: Down-regulated in Transcription
  misc_feature: MA Experiment 20000112 PARAMETER Experiment Name: At_42deg_Heat_cDNA_P Parameter: Temperature (deg C) Value: 42 vs. 22
  misc_feature: MA Experiment 20000112 PARAMETER Experiment Name: At_42deg_Heat_cDNA_P Parameter: Timepoint (hr) Value: 2
  misc_feature: MA Experiment 20000112 PARAMETER Experiment Name: At_42deg_Heat_cDNA_P Parameter: Tissue Value: Aerial
  misc_feature: MA Experiment ID: 20000180 Result: Up-regulated in Transcription
  misc_feature: MA Experiment 20000180 PARAMETER Experiment Name: At_Germinating_Seeds_P Parameter: Age (hr) Value: 24 vs. 0
  misc_feature: MA Experiment 20000180 PARAMETER Experiment Name: At_Germinating_Seeds_P Parameter: Tissue Value: Germinating Seeds
  misc_feature: MA Experiment ID: 20000185 Result: Down-regulated in Transcription
  misc_feature: MA Experiment 20000185 PARAMETER Experiment Name: At_Roots__P Parameter: Age (day) Value: 7 vs. 21
  misc_feature: MA Experiment 20000185 PARAMETER Experiment Name: At_Roots__P Parameter: Organism Value: A. thaliana
  misc_feature: MA Experiment 20000185 PARAMETER Experiment Name: At_Roots__P Parameter: Tissue Value: Roots vs. Whole Plant
  misc_feature: MA Experiment ID: 20000438 Result: Up-regulated in Transcription
  misc_feature: MA Experiment 20000438 PARAMETER Experiment Name: At_Shoots__P Parameter: Age (day) Value: 14
  misc_feature: MA Experiment 20000438 PARAMETER Experiment Name: At_Shoots__P Parameter: Tissue Value: Shoots vs. Whole Plant
  misc_feature: MA Experiment ID: 20000439 Result: Down-regulated in Transcription
  misc_feature: MA Experiment 20000439 PARAMETER Experiment Name: At_Roots__P Parameter: Age (day) Value: 14 vs. 21
  misc_feature: MA Experiment 20000439 PARAMETER Experiment Name: At_Roots__P Parameter: Organism Value: A. thaliana
  misc_feature: MA Experiment 20000439 PARAMETER Experiment Name: At_Roots__P Parameter: Tissue Value: Roots vs. Whole Plant
  misc_feature: MA Experiment ID: 20001557 Result: Down-regulated in Transcription
  misc_feature: MA Experiment 20001557 PARAMETER Experiment Name: At_Drought_Soil_Dry_P Parameter: Age (day) Value: 27
  misc_feature: MA Experiment 20001557 PARAMETER Experiment Name: At_Drought_Soil_Dry_P Parameter: Organism Value: A. thaliana
  misc_feature: MA Experiment 20001557 PARAMETER Experiment Name: At_Drought_Soil_Dry_P Parameter: Plant Line Value: WS
  misc_feature: MA Experiment 20001557 PARAMETER Experiment Name: At_Drought_Soil_Dry_P Parameter: Post Timepoint (hr) Value: 3
  misc_feature: MA Experiment 20001557 PARAMETER Experiment Name: At_Drought_Soil_Dry_P Parameter: Post-Treatment Value: Re-Water vs. No Drought
  misc_feature: MA Experiment 20001557 PARAMETER Experiment Name: At_Drought_Soil_Dry_P Parameter: Timepoint (day) Value: 13
  misc_feature: MA Experiment 20001557 PARAMETER Experiment Name: At_Drought_Soil_Dry_P Parameter: Treatment Value: Drought vs. No Drought
  misc_feature: MA Experiment ID: 20001558 Result: Down-regulated in Transcription
  misc_feature: MA Experiment 20001558 PARAMETER Experiment Name: At_Drought_Soil_Dry_P Parameter: Age (day) Value: 27
  misc_feature: MA Experiment 20001558 PARAMETER Experiment Name: At_Drought_Soil_Dry_P Parameter: Organism Value: A. thaliana
  misc_feature: MA Experiment 20001558 PARAMETER Experiment Name: At_Drought_Soil_Dry_P Parameter: Plant Line Value: WS
  misc_feature: MA Experiment 20001558 PARAMETER Experiment Name: At_Drought_Soil_Dry_P Parameter: Post Timepoint (hr) Value: 6
  misc_feature: MA Experiment 20001558 PARAMETER Experiment Name: At_Drought_Soil_Dry_P Parameter: Post-Treatment Value: Re-Water vs. No Drought
  misc_feature: MA Experiment 20001558 PARAMETER Experiment Name: At_Drought_Soil_Dry_P Parameter: Timepoint (day) Value: 13
  misc_feature: MA Experiment 20001558 PARAMETER Experiment Name: At_Drought_Soil_Dry_P Parameter: Treatment Value: Drought vs. No Drought
aagaaaaggcagagaagagagaggctctgataaaaaaaaaaacaaaaaaaaatgacaaaggcttattcaacacgtgtcctcacgtttctgatattgatctcgctaatggcggtgacactgaacctttttcccacggtagaggcaaagaagcggagtagagatgctcctatagtgaaaggtctctcatggaacttttaccagaaagcatgtccgaaagtcgaaaacatcatcagaaaagagctcaagaaagtcttcaagagagatattggtttagccgcagccatccttcgtatacatttccatgattgctttgttcagggatgtgaagcatcagtgctgctagctggatcagccagtggaccaggagaacaatcatcaatcccaaatctgacactacgtcaacaagcctttgtcgtcattaataaccttcgtgccctcgtccaaaagaagtgcggtcaagtcgtctcttgctcagatatcctcgctctcgccgctcgcgattccgtcgtcctatcaggagggccagactatgctgtcccacttggccgacgtgactctctagcgttcgcgagccaggaaacgacgttaaataacttaccaccaccgttcttcaacgcgagccagctcatcgccgacttcgccaacagaaacctcaacatcaccgacttagtagcactttccggtggtcacaccatcggaatcgcgcattgtccgtctttcacagaccgactctacccgaaccaagacccaaccatgaaccagttcttcgccaacagcctcaaacgcacttgtcccaccgcaaactcgagcaacacgcaagtgaatgacataaggagtcctgacgtgttcgacaacaagtactacgttgatctcatgaaccgacaagggctattcacttctgaccaggatctcttcgtggataagaggacacgtggcattgtggaaagctttgcgatcgaccagcagctgttttttgattattttactgtggcgatgatcaagatgggtcagatgagtgtcttaactggaacacaaggagagattcgttccaattgttcagccagaaacacccaaagtttcatgtccgttttggaagaaggcatagaggaagctatttccatgatctaaataaccataaatctcgacctttcctttgtcaactctgtttttatttagttcatgcacttgtggttgggttgtcgaatgcgtaaaactatctgataaataagaacgtcgcttcatctt

SEQ ID NO: 25159 - protein, 358 aa, Arabidopsis thaliana
  peptide (1)..(358): Ceres Seq. ID no. 13490808
  misc_feature (60)..(303): Pfam Name: Peroxidase Pfam Description: Peroxidase
  misc_feature (31)..(339): Homolog of NCBI NO: 34905826 NR Description: putative peroxidase [Oryza sativa (japonica
  misc_feature (35)..(339): Homolog of NCBI NO: 34905838 NR Description: putative peroxidase [Oryza sativa (japonica
  misc_feature (9)..(339): Homolog of NCBI NO: 7433084 NR Description: probable peroxidase (EC 1.11.1.7) prxr1 - spinach
  misc_feature (39)..(342): Homolog of NCBI NO: 7433081 NR Description: probable peroxidase (EC 1.11.1.7) (clone PC42) -
  misc_feature (12)..(342): Homolog of NCBI NO: 1084393 NR Description: peroxidase (EC 1.11.1.7) precursor - parsley
  misc_feature (9)..(357): Homolog of NCBI NO: 478409 NR Description: peroxidase (EC 1.11.1.7), cationic - adzuki bean
  misc_feature (18)..(358): Homolog of NCBI NO: 1389835 NR Description: peroxidase [Linum usitatissimum]
  misc_feature (18)..(353): Homolog of NCBI NO: 14031049 NR Description: peroxidase [Nicotiana tabacum]
  misc_feature (1)..(358): Homolog of NCBI NO: 1402914 NR Description: peroxidase [Arabidopsis thaliana]
  misc_feature (1)..(358): Homolog of NCBI NO: 15217539 NR Description: peroxidase, putative [Arabidopsis thaliana]
MTKAYSTRVLTFLILISLMAVTLNLFPTVEAKKRSRDAPIVKGLSWNFYQKACPKVENIIRKELKKVFKRDIGLAAAILRIHFHDCFVQGCEASVLLAGSASGPGEQSSIPNLTLRQQAFVVINNLRALVQKKCGQVVSCSDILALAARDSVVLSGGPDYAVPLGRRDSLAFASQETTLNNLPPPFFNASQLIADFANRNLNITDLVALSGGHTIGIAHCPSFTDRLYPNQDPTMNQFFANSLKRTCPTANSSNTQVNDIRSPDVFDNKYYVDLMNRQGLFTSDQDLFVDKRTRGIVESFAIDQQLFFDYFTVAMIKMGQMSVLTGTQGEIRSNCSARNTQSFMSVLEEGIEEAISMI

SEQ ID NO: 25160 - protein, 340 aa, Arabidopsis thaliana
  peptide (1)..(340): Ceres Seq. ID no. 13490809
  misc_feature (42)..(285): Pfam Name: Peroxidase Pfam Description: Peroxidase
  misc_feature (13)..(321): Homolog of NCBI NO: 34905826 NR Description: putative peroxidase [Oryza sativa (japonica
  misc_feature (17)..(321): Homolog of NCBI NO: 34905838 NR Description: putative peroxidase [Oryza sativa (japonica
  misc_feature (1)..(321): Homolog of NCBI NO: 7433084 NR Description: probable peroxidase (EC 1.11.1.7) prxr1 - spinach
  misc_feature (21)..(324): Homolog of NCBI NO: 7433081 NR Description: probable peroxidase (EC 1.11.1.7) (clone PC42) -
  misc_feature (1)..(324): Homolog of NCBI NO: 1084393 NR Description: peroxidase (EC 1.11.1.7) precursor - parsley
  misc_feature (1)..(339): Homolog of NCBI NO: 478409 NR Description: peroxidase (EC 1.11.1.7), cationic - adzuki bean
  misc_feature (1)..(340): Homolog of NCBI NO: 1389835 NR Description: peroxidase [Linum usitatissimum]
  misc_feature (1)..(335): Homolog of NCBI NO: 14031049 NR Description: peroxidase [Nicotiana tabacum]
  misc_feature (1)..(340): Homolog of NCBI NO: 1402914 NR Description: peroxidase [Arabidopsis thaliana]
  misc_feature (1)..(340): Homolog of NCBI NO: 15217539 NR Description: peroxidase, putative [Arabidopsis thaliana]
MAVTLNLFPTVEAKKRSRDAPIVKGLSWNFYQKACPKVENIIRKELKKVFKRDIGLAAAILRIHFHDCFVQGCEASVLLAGSASGPGEQSSIPNLTLRQQAFVVINNLRALVQKKCGQVVSCSDILALAARDSVVLSGGPDYAVPLGRRDSLAFASQETTLNNLPPPFFNASQLIADFANRNLNITDLVALSGGHTIGIAHCPSFTDRLYPNQDPTMNQFFANSLKRTCPTANSSNTQVNDIRSPDVFDNKYYVDLMNRQGLFTSDQDLFVDKRTRGIVESFAIDQQLFFDYFTVAMIKMGQMSVLTGTQGEIRSNCSARNTQSFMSVLEEGIEEAISMI

SEQ ID NO: 25161 - DNA, 1716 bp, Arabidopsis thaliana
  misc_feature (1)..(1716): Ceres Seq. ID no. 12337410
  misc_feature: MA Experiment ID: 20000794 Result: Up-regulated in Transcription
  misc_feature: MA Experiment 20000794 PARAMETER Experiment Name: At_Petals_P Parameter: Age (day) Value: 23-25 days
  misc_feature: MA Experiment 20000794 PARAMETER Experiment Name: At_Petals_P Parameter: Plant Line Value: WS
  misc_feature: MA Experiment 20000794 PARAMETER Experiment Name: At_Petals_P Parameter: Tissue Value: Petals vs. Whole plant
accatatacacaattcagtatttgacttcacagagatagagagagagatggcgacggaaacggaagttgtggctccggtaagcaacggcggaggcaaaggatgttgcaagtacggtggtcctggttacgcgacgcctctcgccgctatgtctggtccatcagagaaacttatctacgtcaccgccgtctacaccggaactggaatagataaaccggactatttggcgacggtggatgtagatccaagctcgccttcgtattcaagtgttattcatagattaccaatgccttttgttggtgatgagcttcatcattctggttggaactcttgtagttcttgccatggtgatgcttctgttgatagacgttatctcgtgttaccgtctcttatatctggtcgcatttatgcgattgatactaaggaaaacccgagggctccgtctttgtataagtatgttgatcctaaagagattgctgataagactggattggcgtttcctcacacggctcattgcctcgccacgggcgagatcttggtgtcctgtcttggagatgaagaggggaatgctaaggggaatgggtttcttcttcttgattctgattttaacatcaagaataggtgggagaaaccaggacatagtcctttgtatgggtatgatttttggtaccaacctcggcacaagaccatgatcagtacatcttggggagcacctaaagccttttcgaaaggtttcaatcttcagcatgttgctgatggcttgtatggaagtcatctacatgtttatagttggccaggaggtgaaatgaaacaattaattgaccttggaccgactggtctcttacctttggagattagattcttgcatgatccgtctaaagatacagggtttgttgggagtgccttgtcaagtaatatgataagatttttcaagaacagtgatgaaacatggagccatgaggtggttatatcagttaaacctctgaaagtagaaaactggatacttccagaaatgccggggcttatcaccgacttcttgatctccctcgatgaccgattcatttactttgtgaactggctccatggagacattcgtcagtacaacatagaggaccctaaaacccctgtcttaacaggacaaatttgggttggaggattactacaaaagggcagtcctgttaaggcggttggagaagacggcaacactttccaattcgaggttcctcagatcaaggggaactctctacgaggtggacctcaaatgattcagctgagcctcgatgggaaaagattgtatgcaacaaactcgctgtttagcgcatgggatcgtcagttttatcctgaaatcatggagaaaggctcacacataattcagattgatgttgatacagaaaaaggtggtctcaccataaaccctgatttctttgtggactttggtgatgaaccagacggtccttcactagcccacgagatgagatatccaggtggagactgcacttccgatatctggatttgaatttggctttgtttagtgtgtgttttgtgttaagtttaaattgagttttattatttgttgtgtgtttagtagagttgaataaaaagggagtaagatgacccagacaattaacacttgtttgtacattttgactcctatgtgtcttatgtaataaaactttctacaattccacttaacacttggtttttctcttttgttttcc

SEQ ID NO: 25162 - protein, 503 aa, Arabidopsis thaliana
  peptide (1)..(503): Ceres Seq. ID no. 12337411
  misc_feature (35)..(503): Pfam Name: 56kDa selenium binding protein (SBP56) Pfam Description: 56kDa selenium binding protein (SBP56)
  misc_feature (24)..(503): Homolog of NCBI NO: 15229520 NR Description: selenium binding protein, putative; protein id:
  misc_feature (33)..(503): Homolog of NCBI NO: 15485716 NR Description: selenium binding protein [Lotus japonicus]
  misc_feature (95)..(503): Homolog of NCBI NO: 20340239 NR Description: putative selenium-binding protein [Thellungiella
  misc_feature (32)..(503): Homolog of NCBI NO: 15485720 NR Description: selenium binding protein [Medicago sativa]
  misc_feature (16)..(503): Homolog of NCBI NO: 25348077 NR Description: selenium-binding protein like [imported] -
  misc_feature (16)..(503): Homolog of NCBI NO: 22530900 NR Description: selenium-binding protein-like protein
  misc_feature (16)..(503): Homolog of NCBI NO: 13605825 NR Description: AT4g14040/dl3061c [Arabidopsis thaliana]
  misc_feature (16)..(503): Homolog of NCBI NO: 15236386 NR Description: selenium-binding protein like
  misc_feature (38)..(503): Homolog of NCBI NO: 15485232 NR Description: selenium binding protein [Arabidopsis thaliana]
  misc_feature (16)..(503): Homolog of NCBI NO: 15236385 NR Description: selenium-binding protein like
HIHNSVFDFTEIEREMATETEVVAPVSNGGGKGCCKYGGPGYATPLAAMSGPSEKLIYVTAVYTGTGIDKPDYLATVDVDPSSPSYSSVIHRLPMPFVGDELHHSGWNSCSSCHGDASVDRRYLVLPSLISGRIYAIDTKENPRAPSLYKYVDPKEIADKTGLAFPHTAHCLATGEILVSCLGDEEGNAKGNGFLLLDSDFNIKNRWEKPGHSPLYGYDFWYQPRHKTMISTSWGAPKAFSKGFNLQHVADGLYGSHLHVYSWPGGEMKQLIDLGPTGLLPLEIRFLHDPSKDTGFVGSALSSNMIRFFKNSDETWSHEVVISVKPLKVENWILPEMPGLITDFLISLDDRFIYFVNWLHGDIRQYNIEDPKTPVLTGQIWVGGLLQKGSPVKAVGEDGNTFQFEVPQIKGNSLRGGPQMIQLSLDGKRLYATNSLFSAWDRQFYPEIMEKGSHIIQIDVDTEKGGLTINPDFFVDFGDEPDGPSLAHEMRYPGGDCTSDIWI

SEQ ID NO: 25163 - protein, 488 aa, Arabidopsis thaliana
  peptide (1)..(488): Ceres Seq. ID no. 12337412
  misc_feature (20)..(488): Pfam Name: 56kDa selenium binding protein (SBP56) Pfam Description: 56kDa selenium binding protein (SBP56)
  misc_feature (9)..(488): Homolog of NCBI NO: 15229520 NR Description: selenium binding protein, putative; protein id:
  misc_feature (18)..(488): Homolog of NCBI NO: 15485716 NR Description: selenium binding protein [Lotus japonicus]
  misc_feature (80)..(488): Homolog of NCBI NO: 20340239 NR Description: putative selenium-binding protein [Thellungiella
  misc_feature (17)..(488): Homolog of NCBI NO: 15485720 NR Description: selenium binding protein [Medicago sativa]
  misc_feature (1)..(488): Homolog of NCBI NO: 25348077 NR Description: selenium-binding protein like [imported] -
  misc_feature (1)..(488): Homolog of NCBI NO: 22530900 NR Description: selenium-binding protein-like protein
  misc_feature (1)..(488): Homolog of NCBI NO: 13605825 NR Description: AT4g14040/dl3061c [Arabidopsis thaliana]
  misc_feature (1)..(488): Homolog of NCBI NO: 15236386 NR Description: selenium-binding protein like
  misc_feature (23)..(488): Homolog of NCBI NO: 15485232 NR Description: selenium binding protein [Arabidopsis thaliana]
  misc_feature (1)..(488): Homolog of NCBI NO: 15236385 NR Description: selenium-binding protein like
MATETEVVAPVSNGGGKGCCKYGGPGYATPLAAMSGPSEKLIYVTAVYTGTGIDKPDYLATVDVDPSSPSYSSVIHRLPMPFVGDELHHSGWNSCSSCHGDASVDRRYLVLPSLISGRIYAIDTKENPRAPSLYKYVDPKEIADKTGLAFPHTAHCLATGEILVSCLGDEEGNAKGNGFLLLDSDFNIKNRWEKPGHSPLYGYDFWYQPRHKTMISTSWGAPKAFSKGFNLQHVADGLYGSHLHVYSWPGGEMKQLIDLGPTGLLPLEIRFLHDPSKDTGFVGSALSSNMIRFFKNSDETWSHEVVISVKPLKVENWILPEMPGLITDFLISLDDRFIYFVNWLHGDIRQYNIEDPKTPVLTGQIWVGGLLQKGSPVKAVGEDGNTFQFEVPQIKGNSLRGGPQMIQLSLDGKRLYATNSLFSAWDRQFYPEIMEKGSHIIQIDVDTEKGGLTINPDFFVDFGDEPDGPSLAHEMRYPGGDCTSDIWI

SEQ ID NO: 25164 - protein, 455 aa, Arabidopsis thaliana
  peptide (1)..(455): Ceres Seq. ID no. 12337413
  misc_feature (1)..(455): Pfam Name: 56kDa selenium binding protein (SBP56) Pfam Description: 56kDa selenium binding protein (SBP56)
  misc_feature (1)..(455): Homolog of NCBI NO: 15229520 NR Description: selenium binding protein, putative; protein id:
  misc_feature (1)..(455): Homolog of NCBI NO: 15485716 NR Description: selenium binding protein [Lotus japonicus]
  misc_feature (47)..(455): Homolog of NCBI NO: 20340239 NR Description: putative selenium-binding protein [Thellungiella
  misc_feature (1)..(455): Homolog of NCBI NO: 15485720 NR Description: selenium binding protein [Medicago sativa]
  misc_feature (1)..(455): Homolog of NCBI NO: 25348077 NR Description: selenium-binding protein like [imported] -
  misc_feature (1)..(455): Homolog of NCBI NO: 22530900 NR Description: selenium-binding protein-like protein
  misc_feature (1)..(455): Homolog of NCBI NO: 13605825 NR Description: AT4g14040/dl3061c [Arabidopsis thaliana]
  misc_feature (1)..(455): Homolog of NCBI NO: 15236386 NR Description: selenium-binding protein like
  misc_feature (1)..(455): Homolog of NCBI NO: 15485232 NR Description: selenium binding protein [Arabidopsis thaliana]
  misc_feature (1)..(455): Homolog of NCBI NO: 15236385 NR Description: selenium-binding protein like
MSGPSEKLIYVTAVYTGTGIDKPDYLATVDVDPSSPSYSSVIHRLPMPFVGDELHHSGWNSCSSCHGDASVDRRYLVLPSLISGRIYAIDTKENPRAPSLYKYVDPKEIADKTGLAFPHTAHCLATGEILVSCLGDEEGNAKGNGFLLLDSDFNIKNRWEKPGHSPLYGYDFWYQPRHKTMISTSWGAPKAFSKGFNLQHVADGLYGSHLHVYSWPGGEMKQLIDLGPTGLLPLEIRFLHDPSKDTGFVGSALSSNMIRFFKNSDETWSHEVVISVKPLKVENWILPEMPGLITDFLISLDDRFIYFVNWLHGDIRQYNIEDPKTPVLTGQIWVGGLLQKGSPVKAVGEDGNTFQFEVPQIKGNSLRGGPQMIQLSLDGKRLYATNSLFSAWDRQFYPEIMEKGSHIIQIDVDTEKGGLTINPDFFVDFGDEPDGPSLAHEMRYPGGDCTSDIWI

SEQ ID NO: 25165 - DNA, 636 bp, Arabidopsis thaliana; identical to SEQ ID NO: 22820
  misc_feature (1)..(636): Ceres Seq. ID no. 12562389
  misc_feature: MA Experiment ID: 108434 Result: Down-regulated in Transcription
  misc_feature: MA Experiment 108434 PARAMETER Experiment Name: At_Root_Tips_cDNA_P Parameter: Tissue Value: Root Tips
  misc_feature: MA Experiment ID: 108435 Result: Down-regulated in Transcription
  misc_feature: MA Experiment 108435 PARAMETER Experiment Name: At_stm_Mutants_cDNA_P Parameter: Plant Line Value: wt Landsburg vs stm
  misc_feature: MA Experiment 108435 PARAMETER Experiment Name: At_stm_Mutants_cDNA_P Parameter: Tissue Value: Shoot Apical Meristem Region
  misc_feature: MA Experiment ID: 108461 Result: Up-regulated in Transcription
  misc_feature: MA Experiment 108461 PARAMETER Experiment Name: At_Germinating_Seeds_cDNA_P Parameter: Age (day) Value: 1 vs. 0
  misc_feature: MA Experiment 108461 PARAMETER Experiment Name: At_Germinating_Seeds_cDNA_P Parameter: Tissue Value: Germinating Seeds
  misc_feature: MA Experiment ID: 108462 Result: Up-regulated in Transcription
  misc_feature: MA Experiment 108462 PARAMETER Experiment Name: At_Germinating_Seeds_cDNA_P Parameter: Age (day) Value: 2 vs. 0
  misc_feature: MA Experiment 108462 PARAMETER Experiment Name: At_Germinating_Seeds_cDNA_P Parameter: Tissue Value: Germinating Seeds
  misc_feature: MA Experiment ID: 108488 Result: Up-regulated in Transcription
  misc_feature: MA Experiment ID: 108489 Result: Down-regulated in Transcription
  misc_feature: MA Experiment ID: 20000180 Result: Up-regulated in Transcription
  misc_feature: MA Experiment 20000180 PARAMETER Experiment Name: At_Germinating_Seeds_P Parameter: Age (hr) Value: 24 vs. 0
  misc_feature: MA Experiment 20000180 PARAMETER Experiment Name: At_Germinating_Seeds_P Parameter: Tissue Value: Germinating Seeds
  misc_feature: MA Experiment ID: 20000185 Result: Down-regulated in Transcription
  misc_feature: MA Experiment 20000185 PARAMETER Experiment Name: At_Roots__P Parameter: Age (day) Value: 7 vs. 21
  misc_feature: MA Experiment 20000185 PARAMETER Experiment Name: At_Roots__P Parameter: Organism Value: A. thaliana
  misc_feature: MA Experiment 20000185 PARAMETER Experiment Name: At_Roots__P Parameter: Tissue Value: Roots vs. Whole Plant
  misc_feature: MA Experiment ID: 20000227 Result: Down-regulated in Transcription
  misc_feature: MA Experiment 20000227 PARAMETER Experiment Name: At_Root-Tips-vs-Tops_P Parameter: Tissue Value: Root Tips vs. Root Tops
  misc_feature: MA Experiment ID: 20000264 Result: Down-regulated in Transcription
  misc_feature: MA Experiment 20000264 PARAMETER Experiment Name: At_Open_Flower_P Parameter: Age (day) Value: 21
  misc_feature: MA Experiment 20000264 PARAMETER Experiment Name: At_Open_Flower_P Parameter: Plant Line Value: WS
  misc_feature: MA Experiment 20000264 PARAMETER Experiment Name: At_Open_Flower_P Parameter: Tissue Value: Open Flower vs. Whole Plant
  misc_feature: MA Experiment ID: 20000286 Result: Down-regulated in Transcription
  misc_feature: MA Experiment 20000286 PARAMETER Experiment Name: At_Open_Flower_P Parameter: Age (day) Value: 21
  misc_feature: MA Experiment 20000286 PARAMETER Experiment Name: At_Open_Flower_P Parameter: Plant Line Value: WS
  misc_feature: MA Experiment 20000286 PARAMETER Experiment Name: At_Open_Flower_P Parameter: Tissue Value: Half Open vs. Whole Plant
  misc_feature: MA Experiment ID: 20000439 Result: Down-regulated in Transcription
  misc_feature: MA Experiment 20000439 PARAMETER Experiment Name: At_Roots__P Parameter: Age (day) Value: 14 vs. 21
  misc_feature: MA Experiment 20000439 PARAMETER Experiment Name: At_Roots__P Parameter: Organism Value: A. thaliana
  misc_feature: MA Experiment 20000439 PARAMETER Experiment Name: At_Roots__P Parameter: Tissue Value: Roots vs. Whole Plant
  misc_feature: MA Experiment ID: 20000794 Result: Down-regulated in Transcription
  misc_feature: MA Experiment 20000794 PARAMETER Experiment Name: At_Petals_P Parameter: Age (day) Value: 23-25 days
  misc_feature: MA Experiment 20000794 PARAMETER Experiment Name: At_Petals_P Parameter: Plant Line Value: WS
  misc_feature: MA Experiment 20000794 PARAMETER Experiment Name: At_Petals_P Parameter: Tissue Value: Petals vs. Whole plant
  misc_feature: MA Experiment ID: 20001557 Result: Down-regulated in Transcription
  misc_feature: MA Experiment 20001557 PARAMETER Experiment Name: At_Drought_Soil_Dry_P Parameter: Age (day) Value: 27
  misc_feature: MA Experiment 20001557 PARAMETER Experiment Name: At_Drought_Soil_Dry_P Parameter: Organism Value: A. thaliana
  misc_feature: MA Experiment 20001557 PARAMETER Experiment Name: At_Drought_Soil_Dry_P Parameter: Plant Line Value: WS
  misc_feature: MA Experiment 20001557 PARAMETER Experiment Name: At_Drought_Soil_Dry_P Parameter: Post Timepoint (hr) Value: 3
  misc_feature: MA Experiment 20001557 PARAMETER Experiment Name: At_Drought_Soil_Dry_P Parameter: Post-Treatment Value: Re-Water vs. No Drought
  misc_feature: MA Experiment 20001557 PARAMETER Experiment Name: At_Drought_Soil_Dry_P Parameter: Timepoint (day) Value: 13
  misc_feature: MA Experiment 20001557 PARAMETER Experiment Name: At_Drought_Soil_Dry_P Parameter: Treatment Value: Drought vs. No Drought
  misc_feature: MA Experiment ID: 20001757 Result: Up-regulated in Transcription
  misc_feature: MA Experiment 20001757 PARAMETER Experiment Name: At_50mM_NH4NO3_L-to-H_P Parameter: Timepoint (hr) Value: 6
  misc_feature: MA Experiment 20001757 PARAMETER Experiment Name: At_50mM_NH4NO3_L-to-H_P Parameter: Tissue Value: Leaf
  misc_feature: MA Experiment 20001757 PARAMETER Experiment Name: At_50mM_NH4NO3_L-to-H_P Parameter: Treatment Value: 50mM NH4NO3 vs 100mM Mannitol
  misc_feature: MA Experiment ID: 20001908 Result: Down-regulated in Transcription
  misc_feature: MA Experiment 20001908 PARAMETER Experiment Name: At_Drought_Reproduction_P Parameter: Age (day) Value: 40
  misc_feature: MA Experiment 20001908 PARAMETER Experiment Name: At_Drought_Reproduction_P Parameter: Organism Value: A. thaliana
  misc_feature: MA Experiment 20001908 PARAMETER Experiment Name: At_Drought_Reproduction_P Parameter: Plant Line Value: WS
  misc_feature: MA Experiment 20001908 PARAMETER Experiment Name: At_Drought_Reproduction_P Parameter: Timepoint (day) Value: 10
  misc_feature: MA Experiment 20001908 PARAMETER Experiment Name: At_Drought_Reproduction_P Parameter: Tissue Value: Siliques
  misc_feature: MA Experiment 20001908 PARAMETER Experiment Name: At_Drought_Reproduction_P Parameter: Treatment Value: Drought vs. No Drought

SEQ ID NO: 25166 - protein, 140 aa, Arabidopsis thaliana; identical to SEQ ID NO: 22821
  peptide (1)..(140): Ceres Seq. ID no. 12562390
  misc_feature (6)..(140): Homolog of NCBI NO: 6996562 NR Description: putative 16kDa membrane protein [Nicotiana
  misc_feature (1)..(140): Homolog of NCBI NO: 22531014 NR Description: expressed protein [Arabidopsis thaliana]
  misc_feature (1)..(140): Homolog of NCBI NO: 18390888 NR Description: expressed protein
  misc_feature (6)..(140): Homolog of NCBI NO: 6996562 NR Description: putative 16kDa membrane protein [Nicotiana
  misc_feature (1)..(140): Homolog of NCBI NO: 22531014 NR Description: expressed protein [Arabidopsis thaliana]
  misc_feature (1)..(140): Homolog of NCBI NO: 18390888 NR Description: expressed protein
  misc_feature (6)..(140): Homolog of NCBI NO: 6996562 NR Description: putative 16kDa membrane protein [Nicotiana
  misc_feature (1)..(140): Homolog of NCBI NO: 22531014 NR Description: expressed protein [Arabidopsis thaliana]
  misc_feature (1)..(140): Homolog of NCBI NO: 18390888 NR Description: expressed protein

SEQ ID NO: 25167 - DNA, 991 bp, Arabidopsis thaliana
  misc_feature (1)..(991): Ceres Seq. ID no. 13491383
  misc_feature: MA Experiment ID: 108434 Result: Down-regulated in Transcription
  misc_feature: MA Experiment 108434 PARAMETER Experiment Name: At_Root_Tips_cDNA_P Parameter: Tissue Value: Root Tips
  misc_feature: MA Experiment ID: 108573 Result: Up-regulated in Transcription
  misc_feature: MA Experiment 108573 PARAMETER Experiment Name: At_Drought_cDNA_P Parameter: Timepoint (hr) Value: 6
  misc_feature: MA Experiment 108573 PARAMETER Experiment Name: At_Drought_cDNA_P Parameter: Tissue Value: Aerial
  misc_feature: MA Experiment 108573 PARAMETER Experiment Name: At_Drought_cDNA_P Parameter: Treatment Value: Drought vs. No Drought
  misc_feature: MA Experiment ID: 108585 Result: Up-regulated in Transcription
  misc_feature: MA Experiment 108585 PARAMETER Experiment Name: At_5mM_NaNP_cDNA_P Parameter: Timepoint (hr) Value: 6
  misc_feature: MA Experiment 108585 PARAMETER Experiment Name: At_5mM_NaNP_cDNA_P Parameter: Tissue Value: Aerial
  misc_feature: MA Experiment 108585 PARAMETER Experiment Name: At_5mM_NaNP_cDNA_P Parameter: Treatment Value: null
  misc_feature: MA Experiment ID: 20000069 Result: Up-regulated in Transcription
  misc_feature: MA Experiment 20000069 PARAMETER Experiment Name: At_100uM_ABA_Mutants_cDNA_P Parameter: Plant Line Value: CS23
  misc_feature: MA Experiment 20000069 PARAMETER Experiment Name: At_100uM_ABA_Mutants_cDNA_P Parameter: Timepoint (hr) Value: 6
  misc_feature: MA Experiment 20000069 PARAMETER Experiment Name: At_100uM_ABA_Mutants_cDNA_P Parameter: Tissue Value: Aerial
  misc_feature: MA Experiment 20000069 PARAMETER Experiment Name: At_100uM_ABA_Mutants_cDNA_P Parameter: Treatment Value: 100uM ABA vs. No Treatment
  misc_feature: MA Experiment ID: 20000070 Result: Up-regulated in Transcription
  misc_feature: MA Experiment 20000070 PARAMETER Experiment Name: At_100uM_ABA_Mutants_cDNA_P Parameter: Plant Line Value: CS24
  misc_feature: MA Experiment 20000070 PARAMETER Experiment Name: At_100uM_ABA_Mutants_cDNA_P Parameter: Timepoint (hr) Value: 6
  misc_feature: MA Experiment 20000070 PARAMETER Experiment Name: At_100uM_ABA_Mutants_cDNA_P Parameter: Tissue Value: Aerial
  misc_feature: MA Experiment 20000070 PARAMETER Experiment Name: At_100uM_ABA_Mutants_cDNA_P Parameter: Treatment Value: 100uM ABA vs. No Treatment
  misc_feature: MA Experiment ID: 20000071 Result: Up-regulated in Transcription
  misc_feature: MA Experiment 20000071 PARAMETER Experiment Name: At_100uM_ABA_Mutants_cDNA_P Parameter: Plant Line Value: CS8104
  misc_feature: MA Experiment 20000071 PARAMETER Experiment Name: At_100uM_ABA_Mutants_cDNA_P Parameter: Timepoint (hr) Value: 6
  misc_feature: MA Experiment 20000071 PARAMETER Experiment Name: At_100uM_ABA_Mutants_cDNA_P Parameter: Tissue Value: Aerial
  misc_feature: MA Experiment 20000071 PARAMETER Experiment Name: At_100uM_ABA_Mutants_cDNA_P Parameter: Treatment Value: 100uM ABA vs. No Treatment
  misc_feature: MA Experiment ID: 20000072 Result: Up-regulated in Transcription
  misc_feature: MA Experiment 20000072 PARAMETER Experiment Name: At_100uM_ABA_Mutants_cDNA_P Parameter: Plant Line Value: CS8105
  misc_feature: MA Experiment 20000072 PARAMETER Experiment Name: At_100uM_ABA_Mutants_cDNA_P Parameter: Timepoint (hr) Value: 6
  misc_feature: MA Experiment 20000072 PARAMETER Experiment Name: At_100uM_ABA_Mutants_cDNA_P Parameter: Tissue Value: Aerial
  misc_feature: MA Experiment 20000072 PARAMETER Experiment Name: At_100uM_ABA_Mutants_cDNA_P Parameter: Treatment Value: 100uM ABA vs. No Treatment
  misc_feature: MA Experiment ID: 20000086 Result: Up-regulated in Transcription
  misc_feature: MA Experiment 20000086 PARAMETER Experiment Name: At_100uM_ABA_Mutants_cDNA_P Parameter: Plant Line Value: CS22
  misc_feature: MA Experiment 20000086 PARAMETER Experiment Name: At_100uM_ABA_Mutants_cDNA_P Parameter: Timepoint (hr) Value: 6
  misc_feature: MA Experiment 20000086 PARAMETER Experiment Name: At_100uM_ABA_Mutants_cDNA_P Parameter: Tissue Value: Aerial
  misc_feature: MA Experiment 20000086 PARAMETER Experiment Name: At_100uM_ABA_Mutants_cDNA_P Parameter: Treatment Value: 100uM ABA vs. No Treatment
  misc_feature: MA Experiment ID: 20000088 Result: Up-regulated in Transcription
  misc_feature: MA Experiment 20000088 PARAMETER Experiment Name: At_100uM_ABA_Mutants_cDNA_P Parameter: Plant Line Value: Landsberg
  misc_feature: MA Experiment 20000088 PARAMETER Experiment Name: At_100uM_ABA_Mutants_cDNA_P Parameter: Timepoint (hr) Value: 6
  misc_feature: MA Experiment 20000088 PARAMETER Experiment Name: At_100uM_ABA_Mutants_cDNA_P Parameter: Tissue Value: Aerial
  misc_feature: MA Experiment 20000088 PARAMETER Experiment Name: At_100uM_ABA_Mutants_cDNA_P Parameter: Treatment Value: 100uM ABA vs. No Treatment
  misc_feature: MA Experiment ID: 20000117 Result: Up-regulated in Transcription
  misc_feature: MA Experiment 20000117 PARAMETER Experiment Name: At_100uM_ABA_Mutants_cDNA_P Parameter: Plant Line Value: Columbia
  misc_feature: MA Experiment 20000117 PARAMETER Experiment Name: At_100uM_ABA_Mutants_cDNA_P Parameter: Timepoint (hr) Value: 6
  misc_feature: MA Experiment 20000117 PARAMETER Experiment Name: At_100uM_ABA_Mutants_cDNA_P Parameter: Tissue Value: Aerial
  misc_feature: MA Experiment 20000117 PARAMETER Experiment Name: At_100uM_ABA_Mutants_cDNA_P Parameter: Treatment Value: 100uM ABA vs. No Treatment
  misc_feature: MA Experiment ID: 20000185 Result: Up-regulated in Transcription
  misc_feature: MA Experiment 20000185 PARAMETER Experiment Name: At_Roots__P Parameter: Age (day) Value: 7 vs. 21
  misc_feature: MA Experiment 20000185 PARAMETER Experiment Name: At_Roots__P Parameter: Organism Value: A. thaliana
  misc_feature: MA Experiment 20000185 PARAMETER Experiment Name: At_Roots__P Parameter: Tissue Value: Roots vs. Whole Plant
  misc_feature: MA Experiment ID: 20000265 Result: Down-regulated in Transcription
  misc_feature: MA Experiment 20000265 PARAMETER Experiment Name: At_Open_Flower_P Parameter: Age (day) Value: 21
  misc_feature: MA Experiment 20000265 PARAMETER Experiment Name: At_Open_Flower_P Parameter: Plant Line Value: WS
  misc_feature: MA Experiment 20000265 PARAMETER Experiment Name: At_Open_Flower_P Parameter: Tissue Value: Closed Flower vs. Whole Plant
  misc_feature: MA Experiment ID: 20000439 Result: Up-regulated in Transcription
  misc_feature: MA Experiment 20000439 PARAMETER Experiment Name: At_Roots__P Parameter: Age (day) Value: 14 vs. 21
  misc_feature: MA Experiment 20000439 PARAMETER Experiment Name: At_Roots__P Parameter: Organism Value: A. thaliana
  misc_feature: MA Experiment 20000439 PARAMETER Experiment Name: At_Roots__P Parameter: Tissue Value: Roots vs. Whole Plant
  misc_feature: MA Experiment ID: 20000452 Result: Up-regulated in Transcription
  misc_feature: MA Experiment 20000452 PARAMETER Experiment Name: At_CS6879_Shoots-Roots_P Parameter: Age (day) Value: 14
  misc_feature: MA Experiment 20000452 PARAMETER Experiment Name: At_CS6879_Shoots-Roots_P Parameter: Organism Value: A. thaliana
  misc_feature: MA Experiment 20000452 PARAMETER Experiment Name: At_CS6879_Shoots-Roots_P Parameter: Plant Line Value: CS6879 vs. WS
  misc_feature: MA Experiment 20000452 PARAMETER Experiment Name: At_CS6879_Shoots-Roots_P Parameter: Tissue Value: Shoots
catttactttaccattttgatctgttgctctgtttcactgtgcgtgatcgggaagaagaagaaaatgttggcgattttcgacaagaacgtggcgaaaacacccgaggctcttcagggtcaagagggtggatcggtttgtgctcttaaagataggttcttgccgaaccatttctcctctgtttatcctggtgctgtcaccatcaatctcggatcttctggtttcattgcttgctctctcgagaaacagaaccctcttcttcccagattgtttgctgtggtggatgatatgttctgcatattccaaggacatatagagaacgttccaattcttaagcaacaatatggactaaccaaaacagctacagaggttaccattgtgattgaagcctacagaactctaagagatcgtggtccgtattcagctgaacaagttgttagagattttcaaggcaaattcgggtttatgctctatgactgctccacacaaaatgtcttccttgccggggatgtagatgggagtgttcctctctactggggaaccgatgctgaaggacatcttgttgtttctgatgatgttgagactgtcaagaagggttgtggtaaatcctttgcgccattccctaaaggatgtttctttacctcatctggaggtttgaggagctatgagcatccatcaaatgagttaaagccggtaccaagggtagacagttcgggtgaggtttgcggtgtaacgtttaaagtggattctgaggccaagaaagaagcgatgcctagggttgggagtgttcagaattggtctaaacaaatctgaactagctgaaaaaggcttgttttattttttacttgttggactcctgtggctgtgttccacagatttactcttttcctgatattctcactgtagccattctaaggactaatggtgctcttattgctattgtacctgtacttggtaacaaggaagctaagaataaaatattttataaacgtc

SEQ ID NO: 25168 - protein, 269 aa, Arabidopsis thaliana
  peptide (1)..(269): Ceres Seq. ID no. 13491384
  misc_feature (22)..(266): Homolog of NCBI NO: 18400774 NR Description: expressed protein [Arabidopsis thaliana]
  misc_feature (22)..(266): Homolog of NCBI NO: 18416995 NR Description: expressed protein [Arabidopsis thaliana]
  misc_feature (21)..(266): Homolog of NCBI NO: 30017570 NR Description: unknown protein [Oryza sativa (japonica
  misc_feature (22)..(269): Homolog of NCBI NO: 20340249 NR Description: aluminum-induced protein-like protein
  misc_feature (22)..(269): Homolog of NCBI NO: 15239993 NR Description: aluminum-induced protein-related [Arabidopsis
  misc_feature (22)..(269): Homolog of NCBI NO: 15228883 NR Description: expressed protein [Arabidopsis thaliana]
IYFTILICCSVSLCVIGKKKKMLAIFDKNVAKTPEALQGQEGGSVCALKDRFLPNHFSSVYPGAVTINLGSSGFIACSLEKQNPLLPRLFAVVDDMFCIFQGHIENVPILKQQYGLTKTATEVTIVIEAYRTLRDRGPYSAEQVVRDFQGKFGFMLYDCSTQNVFLAGDVDGSVPLYWGTDAEGHLVVSDDVETVKKGCGKSFAPFPKGCFFTSSGGLRSYEHPSNELKPVPRVDSSGEVCGVTFKVDSEAKKEAMPRVGSVQNWSKQI

SEQ ID NO: 25169 - protein, 248 aa, Arabidopsis thaliana
  peptide (1)..(248): Ceres Seq. ID no. 13491385
  misc_feature (1)..(245): Homolog of NCBI NO: 18400774 NR Description: expressed protein [Arabidopsis thaliana]
  misc_feature (1)..(245): Homolog of NCBI NO: 18416995 NR Description: expressed protein [Arabidopsis thaliana]
  misc_feature (1)..(245): Homolog of NCBI NO: 30017570 NR Description: unknown protein [Oryza sativa (japonica
  misc_feature (1)..(248): Homolog of NCBI NO: 20340249 NR Description: aluminum-induced protein-like protein
  misc_feature (1)..(248): Homolog of NCBI NO: 15239993 NR Description: aluminum-induced protein-related [Arabidopsis
  misc_feature (1)..(248): Homolog of NCBI NO: 15228883 NR Description: expressed protein [Arabidopsis thaliana]
MLAIFDKNVAKTPEALQGQEGGSVCALKDRFLPNHFSSVYPGAVTINLGSSGFIACSLEKQNPLLPRLFAVVDDMFCIFQGHIENVPILKQQYGLTKTATEVTIVIEAYRTLRDRGPYSAEQVVRDFQGKFGFMLYDCSTQNVFLAGDVDGSVPLYWGTDAEGHLVVSDDVETVKKGCGKSFAPFPKGCFFTSSGGLRSYEHPSNELKPVPRVDSSGEVCGVTFKVDSEAKKEAMPRVGSVQNWSKQI

SEQ ID NO: 25170 - protein, 174 aa, Arabidopsis thaliana
  peptide (1)..(174): Ceres Seq. ID no. 13491386
  misc_feature (1)..(174): Homolog of NCBI NO: 15228883 NR Description: expressed protein [Arabidopsis thaliana]
  misc_feature (1)..(171): Homolog of NCBI NO: 18400774 NR Description: expressed protein [Arabidopsis thaliana]
  misc_feature (1)..(171): Homolog of NCBI NO: 18416995 NR Description: expressed protein [Arabidopsis thaliana]
  misc_feature (1)..(171): Homolog of NCBI NO: 30017570 NR Description: unknown protein [Oryza sativa (japonica
  misc_feature (1)..(174): Homolog of NCBI NO: 20340249 NR Description: aluminum-induced protein-like protein
  misc_feature (1)..(174): Homolog of NCBI NO: 15239993 NR Description: aluminum-induced protein-related [Arabidopsis
MFCIFQGHIENVPILKQQYGLTKTATEVTIVIEAYRTLRDRGPYSAEQVVRDFQGKFGFMLYDCSTQNVFLAGDVDGSVPLYWGTDAEGHLVVSDDVETVKKGCGKSFAPFPKGCFFTSSGGLRSYEHPSNELKPVPRVDSSGEVCGVTFKVDSEAKKEAMPRVGSVQNWSKQI

SEQ ID NO: 25171 - DNA, 1177 bp, Arabidopsis thaliana
  misc_feature (1)..(1177): Ceres Seq. ID no. 12322062
  misc_feature: MA Experiment ID: 108433 Result: Down-regulated in Transcription
  misc_feature: MA Experiment 108433 PARAMETER Experiment Name: At_rhl_Mutant2_cDNA_P Parameter: Age (day) Value: 7
  misc_feature: MA Experiment 108433 PARAMETER Experiment Name: At_rhl_Mutant2_cDNA_P Parameter: Organism Value: A. thaliana
  misc_feature: MA Experiment 108433 PARAMETER Experiment Name: At_rhl_Mutant2_cDNA_P Parameter: Plant Line Value: rhl Mutant vs. wt landsburg
  misc_feature: MA Experiment 108433 PARAMETER Experiment Name: At_rhl_Mutant2_cDNA_P Parameter: Tissue Value: Roots
  misc_feature: MA Experiment ID: 108434 Result: Up-regulated in Transcription
  misc_feature: MA Experiment 108434 PARAMETER Experiment Name: At_Root_Tips_cDNA_P Parameter: Tissue Value: Root Tips
  misc_feature: MA Experiment ID: 108461 Result: Up-regulated in Transcription
  misc_feature: MA Experiment 108461 PARAMETER Experiment Name: At_Germinating_Seeds_cDNA_P Parameter: Age (day) Value: 1 vs. 0
  misc_feature: MA Experiment 108461 PARAMETER Experiment Name: At_Germinating_Seeds_cDNA_P Parameter: Tissue Value: Germinating Seeds
  misc_feature: MA Experiment ID: 20000089 Result: Down-regulated in Transcription
  misc_feature: MA Experiment ID: 20000117 Result: Down-regulated in Transcription
  misc_feature: MA Experiment 20000117 PARAMETER Experiment Name: At_100uM_ABA_Mutants_cDNA_P Parameter: Plant Line Value: Columbia
  misc_feature: MA Experiment 20000117 PARAMETER Experiment Name: At_100uM_ABA_Mutants_cDNA_P Parameter: Timepoint (hr) Value: 6
  misc_feature: MA Experiment 20000117 PARAMETER Experiment Name: At_100uM_ABA_Mutants_cDNA_P Parameter: Tissue Value: Aerial
  misc_feature: MA Experiment 20000117 PARAMETER Experiment Name: At_100uM_ABA_Mutants_cDNA_P Parameter: Treatment Value: 100uM ABA vs. No Treatment
  misc_feature: MA Experiment ID: 20000180 Result: Up-regulated in Transcription
  misc_feature: MA Experiment 20000180 PARAMETER Experiment Name: At_Germinating_Seeds_P Parameter: Age (hr) Value: 24 vs. 0
  misc_feature: MA Experiment 20000180 PARAMETER Experiment Name: At_Germinating_Seeds_P Parameter: Tissue Value: Germinating Seeds
  misc_feature: MA Experiment ID: 20000185 Result: Up-regulated in Transcription
  misc_feature: MA Experiment 20000185 PARAMETER Experiment Name: At_Roots__P Parameter: Age (day) Value: 7 vs. 21
  misc_feature: MA Experiment 20000185 PARAMETER Experiment Name: At_Roots__P Parameter: Organism Value: A. thaliana
  misc_feature: MA Experiment 20000185 PARAMETER Experiment Name: At_Roots__P Parameter: Tissue Value: Roots vs. Whole Plant
  misc_feature: MA Experiment ID: 20000495 Result: Up-regulated in Transcription
  misc_feature: MA Experiment 20000495 PARAMETER Experiment Name: At_Guard_Cells_P Parameter: Harvest Date Value: 8/2/2002
  misc_feature: MA Experiment 20000495 PARAMETER Experiment Name: At_Guard_Cells_P Parameter: Organism Value: A. thaliana
  misc_feature: MA Experiment 20000495 PARAMETER Experiment Name: At_Guard_Cells_P Parameter: Tissue Value: Guard Cells vs. Leaves
  misc_feature: MA Experiment ID: 20000794 Result: Down-regulated in Transcription
  misc_feature: MA Experiment 20000794 PARAMETER Experiment Name: At_Petals_P Parameter: Age (day) Value: 23-25 days
  misc_feature: MA Experiment 20000794 PARAMETER Experiment Name: At_Petals_P Parameter: Plant Line Value: WS
  misc_feature: MA Experiment 20000794 PARAMETER Experiment Name: At_Petals_P Parameter: Tissue Value: Petals vs. Whole plant
aattttaataatcttgaatttagagaaaaagggtaaagcttgtcatcaacttattcgacagtttatataaaaaccgagtcatctttcatcggaagtacttccctccggcccattttctgacgccggcgatactctctttcacctctttctttctttcttctctgtcttttttgctttgtttctctccagtgaggaaaatggcggagtcattacgattctccgactgaaaaaagaagttaaaacctttgaaagaagaggaagaatttgaaagaaaggaaaatgctttgccggaaaaactcaagcttggtggacagaggaaatgttccggtttatctgaatgtctacgatcttactcccattaatggctatgcttactggcttggtcttggcgtttaccattctggtgttgaagttcatggtatagagtatgcttatggagctcatgaatatccaagcactgggatattcgaaggggagccgaagcaatgtgaaggctttacgtttaggaaatcgattttgattggtaaaacggatcttggtcctttggaagtcagagctactatggagcaacttgctgacaactacaaaggaagttcttacaatcttatcaccaagaactgcaaccatttctgcgatgaaacttgtattaagttaactgggaatccaattcctagttgggttaaccgccttgcccgaatcggcttcatgtgcaactgtgtgcttcctgcgactataaacgcgaccaggtttggaaacaacagagtcaatcaagacaaatcatgtgaagcagaaaatgagaagaagaaactgacgagtgtatcgagcagagagaggtctaccattgctactccttcgtcgtcttcttcgtctccttcagttcaagttcgcggtcgaagcaggaaaaggcgtcctcgtgctctgcaaccttcatcgccattgactctcggatcttcctccgtttgactataagtaaaatgaaatttggctttgtttggtaaatccatttttgatctctcaactagagagaccactctgtatttcttctattaattgcgagtgtgctctgtaatcttgttaatatgcaaacctttttcttttcttttttttgtaatcttatttgcattttcgtttcagattttggactttatttttacagtcagatatcaaattctcggtc

SEQ ID NO: 25172 - protein, 227 aa, Arabidopsis thaliana
  peptide (1)..(227): Ceres Seq. ID no. 12322063
  misc_feature (15)..(138): Pfam Name: Eukaryotic protein of unknown function (DUF862) Pfam Description: Eukaryotic protein of unknown function (DUF862)
  misc_feature (16)..(186): Homolog of NCBI NO: 30684058 NR Description: expressed protein [Arabidopsis thaliana]
  misc_feature (13)..(198): Homolog of NCBI NO: 9802596 NR Description: T2E6.19 [Arabidopsis thaliana]
  misc_feature (13)..(198): Homolog of NCBI NO: 18401869 NR Description: expressed protein
  misc_feature (13)..(204): Homolog of NCBI NO: 21593644 NR Description: unknown [Arabidopsis thaliana]
  misc_feature (1)..(220): Homolog of NCBI NO: 17529024 NR Description: unknown protein [Arabidopsis thaliana]
  misc_feature (1)..(220): Homolog of NCBI NO: 15236618 NR Description: putative protein; protein id: At4g31980.1
  misc_feature (1)..(218): Homolog of NCBI NO: 18400749 NR Description: expressed protein
  misc_feature (1)..(222): Homolog of NCBI NO: 18420889 NR Description: putative protein
  misc_feature (1)..(227): Homolog of NCBI NO: 25354458 NR Description: hypothetical protein F23A5.4 [imported] -
  misc_feature (1)..(227): Homolog of NCBI NO: 18412886 NR Description: expressed protein
MLCRKNSSLVDRGNVPVYLNVYDLTPINGYAYWLGLGVYHSGVEVHGIEYAYGAHEYPSTGIFEGEPKQCEGFTFRKSILIGKTDLGPLEVRATMEQLADNYKGSSYNLITKNCNHFCDETCIKLTGNPIPSWVNRLARIGFMCNCVLPATINATRFGNNRVNQDKSCEAENEKKKLTSVSSRERSTIATPSSSSSSPSVQVRGRSRKRRPRALQPSSPLTLGSSSV

SEQ ID NO: 25173 - protein, 133 aa, Arabidopsis thaliana
  peptide (1)..(133): Ceres Seq. ID no. 12322064
  misc_feature (1)..(92): Homolog of NCBI NO: 30684058 NR Description: expressed protein [Arabidopsis thaliana]
  misc_feature (1)..(104): Homolog of NCBI NO: 9802596 NR Description: T2E6.19 [Arabidopsis thaliana]
  misc_feature (1)..(104): Homolog of NCBI NO: 18401869 NR Description: expressed protein
  misc_feature (1)..(110): Homolog of NCBI NO: 21593644 NR Description: unknown [Arabidopsis thaliana]
  misc_feature (1)..(126): Homolog of NCBI NO: 17529024 NR Description: unknown protein [Arabidopsis thaliana]
  misc_feature (1)..(126): Homolog of NCBI NO: 15236618 NR Description: putative protein; protein id: At4g31980.1
  misc_feature (1)..(124): Homolog of NCBI NO: 18400749 NR Description: expressed protein
  misc_feature (1)..(128): Homolog of NCBI NO: 18420889 NR Description: putative protein
  misc_feature (1)..(133): Homolog of NCBI NO: 25354458 NR Description: hypothetical protein F23A5.4 [imported] -
  misc_feature (1)..(133): Homolog of NCBI NO: 18412886 NR Description: expressed protein
MEQLADNYKGSSYNLITKNCNHFCDETCIKLTGNPIPSWVNRLARIGFMCNCVLPATINATRFGNNRVNQDKSCEAENEKKKLTSVSSRERSTIATPSSSSSSPSVQVRGRSRKRRPRALQPSSPLTLGSSSV

SEQ ID NO: 25174 - DNA, 1062 bp, Arabidopsis thaliana
  misc_feature (1)..(1062): Ceres Seq. ID no. 12422467
  misc_feature: MA Experiment ID: 108434 Result: Up-regulated in Transcription
  misc_feature: MA Experiment 108434 PARAMETER Experiment Name: At_Root_Tips_cDNA_P Parameter: Tissue Value: Root Tips
  misc_feature: MA Experiment ID: 108462 Result: Down-regulated in Transcription
  misc_feature: MA Experiment 108462 PARAMETER Experiment Name: At_Germinating_Seeds_cDNA_P Parameter: Age (day) Value: 2 vs. 0
  misc_feature: MA Experiment 108462 PARAMETER Experiment Name: At_Germinating_Seeds_cDNA_P Parameter: Tissue Value: Germinating Seeds
  misc_feature: MA Experiment ID: 108463 Result: Down-regulated in Transcription
  misc_feature: MA Experiment 108463 PARAMETER Experiment Name: At_Germinating_Seeds_cDNA_P Parameter: Age (day) Value: 3 vs. 0
  misc_feature: MA Experiment 108463 PARAMETER Experiment Name: At_Germinating_Seeds_cDNA_P Parameter: Tissue Value: Germinating Seeds
  misc_feature: MA Experiment ID: 108464 Result: Down-regulated in Transcription
  misc_feature: MA Experiment 108464 PARAMETER Experiment Name: At_Germinating_Seeds_cDNA_P Parameter: Age (day) Value: 4 vs. 0
  misc_feature: MA Experiment 108464 PARAMETER Experiment Name: At_Germinating_Seeds_cDNA_P Parameter: Tissue Value: Germinating Seeds
  misc_feature: MA Experiment ID: 108585 Result: Up-regulated in Transcription
  misc_feature: MA Experiment 108585 PARAMETER Experiment Name: At_5mM_NaNP_cDNA_P Parameter: Timepoint (hr) Value: 6
  misc_feature: MA Experiment 108585 PARAMETER Experiment Name: At_5mM_NaNP_cDNA_P Parameter: Tissue Value: Aerial
  misc_feature: MA Experiment 108585 PARAMETER Experiment Name: At_5mM_NaNP_cDNA_P Parameter: Treatment Value: null
  misc_feature: MA Experiment ID: 108595 Result: Up-regulated in Transcription
  misc_feature: MA Experiment 108595 PARAMETER Experiment Name: At_Ler-pi_Ovule_cDNA_P Parameter: Plant Line Value: null
  misc_feature: MA Experiment ID: 20000093 Result: Up-regulated in Transcription
  misc_feature: MA Experiment 20000093 PARAMETER Experiment Name: At_42deg_Heat_cDNA_P Parameter: Temperature (deg C) Value: 42 vs. 22
  misc_feature: MA Experiment 20000093 PARAMETER Experiment Name: At_42deg_Heat_cDNA_P Parameter: Timepoint (hr) Value: 0.5
  misc_feature: MA Experiment 20000093 PARAMETER Experiment Name: At_42deg_Heat_cDNA_P Parameter: Tissue Value: Aerial
  misc_feature: MA Experiment ID: 20000111 Result: Up-regulated in Transcription
  misc_feature: MA Experiment 20000111 PARAMETER Experiment Name: At_42deg_Heat_cDNA_P Parameter: Temperature (deg C) Value: 42 vs. 22
  misc_feature: MA Experiment 20000111 PARAMETER Experiment Name: At_42deg_Heat_cDNA_P Parameter: Timepoint (hr) Value: 6
  misc_feature: MA Experiment 20000111 PARAMETER Experiment Name: At_42deg_Heat_cDNA_P Parameter: Tissue Value: Aerial
  misc_feature: MA Experiment ID: 20000112 Result: Up-regulated in Transcription
  misc_feature: MA Experiment 20000112 PARAMETER Experiment Name: At_42deg_Heat_cDNA_P Parameter: Temperature (deg C) Value: 42 vs. 22
  misc_feature: MA Experiment 20000112 PARAMETER Experiment Name: At_42deg_Heat_cDNA_P Parameter: Timepoint (hr) Value: 2
  misc_feature: MA Experiment 20000112 PARAMETER Experiment Name: At_42deg_Heat_cDNA_P Parameter: Tissue Value: Aerial
  misc_feature: MA Experiment ID: 20000113 Result: Up-regulated in Transcription
  misc_feature: MA Experiment 20000113 PARAMETER Experiment Name: At_42deg_Heat_cDNA_P Parameter: Temperature (deg C) Value: 42 vs. 22
  misc_feature: MA Experiment 20000113 PARAMETER Experiment Name: At_42deg_Heat_cDNA_P Parameter: Timepoint (hr) Value: 8
  misc_feature: MA Experiment 20000113 PARAMETER Experiment Name: At_42deg_Heat_cDNA_P Parameter: Tissue Value: Aerial
  misc_feature: MA Experiment ID: 20000144 Result: Up-regulated in Transcription
  misc_feature: MA Experiment 20000144 PARAMETER Experiment Name: At_42deg_Heat_cDNA_P Parameter: Temperature (deg C) Value: 42 vs. 22
  misc_feature: MA Experiment 20000144 PARAMETER Experiment Name: At_42deg_Heat_cDNA_P Parameter: Timepoint (hr) Value: 1
  misc_feature: MA Experiment 20000144 PARAMETER Experiment Name: At_42deg_Heat_cDNA_P Parameter: Tissue Value: Aerial
  misc_feature: MA Experiment ID: 20000171 Result: Up-regulated in Transcription
  misc_feature: MA Experiment 20000171 PARAMETER Experiment Name: At_42deg_Heat_P Parameter: Age (day) Value: 14
  misc_feature: MA Experiment 20000171 PARAMETER Experiment Name: At_42deg_Heat_P Parameter: Organism Value: A. thaliana
  misc_feature: MA Experiment 20000171 PARAMETER Experiment Name: At_42deg_Heat_P Parameter: Plant Line Value: WS
  misc_feature: MA Experiment 20000171 PARAMETER Experiment Name: At_42deg_Heat_P Parameter: Temperature (deg C) Value: 42 vs. 22
  misc_feature: MA Experiment 20000171 PARAMETER Experiment Name: At_42deg_Heat_P Parameter: Timepoint (hr) Value: 1
  misc_feature: MA Experiment 20000171 PARAMETER Experiment Name: At_42deg_Heat_P Parameter: Tissue Value: Aerial
  misc_feature: MA Experiment ID: 20000314 Result: Up-regulated in Transcription
  misc_feature: MA Experiment 20000314 PARAMETER Experiment Name: At_14day_Shoots-Roots_Sub_P Parameter: Age (day) Value: 14
  misc_feature: MA Experiment 20000314 PARAMETER Experiment Name: At_14day_Shoots-Roots_Sub_P Parameter: Organism Value: A. thaliana
  misc_feature: MA Experiment 20000314 PARAMETER Experiment Name: At_14day_Shoots-Roots_Sub_P Parameter: Plant Line Value: WS
  misc_feature: MA Experiment 20000314 PARAMETER Experiment Name: At_14day_Shoots-Roots_Sub_P Parameter: Tissue Value: Roots vs. Whole Plant
  misc_feature: MA Experiment ID: 20000327 Result: Up-regulated in Transcription
  misc_feature: MA Experiment 20000327 PARAMETER Experiment Name: At_42deg_Heat_Sub_P Parameter: Age (day) Value: 14
  misc_feature: MA Experiment 20000327 PARAMETER Experiment Name: At_42deg_Heat_Sub_P Parameter: Organism Value: A. thaliana
  misc_feature: MA Experiment 20000327 PARAMETER Experiment Name: At_42deg_Heat_Sub_P Parameter: Plant Line Value: WS
  misc_feature: MA Experiment 20000327 PARAMETER Experiment Name: At_42deg_Heat_Sub_P Parameter: Temperature (deg C) Value: 42 vs. 22
  misc_feature: MA Experiment 20000327 PARAMETER Experiment Name: At_42deg_Heat_Sub_P Parameter: Timepoint (hr) Value: 1
  misc_feature: MA Experiment 20000327 PARAMETER Experiment Name: At_42deg_Heat_Sub_P Parameter: Tissue Value: Aerial
  misc_feature: MA Experiment ID: 20001451 Result: Up-regulated in Transcription
  misc_feature: MA Experiment 20001451 PARAMETER Experiment Name: At_Far-red-induction_P Parameter: Age (day) Value: 7
  misc_feature: MA Experiment 20001451 PARAMETER Experiment Name: At_Far-red-induction_P Parameter: Light Value: Far-red vs. White
  misc_feature: MA Experiment 20001451 PARAMETER Experiment Name: At_Far-red-induction_P Parameter: Organism Value: A. thaliana
  misc_feature: MA Experiment 20001451 PARAMETER Experiment Name: At_Far-red-induction_P Parameter: Plant Line Value: Columbia
  misc_feature: MA Experiment 20001451 PARAMETER Experiment Name: At_Far-red-induction_P Parameter: Timepoint (hr) Value: 24
  misc_feature: MA Experiment 20001451 PARAMETER Experiment Name: At_Far-red-induction_P Parameter: Tissue Value: Whole Plant
agaagtttgggattttattcgttattagtgtggtaagaaagaaaaccctaaaccaccggaaatcgatttgtttggaagatggatatcgagcagaagcaagccgagatcattgatcagctcgtgaagcgagcttctacttgcaaatccgaggctctgggcccgctcatcatcgaagccacatcgcatccttctctcttcgccttctccgagattttggctctacccaatgttgcccagcttgaaggaaccacagattctgtgtacctggatctactacgcttgtttgcccatggcacctggggagactacaaatgcaatgccacccgtcttccgcacttgtcccctgaccaaattcttaagcttaagcagctcactgtcctcacccttgctgagtctaacaaggtattgccctatgatacactaatggtcgagttagatgtttccaatgttcgcgaactcgaggactttcttatcaatgaatgcatgtatgcgggtatagttaggggaaaactggatcagttaaaaagatgttttgaggttccgtttgcagctggtagggatctaaggccaggtcaactagggaatatgttacacacattgtccaactggttgaacacgtcagagaatctgctcatttcaattcaagacaagatcaaatgggcggacaatatgagtgagatggacaaaaaacatcgtaaggaagcagaagaaggggtggaagaagtgaagaagtctctgtccatgaagggggatgttgacatcagagggaataaggagatgtttggggaaccaagtggagtgatggactacgaagaagatgggatccgaccaaagaggaggaggcatcctgtaacaaggtagaggagcaagagagagcaaatggtcagtgcggattgacattccatttaccgagagtagattatgattatttggttgcggattttcaacttgtataagatcctctgttctctctcacaataaccccttgttatgtttgatttccctcattagcaaatttggtgtctctctgcccattaaaagaaaaatggctttgaatttagt

SEQ ID NO: 25175 - protein, 260 aa, Arabidopsis thaliana
  peptide (1)..(260): Ceres Seq. ID no. 12422468
  misc_feature (60)..(156): Pfam Name: PCI domain Pfam Description: PCI domain
  misc_feature (12)..(222): Homolog of NCBI NO: 6120135 NR Description: COP9 complex subunit 7a [Homo sapiens]
  misc_feature (18)..(257): Homolog of NCBI NO: 22024078 NR Description: CG2038-PA [Drosophila melanogaster]
  misc_feature (11)..(259): Homolog of NCBI NO: 37589772 NR Description: Unknown (protein for IMAGE:4786730) [Danio rerio]
  misc_feature (4)..(220): Homolog of NCBI NO: 34877558 NR Description: similar to Cops7b protein [Rattus norvegicus]
  misc_feature (4)..(220): Homolog of NCBI NO: 3309176 NR Description: COP9 complex subunit 7b [Mus musculus]
  misc_feature (4)..(220): Homolog of NCBI NO: 27764886 NR Description: COP9 (constitutive photomorphogenic) homolog,
  misc_feature (4)..(220): Homolog of NCBI NO: 15215085 NR Description: Similar to COP9 (constitutive photomorphogenic),
  misc_feature (4)..(220): Homolog of NCBI NO: 12232385 NR Description: COP9 constitutive photomorphogenic homolog
  misc_feature (1)..(223): Homolog of NCBI NO: 30678240 NR Description: COP9 complex subunit, FUS5 [Arabidopsis thaliana]
  misc_feature (1)..(260): Homolog of NCBI NO: 18378920 NR Description: COP9 complex subunit, FUS5
MDIEQKQAEIIDQLVKRASTCKSEALGPLIIEATSHPSLFAFSEILALPNVAQLEGTTDSVYLDLLRLFAHGTWGDYKCNATRLPHLSPDQILKLKQLTVLTLAESNKVLPYDTLMVELDVSNVRELEDFLINECMYAGIVRGKLDQLKRCFEVPFAAGRDLRPGQLGNMLHTLSNWLNTSENLLISIQDKIKWADNMSEMDKKHRKEAEEGVEEVKKSLSMKGDVDIRGNKEMFGEPSGVMDYEEDGIRPKRRRHPVTR

SEQ ID NO: 25176 - protein, 145 aa, Arabidopsis thaliana
  peptide (1)..(145): Ceres Seq. ID no. 12422469
  misc_feature (1)..(107): Homolog of NCBI NO: 6120135 NR Description: COP9 complex subunit 7a [Homo sapiens]
  misc_feature (1)..(142): Homolog of NCBI NO: 22024078 NR Description: CG2038-PA [Drosophila melanogaster]
  misc_feature (1)..(144): Homolog of NCBI NO: 37589772 NR Description: Unknown (protein for IMAGE:4786730) [Danio rerio]
  misc_feature (1)..(105): Homolog of NCBI NO: 34877558 NR Description: similar to Cops7b protein [Rattus norvegicus]
  misc_feature (1)..(105): Homolog of NCBI NO: 3309176 NR Description: COP9 complex subunit 7b [Mus musculus]
  misc_feature (1)..(105): Homolog of NCBI NO: 27764886 NR Description: COP9 (constitutive photomorphogenic) homolog,
  misc_feature (1)..(105): Homolog of NCBI NO: 15215085 NR Description: Similar to COP9 (constitutive photomorphogenic),
  misc_feature (1)..(105): Homolog of NCBI NO: 12232385 NR Description: COP9 constitutive photomorphogenic homolog
  misc_feature (1)..(108): Homolog of NCBI NO: 30678240 NR Description: COP9 complex subunit, FUS5 [Arabidopsis thaliana]
  misc_feature (1)..(145): Homolog of NCBI NO: 18378920 NR Description: COP9 complex subunit, FUS5
MVELDVSNVRELEDFLINECMYAGIVRGKLDQLKRCFEVPFAAGRDLRPGQLGNMLHTLSNWLNTSENLLISIQDKIKWADNMSEMDKKHRKEAEEGVEEVKKSLSMKGDVDIRGNKEMFGEPSGVMDYEEDGIRPKRRRHPVTR

SEQ ID NO: 25177 - DNA, 2006 bp, Arabidopsis thaliana
  misc_feature (1)..(2006): Ceres Seq. ID no. 12371524
  misc_feature: MA Experiment ID: 108569 Result: Down-regulated in Transcription
  misc_feature: MA Experiment 108569 PARAMETER Experiment Name: At_0.001%_MeJA__cDNA_P Parameter: Timepoint (hr) Value: 6
  misc_feature: MA Experiment 108569 PARAMETER Experiment Name: At_0.001%_MeJA__cDNA_P Parameter: Tissue Value: Aerial
  misc_feature: MA Experiment 108569 PARAMETER Experiment Name: At_0.001%_MeJA__cDNA_P Parameter: Treatment Value: 0.001% MeJA vs. No Treatment
  misc_feature: MA Experiment ID: 108577 Result: Up-regulated in Transcription
  misc_feature: MA Experiment 108577 PARAMETER Experiment Name: At_42deg_Heat_cDNA_P Parameter: Temperature (deg C) Value: 42 vs. 22
  misc_feature: MA Experiment 108577 PARAMETER Experiment Name: At_42deg_Heat_cDNA_P Parameter: Timepoint (hr) Value: 6
  misc_feature: MA Experiment 108577 PARAMETER Experiment Name: At_42deg_Heat_cDNA_P Parameter: Tissue Value: Aerial
  misc_feature: MA Experiment ID: 20000111 Result: Up-regulated in Transcription
  misc_feature: MA Experiment 20000111 PARAMETER Experiment Name: At_42deg_Heat_cDNA_P Parameter: Temperature (deg C) Value: 42 vs. 22
  misc_feature: MA Experiment 20000111 PARAMETER Experiment Name: At_42deg_Heat_cDNA_P Parameter: Timepoint (hr) Value: 6
  misc_feature: MA Experiment 20000111 PARAMETER Experiment Name: At_42deg_Heat_cDNA_P Parameter: Tissue Value: Aerial
  misc_feature: MA Experiment ID: 20000112 Result: Up-regulated in Transcription
  misc_feature: MA Experiment 20000112 PARAMETER Experiment Name: At_42deg_Heat_cDNA_P Parameter: Temperature (deg C) Value: 42 vs. 22
  misc_feature: MA Experiment 20000112 PARAMETER Experiment Name: At_42deg_Heat_cDNA_P Parameter: Timepoint (hr) Value: 2
  misc_feature: MA Experiment 20000112 PARAMETER Experiment Name: At_42deg_Heat_cDNA_P Parameter: Tissue Value: Aerial
  misc_feature: MA Experiment ID: 20000184 Result: Down-regulated in Transcription
  misc_feature: MA Experiment 20000184 PARAMETER Experiment Name: At_Shoots__P Parameter: Age (day) Value: 7
  misc_feature: MA Experiment 20000184 PARAMETER Experiment Name: At_Shoots__P Parameter: Tissue Value: Shoots vs. Whole Plant
  misc_feature: MA Experiment ID: 20000234 Result: Up-regulated in Transcription
  misc_feature: MA Experiment 20000234 PARAMETER Experiment Name: At_Siliques_P Parameter: Age (day) Value: 21
  misc_feature: MA Experiment 20000234 PARAMETER Experiment Name: At_Siliques_P Parameter: Organism Value: A. thaliana
  misc_feature: MA Experiment 20000234 PARAMETER Experiment Name: At_Siliques_P Parameter: Plant Line Value: WS
  misc_feature: MA Experiment 20000234 PARAMETER Experiment Name: At_Siliques_P Parameter: Tissue Value: Less Than 5mm Siliques vs. Whole Plant
  misc_feature: MA Experiment ID: 20000235 Result: Up-regulated in Transcription
  misc_feature: MA Experiment 20000235 PARAMETER Experiment Name: At_Siliques_P Parameter: Age (day) Value: 21
  misc_feature: MA Experiment 20000235 PARAMETER Experiment Name: At_Siliques_P Parameter: Organism Value: A. thaliana
  misc_feature: MA Experiment 20000235 PARAMETER Experiment Name: At_Siliques_P Parameter: Plant Line Value: WS
  misc_feature: MA Experiment 20000235 PARAMETER Experiment Name: At_Siliques_P Parameter: Tissue Value: 5-10mm Siliques vs. Whole Plant
  misc_feature: MA Experiment ID: 20000265 Result: Up-regulated in Transcription
  misc_feature: MA Experiment 20000265 PARAMETER Experiment Name: At_Open_Flower_P Parameter: Age (day) Value: 21
  misc_feature: MA Experiment 20000265 PARAMETER Experiment Name: At_Open_Flower_P Parameter: Plant Line Value: WS
  misc_feature: MA Experiment 20000265 PARAMETER Experiment Name: At_Open_Flower_P Parameter: Tissue Value: Closed Flower vs. Whole Plant
  misc_feature: MA Experiment ID: 20000286 Result: Up-regulated in Transcription
  misc_feature: MA Experiment 20000286 PARAMETER Experiment Name: At_Open_Flower_P Parameter: Age (day) Value: 21
  misc_feature: MA Experiment 20000286 PARAMETER Experiment Name: At_Open_Flower_P Parameter: Plant Line Value: WS
  misc_feature: MA Experiment 20000286 PARAMETER Experiment Name: At_Open_Flower_P Parameter: Tissue Value: Half Open vs. Whole Plant
  misc_feature: MA Experiment ID: 20000794 Result: Up-regulated in Transcription
  misc_feature: MA Experiment 20000794 PARAMETER Experiment Name: At_Petals_P Parameter: Age (day) Value: 23-25 days
  misc_feature: MA Experiment 20000794 PARAMETER Experiment Name: At_Petals_P Parameter: Plant Line Value: WS
  misc_feature: MA Experiment 20000794 PARAMETER Experiment Name: At_Petals_P Parameter: Tissue Value: Petals vs. Whole plant
  misc_feature: MA Experiment ID: 20001773 Result: Up-regulated in Transcription
  misc_feature: MA Experiment 20001773 PARAMETER Experiment Name: At_Far-red-enriched-adult_P Parameter: Age (day) Value: 30
  misc_feature: MA Experiment 20001773 PARAMETER Experiment Name: At_Far-red-enriched-adult_P Parameter: Light Value: Far-red enriched vs. White
  misc_feature: MA Experiment 20001773 PARAMETER Experiment Name: At_Far-red-enriched-adult_P Parameter: Organism Value: A. thaliana
  misc_feature: MA Experiment 20001773 PARAMETER Experiment Name: At_Far-red-enriched-adult_P Parameter: Plant Line Value: Columbia
  misc_feature: MA Experiment 20001773 PARAMETER Experiment Name: At_Far-red-enriched-adult_P Parameter: Timepoint (hr) Value: 48
  misc_feature: MA Experiment 20001773 PARAMETER Experiment Name: At_Far-red-enriched-adult_P Parameter: Tissue Value: Aerial
  misc_feature: MA Experiment ID: 20001910 Result: Up-regulated in Transcription
  misc_feature: MA Experiment 20001910 PARAMETER Experiment Name: At_Drought_Reproduction_P Parameter: Age (day) Value: 37
  misc_feature: MA Experiment 20001910 PARAMETER Experiment Name: At_Drought_Reproduction_P Parameter: Organism Value: A. thaliana
  misc_feature: MA Experiment 20001910 PARAMETER Experiment Name: At_Drought_Reproduction_P Parameter: Plant Line Value: WS
  misc_feature: MA Experiment 20001910 PARAMETER Experiment Name: At_Drought_Reproduction_P Parameter: Timepoint (day) Value: 7
  misc_feature: MA Experiment 20001910 PARAMETER Experiment Name: At_Drought_Reproduction_P Parameter: Tissue Value: Flowers
  misc_feature: MA Experiment 20001910 PARAMETER Experiment Name: At_Drought_Reproduction_P Parameter: Treatment Value: Drought vs. No Drought
actggcctaagtcattcaacaatttggctttaatctaataaagcctctccctctccgattaaccttaataaatccggagggatcggagagaaaaaagaaccaaaaaaaaaaaaaaacagaaaaaaaaaaatgattggaaaagttgtggtctcggtggcctccatcctcttaatagtcggagttgccataggagtcgttgccttcataaacaaaaatggcgatgctaatctgtctccccaaatgaaagcggttcaaggaatttgccagtcgacatccgacaaagcctcatgtgtcaaaactctcgagccggtcaagagcgaggacccaaacaagctgatcaaggctttcatgctcgctacaaaagacgaattaaccaaatcgtctaacttcacgggtcaaaccgaagtaaacatgggctcgagcatctcgccaaacaacaaagccgttcttgattactgcaagagagttttcatgtacgctcttgaggatctcgctaccattattgaagaaatgggtgaagatcttagccagatcgggagcaaaatcgaccagctcaaacaatggttaatcggtgtttacaattaccaaactgattgtcttgacgatatcgaagaagatgatttaagaaaggcgattggtgagggcattgcaaactccaagattctcactaccaacgctattgacatcttccacactgtcgttagcgccatggccaagattaacaacaaggttgacgacttgaagaacatgacaggcggaatccccactcccggagcccctcctgttgttgatgaatctcccgtggccgacccagatggtcctgctcgtcgtcttcttgaagacattgacgagaccggaatcccaacatgggtttcaggtgctgacaggaagctcatggctaaggctggacgtggccgtagaggcggccgcggaggcggtgctagggtcagaacgaactttgtggtggctaaggatggaagcggacagtttaagacggttcaacaagccgttgatgcttgtcctgagaataaccgaggccgatgcatcatctacatcaaggccggtctctacagagagcaagtaatcatccctaagaagaagaacaacatcttcatgtttggagatggtgcaagaaagaccgtcatttcttacaacagaagtgttgctctcagccgtggaaccaccacatccctcagtgccacagttcaggttgaatcggaaggattcatggcgaaatggatgggattcaagaacaccgccggtccaatgggacaccaagccgcggctatccgagtgaacggagaccgtgccgtgatcttcaactgcagattcgacggttatcaagacacattgtacgttaacaacggtcgtcagttctacagaaactgtgtggtctcgggaacagtagacttcatcttcggcaaatccgcaaccgtgatccaaaacacactaattgttgtccgtaaaggaagcaagggacaatacaacacggtcacagccgatggaaacgaattgggcttagggatgaaaattggtatcgtcctccaaaactgccgcatcgtgcccgacaggaaactaacgccagagagacttacggtggcgacatacttgggaaggccgtggaagaaattctcgaccaccgtgataatgagcaccgagatgggagatttgattagaccagaagggtggaagatttgggatggggaaagtttccacaagtcatgtaggtacgttgagtacaacaaccgtggaccaggagcattcgctaacagaagagttaactgggctaaggttgccaggtctgcagctgaggtcaatggcttcacagctgctaactggttaggtcctattaactggattcaagaagccaatgttcctgtcacaattggattataatttataaagcgtatatgaaaattattttagtttttaagtatatgaaaattggtgtatgaaattggtttatgaaaactttttaagaaagtctataatgtttttcctctgtc

SEQ ID NO: 25178 - protein, 588 aa, Arabidopsis thaliana
  peptide (1)..(588): Ceres Seq. ID no. 12371525
  misc_feature (276)..(574): Pfam Name: Pectinesterase Pfam Description: Pectinesterase
  misc_feature (1)..(198): Homolog of NCBI NO: 21740906 NR Description: OSJNBa0036B21.20 [Oryza sativa (japonica
  misc_feature (229)..(587): Homolog of NCBI NO: 21740906 NR Description: OSJNBa0036B21.20 [Oryza sativa (japonica
  misc_feature (13)..(588): Homolog of NCBI NO: 6093741 NR Description: Pectinesterase (Pectin methylesterase) (PE)
  misc_feature (2)..(588): Homolog of NCBI NO: 1172538 NR Description: Probable pectinesterase precursor (Pectin
  misc_feature (2)..(588): Homolog of NCBI NO: 15228697 NR Description: pollen-specific pectin esterase, putative
  misc_feature (1)..(470): Homolog of NCBI NO: 23197964 NR Description: putative pectinesterase [Arabidopsis thaliana]
  misc_feature (1)..(588): Homolog of NCBI NO: 15226490 NR Description: pectinesterase family
  misc_feature (1)..(588): Homolog of NCBI NO: 25313437 NR Description: pectinesterase (EC 3.1.1.11) [imported] -
  misc_feature (1)..(588): Homolog of NCBI NO: 25313439 NR Description: pectinesterase (EC 3.1.1.11) precursor,
  misc_feature (1)..(588): Homolog of NCBI NO: 15226482 NR Description: pectinesterase family
MIGKVVVSVASILLIVGVAIGVVAFINKNGDANLSPQMKAVQGICQSTSDKASCVKTLEPVKSEDPNKLIKAFMLATKDELTKSSNFTGQTEVNMGSSISPNNKAVLDYCKRVFMYALEDLATIIEEMGEDLSQIGSKIDQLKQWLIGVYNYQTDCLDDIEEDDLRKAIGEGIANSKILTTNAIDIFHTVVSAMAKINNKVDDLKNMTGGIPTPGAPPVVDESPVADPDGPARRLLEDIDETGIPTWVSGADRKLMAKAGRGRRGGRGGGARVRTNFVVAKDGSGQFKTVQQAVDACPENNRGRCIIYIKAGLYREQVIIPKKKNNIFMFGDGARKTVISYNRSVALSRGTTTSLSATVQVESEGFMAKWMGFKNTAGPMGHQAAAIRVNGDRAVIFNCRFDGYQDTLYVNNGRQFYRNCVVSGTVDFIFGKSATVIQNTLIVVRKGSKGQYNTVTADGNELGLGMKIGIVLQNCRIVPDRKLTPERLTVATYLGRPWKKFSTTVIMSTEMGDLIRPEGWKIWDGESFHKSCRYVEYNNRGPGAFANRRVNWAKVARSAAEVNGFTAANWLGPINWIQEANVPVTIGL

SEQ ID NO: 25179 - protein, 551 aa, Arabidopsis thaliana
  peptide (1)..(551): Ceres Seq. ID no. 12371526
  misc_feature (239)..(537): Pfam Name: Pectinesterase Pfam Description: Pectinesterase
  misc_feature (1)..(161): Homolog of NCBI NO: 21740906 NR Description: OSJNBa0036B21.20 [Oryza sativa (japonica
  misc_feature (192)..(550): Homolog of NCBI NO: 21740906 NR Description: OSJNBa0036B21.20 [Oryza sativa (japonica
  misc_feature (1)..(551): Homolog of NCBI NO: 6093741 NR Description: Pectinesterase (Pectin methylesterase) (PE)
  misc_feature (1)..(551): Homolog of NCBI NO: 1172538 NR Description: Probable pectinesterase precursor (Pectin
  misc_feature (1)..(551): Homolog of NCBI NO: 15228697 NR Description: pollen-specific pectin esterase, putative
  misc_feature (1)..(433): Homolog of NCBI NO: 23197964 NR Description: putative pectinesterase [Arabidopsis thaliana]
  misc_feature (1)..(551): Homolog of NCBI NO: 15226490 NR Description: pectinesterase family
  misc_feature (1)..(551): Homolog of NCBI NO: 25313437 NR Description: pectinesterase (EC 3.1.1.11) [imported] -
  misc_feature (1)..(551): Homolog of NCBI NO: 25313439 NR Description: pectinesterase (EC 3.1.1.11) precursor,
  misc_feature (1)..(551): Homolog of NCBI NO: 15226482 NR Description: pectinesterase family
MKAVQGICQSTSDKASCVKTLEPVKSEDPNKLIKAFMLATKDELTKSSNFTGQTEVNMGSSISPNNKAVLDYCKRVFMYALEDLATIIEEMGEDLSQIGSKIDQLKQWLIGVYNYQTDCLDDIEEDDLRKAIGEGIANSKILTTNAIDIFHTVVSAMAKINNKVDDLKNMTGGIPTPGAPPVVDESPVADPDGPARRLLEDIDETGIPTWVSGADRKLMAKAGRGRRGGRGGGARVRTNFVVAKDGSGQFKTVQQAVDACPENNRGRCIIYIKAGLYREQVIIPKKKNNIFMFGDGARKTVISYNRSVALSRGTTTSLSATVQVESEGFMAKWMGFKNTAGPMGHQAAAIRVNGDRAVIFNCRFDGYQDTLYVNNGRQFYRNCVVSGTVDFIFGKSATVIQNTLIVVRKGSKGQYNTVTADGNELGLGMKIGIVLQNCRIVPDRKLTPERLTVATYLGRPWKKFSTTVIMSTEMGDLIRPEGWKIWDGESFHKSCRYVEYNNRGPGAFANRRVNWAKVARSAAEVNGFTAANWLGPINWIQEANVPVTIGL

SEQ ID NO: 25180 - protein, 515 aa, Arabidopsis thaliana
  peptide (1)..(515): Ceres Seq. ID no. 12371527
  misc_feature (203)..(501): Pfam Name: Pectinesterase Pfam Description: Pectinesterase
  misc_feature (1)..(125): Homolog of NCBI NO: 21740906 NR Description: OSJNBa0036B21.20 [Oryza sativa (japonica
  misc_feature (156)..(514): Homolog of NCBI NO: 21740906 NR Description: OSJNBa0036B21.20 [Oryza sativa (japonica
  misc_feature (1)..(515): Homolog of NCBI NO: 6093741 NR Description: Pectinesterase (Pectin methylesterase) (PE)
  misc_feature (1)..(515): Homolog of NCBI NO: 1172538 NR Description: Probable pectinesterase precursor (Pectin
  misc_feature (1)..(515): Homolog of NCBI NO: 15228697 NR Description: pollen-specific pectin esterase, putative
  misc_feature (1)..(397): Homolog of NCBI NO: 23197964 NR Description: putative pectinesterase [Arabidopsis thaliana]
  misc_feature (1)..(515): Homolog of NCBI NO: 15226490 NR Description: pectinesterase family
  misc_feature (1)..(515): Homolog of NCBI NO: 25313437 NR Description: pectinesterase (EC 3.1.1.11) [imported] -
  misc_feature (1)..(515): Homolog of NCBI NO: 25313439 NR Description: pectinesterase (EC 3.1.1.11) precursor,
  misc_feature (1)..(515): Homolog of NCBI NO: 15226482 NR Description: pectinesterase family
MLATKDELTKSSNFTGQTEVNMGSSISPNNKAVLDYCKRVFMYALEDLATIIEEMGEDLSQIGSKIDQLKQWLIGVYNYQTDCLDDIEEDDLRKAIGEGIANSKILTTNAIDIFHTVVSAMAKINNKVDDLKNMTGGIPTPGAPPVVDESPVADPDGPARRLLEDIDETGIPTWVSGADRKLMAKAGRGRRGGRGGGARVRTNFVVAKDGSGQFKTVQQAVDACPENNRGRCIIYIKAGLYREQVIIPKKKNNIFMFGDGARKTVISYNRSVALSRGTTTSLSATVQVESEGFMAKWMGFKNTAGPMGHQAAAIRVNGDRAVIFNCRFDGYQDTLYVNNGRQFYRNCVVSGTVDFIFGKSATVIQNTLIVVRKGSKGQYNTVTADGNELGLGMKIGIVLQNCRIVPDRKLTPERLTVATYLGRPWKKFSTTVIMSTEMGDLIRPEGWKIWDGESFHKSCRYVEYNNRGPGAFANRRVNWAKVARSAAEVNGFTAANWLGPINWIQEANVPVTIGL

SEQ ID NO: 25181 - DNA, 887 bp, Arabidopsis thaliana
  misc_feature (1)..(887): Ceres Seq. ID no. 12396998
  misc_feature: MA Experiment ID: 20000171 Result: Down-regulated in Transcription
  misc_feature: MA Experiment 20000171 PARAMETER Experiment Name: At_42deg_Heat_P Parameter: Age (day) Value: 14
  misc_feature: MA Experiment 20000171 PARAMETER Experiment Name: At_42deg_Heat_P Parameter: Organism Value: A. thaliana
  misc_feature: MA Experiment 20000171 PARAMETER Experiment Name: At_42deg_Heat_P Parameter: Plant Line Value: WS
  misc_feature: MA Experiment 20000171 PARAMETER Experiment Name: At_42deg_Heat_P Parameter: Temperature (deg C) Value: 42 vs. 22
  misc_feature: MA Experiment 20000171 PARAMETER Experiment Name: At_42deg_Heat_P Parameter: Timepoint (hr) Value: 1
  misc_feature: MA Experiment 20000171 PARAMETER Experiment Name: At_42deg_Heat_P Parameter: Tissue Value: Aerial
  misc_feature: MA Experiment ID: 20000185 Result: Down-regulated in Transcription
  misc_feature: MA Experiment 20000185 PARAMETER Experiment Name: At_Roots__P Parameter: Age (day) Value: 7 vs. 21
  misc_feature: MA Experiment 20000185 PARAMETER Experiment Name: At_Roots__P Parameter: Organism Value: A. thaliana
  misc_feature: MA Experiment 20000185 PARAMETER Experiment Name: At_Roots__P Parameter: Tissue Value: Roots vs. Whole Plant
  misc_feature: MA Experiment ID: 20000224 Result: Up-regulated in Transcription
  misc_feature: MA Experiment ID: 20001248 Result: Down-regulated in Transcription
  misc_feature: MA Experiment 20001248 PARAMETER Experiment Name: At_Far-red-induction_P Parameter: Age (day) Value: 7
  misc_feature: MA Experiment 20001248 PARAMETER Experiment Name: At_Far-red-induction_P Parameter: Light Value: Far-red vs. White
  misc_feature: MA Experiment 20001248 PARAMETER Experiment Name: At_Far-red-induction_P Parameter: Organism Value: A. thaliana
  misc_feature: MA Experiment 20001248 PARAMETER Experiment Name: At_Far-red-induction_P Parameter: Plant Line Value: Columbia
  misc_feature: MA Experiment 20001248 PARAMETER Experiment Name: At_Far-red-induction_P Parameter: Timepoint (hr) Value: 4
  misc_feature: MA Experiment 20001248 PARAMETER Experiment Name: At_Far-red-induction_P Parameter: Tissue Value: Whole Plant
  misc_feature: MA Experiment ID: 20001451 Result: Down-regulated in Transcription
  misc_feature: MA Experiment 20001451 PARAMETER Experiment Name: At_Far-red-induction_P Parameter: Age (day) Value: 7
  misc_feature: MA Experiment 20001451 PARAMETER Experiment Name: At_Far-red-induction_P Parameter: Light Value: Far-red vs. White
  misc_feature: MA Experiment 20001451 PARAMETER Experiment Name: At_Far-red-induction_P Parameter: Organism Value: A. thaliana
  misc_feature: MA Experiment 20001451 PARAMETER Experiment Name: At_Far-red-induction_P Parameter: Plant Line Value: Columbia
  misc_feature: MA Experiment 20001451 PARAMETER Experiment Name: At_Far-red-induction_P Parameter: Timepoint (hr) Value: 24
  misc_feature: MA Experiment 20001451 PARAMETER Experiment Name: At_Far-red-induction_P Parameter: Tissue Value: Whole Plant
gtcattttgagacgagagaaagagaaggtaatcggccacgatgacgatggcgacgcctttcagtggggctgcgaactctattgtggcggcgaggaccgttctgataacgggagtgagcaaaggtctgggaagagccctagctctcgagctggccaagaggggtcacactgtgataggatgcgctcgtagtcaagagaagctcaccgctcttcaatcggagctttcctcttcgaccaatcatctcctcctcaccgctgatgtgaaatcaaacagcagtgtcgaagaaatggcacacacaattgtggagaagaagggtgtcccagatatcatagttaacaatgctggtaccatcaataagaacagcaagatttgggaagtctctgctgaagattttgacaatgtcatggatacaaacgttaaaggagttgcaaatgtgctgcgccattttatccctttgatgctcccacgcaagcaaggaattattgtaaatatgtcttctggatggggaagatctggtgctgccctggttgcaccttactgtgcatcaaaatgggcgattgagggtttaagccgagcagtggcaaaggaagtagttgaaggaatggcagtagttgcattaaatccaggcgtgatcaacacagaattactcacttcctgcttcgggaactcagcttccttgtatcaagctcctgatgcttgggctgtgaaggctgcgacgatgattctgaatcttacagcgggtgacaatggcggatctctcacagtctaacaactaataaagctactcatttattttcaattagagtgttatggataaggttagaaataacaaacgtaaaaccaaatgaaacagactacaaatgattagaaaatgggccattagtttc

SEQ ID NO: 25182 - protein, 242 aa, Arabidopsis thaliana
  peptide (1)..(242): Ceres Seq. ID no. 12396999
  misc_feature (18)..(242): Homolog of NCBI NO: 17229376 NR Description: probable short-chain dehydrogenase [Nostoc sp.
  misc_feature (3)..(242): Homolog of NCBI NO: 21593553 NR Description: unknown [Arabidopsis thaliana]
  misc_feature (1)..(242): Homolog of NCBI NO: 18391139 NR Description: expressed protein
  misc_feature (9)..(213): Homolog of NCBI NO: 20091507 NR Description: 3-oxoacyl-
  misc_feature (14)..(230): Homolog of NCBI NO: 21399837 NR Description: adh_short, short chain dehydrogenase [Bacillus
  misc_feature (18)..(242): Homolog of NCBI NO: 20091506 NR Description: 3-oxoacyl-
  misc_feature (18)..(213): Homolog of NCBI NO: 21229327 NR Description: putative ketoreductase [Methanosarcina mazei
  misc_feature (12)..(202): Homolog of NCBI NO: 28210515 NR Description: 3-oxoacyl-
  misc_feature (17)..(241): Homolog of NCBI NO: 30020410 NR Description: Short chain dehydrogenase [Bacillus cereus ATCC
  misc_feature (18)..(242): Homolog of NCBI NO: 23042686 NR Description: hypothetical protein [Trichodesmium erythraeum
MTMATPFSGAANSIVAARTVLITGVSKGLGRALALELAKRGHTVIGCARSQEKLTALQSELSSSTNHLLLTADVKSNSSVEEMAHTIVEKKGVPDIIVNNAGTINKNSKIWEVSAEDFDNVMDTNVKGVANVLRHFIPLMLPRKQGIIVNMSSGWGRSGAALVAPYCASKWAIEGLSRAVAKEVVEGMAVVALNPGVINTELLTSCFGNSASLYQAPDAWAVKAATMILNLTAGDNGGSLTV

SEQ ID NO: 25183 - protein, 240 aa, Arabidopsis thaliana
  peptide (1)..(240): Ceres Seq. ID no. 12397000
  misc_feature (7)..(211): Homolog of NCBI NO: 20091507 NR Description: 3-oxoacyl-
  misc_feature (12)..(228): Homolog of NCBI NO: 21399837 NR Description: adh_short, short chain dehydrogenase [Bacillus
  misc_feature (16)..(240): Homolog of NCBI NO: 20091506 NR Description: 3-oxoacyl-
  misc_feature (16)..(211): Homolog of NCBI NO: 21229327 NR Description: putative ketoreductase [Methanosarcina mazei
  misc_feature (10)..(200): Homolog of NCBI NO: 28210515 NR Description: 3-oxoacyl-
  misc_feature (15)..(239): Homolog of NCBI NO: 30020410 NR Description: Short chain dehydrogenase [Bacillus cereus ATCC
  misc_feature (16)..(240): Homolog of NCBI NO: 23042686 NR Description: hypothetical protein [Trichodesmium erythraeum
  misc_feature (16)..(240): Homolog of NCBI NO: 17229376 NR Description: probable short-chain dehydrogenase [Nostoc sp.
  misc_feature (1)..(240): Homolog of NCBI NO: 21593553 NR Description: unknown [Arabidopsis thaliana]
  misc_feature (1)..(240): Homolog of NCBI NO: 18391139 NR Description: expressed protein
MATPFSGAANSIVAARTVLITGVSKGLGRALALELAKRGHTVIGCARSQEKLTALQSELSSSTNHLLLTADVKSNSSVEEMAHTIVEKKGVPDIIVNNAGTINKNSKIWEVSAEDFDNVMDTNVKGVANVLRHFIPLMLPRKQGIIVNMSSGWGRSGAALVAPYCASKWAIEGLSRAVAKEVVEGMAVVALNPGVINTELLTSCFGNSASLYQAPDAWAVKAATMILNLTAGDNGGSLTV

SEQ ID NO: 25184 - protein, 160 aa, Arabidopsis thaliana
  peptide (1)..(160): Ceres Seq. ID no. 12397001
  misc_feature (1)..(131): Homolog of NCBI NO: 20091507 NR Description: 3-oxoacyl-
  misc_feature (1)..(148): Homolog of NCBI NO: 21399837 NR Description: adh_short, short chain dehydrogenase [Bacillus
  misc_feature (1)..(160): Homolog of NCBI NO: 20091506 NR Description: 3-oxoacyl-
  misc_feature (1)..(131): Homolog of NCBI NO: 21229327 NR Description: putative ketoreductase [Methanosarcina mazei
  misc_feature (1)..(120): Homolog of NCBI NO: 28210515 NR Description: 3-oxoacyl-
  misc_feature (1)..(159): Homolog of NCBI NO: 30020410 NR Description: Short chain dehydrogenase [Bacillus cereus ATCC
  misc_feature (1)..(160): Homolog of NCBI NO: 23042686 NR Description: hypothetical protein [Trichodesmium erythraeum
  misc_feature (1)..(160): Homolog of NCBI NO: 17229376 NR Description: probable short-chain dehydrogenase [Nostoc sp.
  misc_feature (1)..(160): Homolog of NCBI NO: 21593553 NR Description: unknown [Arabidopsis thaliana]
  misc_feature (1)..(160): Homolog of NCBI NO: 18391139 NR Description: expressed protein
MAHTIVEKKGVPDIIVNNAGTINKNSKIWEVSAEDFDNVMDTNVKGVANVLRHFIPLMLPRKQGIIVNMSSGWGRSGAALVAPYCASKWAIEGLSRAVAKEVVEGMAVVALNPGVINTELLTSCFGNSASLYQAPDAWAVKAATMILNLTAGDNGGSLTV

SEQ ID NO: 25185 - DNA, 1120 bp, Arabidopsis thaliana
  misc_feature (1)..(1120): Ceres Seq. ID no. 12423003
  misc_feature: MA Experiment ID: 108462 Result: Down-regulated in Transcription
  misc_feature: MA Experiment 108462 PARAMETER Experiment Name: At_Germinating_Seeds_cDNA_P Parameter: Age (day) Value: 2 vs. 0
  misc_feature: MA Experiment 108462 PARAMETER Experiment Name: At_Germinating_Seeds_cDNA_P Parameter: Tissue Value: Germinating Seeds
  misc_feature: MA Experiment ID: 108463 Result: Down-regulated in Transcription
  misc_feature: MA Experiment 108463 PARAMETER Experiment Name: At_Germinating_Seeds_cDNA_P Parameter: Age (day) Value: 3 vs. 0
  misc_feature: MA Experiment 108463 PARAMETER Experiment Name: At_Germinating_Seeds_cDNA_P Parameter: Tissue Value: Germinating Seeds
  misc_feature: MA Experiment ID: 108464 Result: Down-regulated in Transcription
  misc_feature: MA Experiment 108464 PARAMETER Experiment Name: At_Germinating_Seeds_cDNA_P Parameter: Age (day) Value: 4 vs. 0
  misc_feature: MA Experiment 108464 PARAMETER Experiment Name: At_Germinating_Seeds_cDNA_P Parameter: Tissue Value: Germinating Seeds
  misc_feature: MA Experiment ID: 20000069 Result: Up-regulated in Transcription
  misc_feature: MA Experiment 20000069 PARAMETER Experiment Name: At_100uM_ABA_Mutants_cDNA_P Parameter: Plant Line Value: CS23
  misc_feature: MA Experiment 20000069 PARAMETER Experiment Name: At_100uM_ABA_Mutants_cDNA_P Parameter: Timepoint (hr) Value: 6
  misc_feature: MA Experiment 20000069 PARAMETER Experiment Name: At_100uM_ABA_Mutants_cDNA_P Parameter: Tissue Value: Aerial
  misc_feature: MA Experiment 20000069 PARAMETER Experiment Name: At_100uM_ABA_Mutants_cDNA_P Parameter: Treatment Value: 100uM ABA vs. No Treatment
  misc_feature: MA Experiment ID: 20000070 Result: Up-regulated in Transcription
  misc_feature: MA Experiment 20000070 PARAMETER Experiment Name: At_100uM_ABA_Mutants_cDNA_P Parameter: Plant Line Value: CS24
  misc_feature: MA Experiment 20000070 PARAMETER Experiment Name: At_100uM_ABA_Mutants_cDNA_P Parameter: Timepoint (hr) Value: 6
  misc_feature: MA Experiment 20000070 PARAMETER Experiment Name: At_100uM_ABA_Mutants_cDNA_P Parameter: Tissue Value: Aerial
  misc_feature: MA Experiment 20000070 PARAMETER Experiment Name: At_100uM_ABA_Mutants_cDNA_P Parameter: Treatment Value: 100uM ABA vs. No Treatment
  misc_feature: MA Experiment ID: 20000071 Result: Up-regulated in Transcription
  misc_feature: MA Experiment 20000071 PARAMETER Experiment Name: At_100uM_ABA_Mutants_cDNA_P Parameter: Plant Line Value: CS8104
  misc_feature: MA Experiment 20000071 PARAMETER Experiment Name: At_100uM_ABA_Mutants_cDNA_P Parameter: Timepoint (hr) Value: 6
  misc_feature: MA Experiment 20000071 PARAMETER Experiment Name: At_100uM_ABA_Mutants_cDNA_P Parameter: Tissue Value: Aerial
  misc_feature: MA Experiment 20000071 PARAMETER Experiment Name: At_100uM_ABA_Mutants_cDNA_P Parameter: Treatment Value: 100uM ABA vs. No Treatment
  misc_feature: MA Experiment ID: 20000072 Result: Up-regulated in Transcription
  misc_feature: MA Experiment 20000072 PARAMETER Experiment Name: At_100uM_ABA_Mutants_cDNA_P Parameter: Plant Line Value: CS8105
  misc_feature: MA Experiment 20000072 PARAMETER Experiment Name: At_100uM_ABA_Mutants_cDNA_P Parameter: Timepoint (hr) Value: 6
  misc_feature: MA Experiment 20000072 PARAMETER Experiment Name: At_100uM_ABA_Mutants_cDNA_P Parameter: Tissue Value: Aerial
  misc_feature: MA Experiment 20000072 PARAMETER Experiment Name: At_100uM_ABA_Mutants_cDNA_P Parameter: Treatment Value: 100uM ABA vs. No Treatment
  misc_feature: MA Experiment ID: 20000086 Result: Up-regulated in Transcription
  misc_feature: MA Experiment 20000086 PARAMETER Experiment Name: At_100uM_ABA_Mutants_cDNA_P Parameter: Plant Line Value: CS22
  misc_feature: MA Experiment 20000086 PARAMETER Experiment Name: At_100uM_ABA_Mutants_cDNA_P Parameter: Timepoint (hr) Value: 6
  misc_feature: MA Experiment 20000086 PARAMETER Experiment Name: At_100uM_ABA_Mutants_cDNA_P Parameter: Tissue Value: Aerial
  misc_feature: MA Experiment 20000086 PARAMETER Experiment Name: At_100uM_ABA_Mutants_cDNA_P Parameter: Treatment Value: 100uM ABA vs. No Treatment
  misc_feature: MA Experiment ID: 20000088 Result: Up-regulated in Transcription
  misc_feature: MA Experiment 20000088 PARAMETER Experiment Name: At_100uM_ABA_Mutants_cDNA_P Parameter: Plant Line Value: Landsberg
  misc_feature: MA Experiment 20000088 PARAMETER Experiment Name: At_100uM_ABA_Mutants_cDNA_P Parameter: Timepoint (hr) Value: 6
  misc_feature: MA Experiment 20000088 PARAMETER Experiment Name: At_100uM_ABA_Mutants_cDNA_P Parameter: Tissue Value: Aerial
  misc_feature: MA Experiment 20000088 PARAMETER Experiment Name: At_100uM_ABA_Mutants_cDNA_P Parameter: Treatment Value: 100uM ABA vs. No Treatment
  misc_feature: MA Experiment ID: 20000089 Result: Up-regulated in Transcription
  misc_feature: MA Experiment ID: 20000111 Result: Down-regulated in Transcription
  misc_feature: MA Experiment 20000111 PARAMETER Experiment Name: At_42deg_Heat_cDNA_P Parameter: Temperature (deg C) Value: 42 vs. 22
  misc_feature: MA Experiment 20000111 PARAMETER Experiment Name: At_42deg_Heat_cDNA_P Parameter: Timepoint (hr) Value: 6
  misc_feature: MA Experiment 20000111 PARAMETER Experiment Name: At_42deg_Heat_cDNA_P Parameter: Tissue Value: Aerial
  misc_feature: MA Experiment ID: 20000113 Result: Down-regulated in Transcription
  misc_feature: MA Experiment 20000113 PARAMETER Experiment Name: At_42deg_Heat_cDNA_P Parameter: Temperature (deg C) Value: 42 vs. 22
  misc_feature: MA Experiment 20000113 PARAMETER Experiment Name: At_42deg_Heat_cDNA_P Parameter: Timepoint (hr) Value: 8
  misc_feature: MA Experiment 20000113 PARAMETER Experiment Name: At_42deg_Heat_cDNA_P Parameter: Tissue Value: Aerial
  misc_feature: MA Experiment ID: 20000117 Result: Up-regulated in Transcription
  misc_feature: MA Experiment 20000117 PARAMETER Experiment Name: At_100uM_ABA_Mutants_cDNA_P Parameter: Plant Line Value: Columbia
  misc_feature: MA Experiment 20000117 PARAMETER Experiment Name: At_100uM_ABA_Mutants_cDNA_P Parameter: Timepoint (hr) Value: 6
  misc_feature: MA Experiment 20000117 PARAMETER Experiment Name: At_100uM_ABA_Mutants_cDNA_P Parameter: Tissue Value: Aerial
  misc_feature: MA Experiment 20000117 PARAMETER Experiment Name: At_100uM_ABA_Mutants_cDNA_P Parameter: Treatment Value: 100uM ABA vs. No Treatment
  misc_feature: MA Experiment ID: 20000173 Result: Down-regulated in Transcription
  misc_feature: MA Experiment 20000173 PARAMETER Experiment Name: At_42deg_Heat_P Parameter: Age (day) Value: 14
  misc_feature: MA Experiment 20000173 PARAMETER Experiment Name: At_42deg_Heat_P Parameter: Organism Value: A. thaliana
  misc_feature: MA Experiment 20000173 PARAMETER Experiment Name: At_42deg_Heat_P Parameter: Plant Line Value: WS
  misc_feature: MA Experiment 20000173 PARAMETER Experiment Name: At_42deg_Heat_P Parameter: Temperature (deg C) Value: 42 vs. 22
  misc_feature: MA Experiment 20000173 PARAMETER Experiment Name: At_42deg_Heat_P Parameter: Timepoint (hr) Value: 6
  misc_feature: MA Experiment 20000173 PARAMETER Experiment Name: At_42deg_Heat_P Parameter: Tissue Value: Aerial
  misc_feature: MA Experiment ID: 20000185 Result: Down-regulated in Transcription
  misc_feature: MA Experiment 20000185 PARAMETER Experiment Name: At_Roots__P Parameter: Age (day) Value: 7 vs. 21
  misc_feature: MA Experiment 20000185 PARAMETER Experiment Name: At_Roots__P Parameter: Organism Value: A. thaliana
  misc_feature: MA Experiment 20000185 PARAMETER Experiment Name: At_Roots__P Parameter: Tissue Value: Roots vs. Whole Plant
  misc_feature: MA Experiment ID: 20000224 Result: Down-regulated in Transcription
  misc_feature: MA Experiment ID: 20000234 Result: Down-regulated in Transcription
  misc_feature: MA Experiment 20000234 PARAMETER Experiment Name: At_Siliques_P Parameter: Age (day) Value: 21
  misc_feature: MA Experiment 20000234 PARAMETER Experiment Name: At_Siliques_P Parameter: Organism Value: A. thaliana
  misc_feature: MA Experiment 20000234 PARAMETER Experiment Name: At_Siliques_P Parameter: Plant Line Value: WS
  misc_feature: MA Experiment 20000234 PARAMETER Experiment Name: At_Siliques_P Parameter: Tissue Value: Less Than 5mm Siliques vs. Whole Plant
  misc_feature: MA Experiment ID: 20000438 Result: Down-regulated in Transcription
  misc_feature: MA Experiment 20000438 PARAMETER Experiment Name: At_Shoots__P Parameter: Age (day) Value: 14
  misc_feature: MA Experiment 20000438 PARAMETER Experiment Name: At_Shoots__P Parameter: Tissue Value: Shoots vs. Whole Plant
  misc_feature: MA Experiment ID: 20000439 Result: Down-regulated in Transcription
  misc_feature: MA Experiment 20000439 PARAMETER Experiment Name: At_Roots__P Parameter: Age (day) Value: 14 vs. 21
  misc_feature: MA Experiment 20000439 PARAMETER Experiment Name: At_Roots__P Parameter: Organism Value: A. thaliana
  misc_feature: MA Experiment 20000439 PARAMETER Experiment Name: At_Roots__P Parameter: Tissue Value: Roots vs. Whole Plant
  misc_feature: MA Experiment ID: 20000441 Result: Down-regulated in Transcription
  misc_feature: MA Experiment 20000441 PARAMETER Experiment Name: At_1uM_BR-BRZ__P Parameter: Tissue Value: Shoot Apices
  misc_feature: MA Experiment 20000441 PARAMETER Experiment Name: At_1uM_BR-BRZ__P Parameter: Treatment Value: 1uM BR vs. No Treatment
  misc_feature: MA Experiment ID: 20000443 Result: Down-regulated in Transcription
  misc_feature: MA Experiment 20000443 PARAMETER Experiment Name: At_1uM_BR-BRZ__P Parameter: Tissue Value: Shoot Apices
  misc_feature: MA Experiment 20000443 PARAMETER Experiment Name: At_1uM_BR-BRZ__P Parameter: Treatment Value: 1uM BRZ vs. No Treatment
  misc_feature: MA Experiment ID: 20001247 Result: Down-regulated in Transcription
  misc_feature: MA Experiment 20001247 PARAMETER Experiment Name: At_Far-red-induction_P Parameter: Age (day) Value: 7
  misc_feature: MA Experiment 20001247 PARAMETER Experiment Name: At_Far-red-induction_P Parameter: Light Value: Far-red vs. White
  misc_feature: MA Experiment 20001247 PARAMETER Experiment Name: At_Far-red-induction_P Parameter: Organism Value: A. thaliana
  misc_feature: MA Experiment 20001247 PARAMETER Experiment Name: At_Far-red-induction_P Parameter: Plant Line Value: Columbia
  misc_feature: MA Experiment 20001247 PARAMETER Experiment Name: At_Far-red-induction_P Parameter: Timepoint (hr) Value: 1
  misc_feature: MA Experiment 20001247 PARAMETER Experiment Name: At_Far-red-induction_P Parameter: Tissue Value: Whole Plant
  misc_feature: MA Experiment ID: 20001248 Result: Up-regulated in Transcription
  misc_feature: MA Experiment 20001248 PARAMETER Experiment Name: At_Far-red-induction_P Parameter: Age (day) Value: 7
  misc_feature: MA Experiment 20001248 PARAMETER Experiment Name: At_Far-red-induction_P Parameter: Light Value: Far-red vs. White
  misc_feature: MA Experiment 20001248 PARAMETER Experiment Name: At_Far-red-induction_P Parameter: Organism Value: A. thaliana
  misc_feature: MA Experiment 20001248 PARAMETER Experiment Name: At_Far-red-induction_P Parameter: Plant Line Value: Columbia
  misc_feature: MA Experiment 20001248 PARAMETER Experiment Name: At_Far-red-induction_P Parameter: Timepoint (hr) Value: 4
  misc_feature: MA Experiment 20001248 PARAMETER Experiment Name: At_Far-red-induction_P Parameter: Tissue Value: Whole Plant
  misc_feature: MA Experiment ID: 20001558 Result: Down-regulated in Transcription
  misc_feature: MA Experiment 20001558 PARAMETER Experiment Name: At_Drought_Soil_Dry_P Parameter: Age (day) Value: 27
  misc_feature: MA Experiment 20001558 PARAMETER Experiment Name: At_Drought_Soil_Dry_P Parameter: Organism Value: A. thaliana
  misc_feature: MA Experiment 20001558 PARAMETER Experiment Name: At_Drought_Soil_Dry_P Parameter: Plant Line Value: WS
  misc_feature: MA Experiment 20001558 PARAMETER Experiment Name: At_Drought_Soil_Dry_P Parameter: Post Timepoint (hr) Value: 6
  misc_feature: MA Experiment 20001558 PARAMETER Experiment Name: At_Drought_Soil_Dry_P Parameter: Post-Treatment Value: Re-Water vs. No Drought
  misc_feature: MA Experiment 20001558 PARAMETER Experiment Name: At_Drought_Soil_Dry_P Parameter: Timepoint (day) Value: 13
  misc_feature: MA Experiment 20001558 PARAMETER Experiment Name: At_Drought_Soil_Dry_P Parameter: Treatment Value: Drought vs. No Drought
  misc_feature: MA Experiment ID: 20001905 Result: Down-regulated in Transcription
  misc_feature: MA Experiment 20001905 PARAMETER Experiment Name: At_Drought_Reproduction_P Parameter: Age (day) Value: 40
  misc_feature: MA Experiment 20001905 PARAMETER Experiment Name: At_Drought_Reproduction_P Parameter: Organism Value: A. thaliana
  misc_feature: MA Experiment 20001905 PARAMETER Experiment Name: At_Drought_Reproduction_P Parameter: Plant Line Value: WS
  misc_feature: MA Experiment 20001905 PARAMETER Experiment Name: At_Drought_Reproduction_P Parameter: Timepoint (day) Value: 10
  misc_feature: MA Experiment 20001905 PARAMETER Experiment Name: At_Drought_Reproduction_P Parameter: Tissue Value: Rosettes
  misc_feature: MA Experiment 20001905 PARAMETER Experiment Name: At_Drought_Reproduction_P Parameter: Treatment Value: Drought vs. No Drought
  misc_feature: MA Experiment ID: 20001911 Result: Down-regulated in Transcription
  misc_feature: MA Experiment 20001911 PARAMETER Experiment Name: At_Drought_Reproduction_P Parameter: Age (day) Value: 40
  misc_feature: MA Experiment 20001911 PARAMETER Experiment Name: At_Drought_Reproduction_P Parameter: Organism Value: A. thaliana
  misc_feature: MA Experiment 20001911 PARAMETER Experiment Name: At_Drought_Reproduction_P Parameter: Plant Line Value: WS
  misc_feature: MA Experiment 20001911 PARAMETER Experiment Name: At_Drought_Reproduction_P Parameter: Timepoint (day) Value: 10
  misc_feature: MA Experiment 20001911 PARAMETER Experiment Name: At_Drought_Reproduction_P Parameter: Tissue Value: Flowers
  misc_feature: MA Experiment 20001911 PARAMETER Experiment Name: At_Drought_Reproduction_P Parameter: Treatment Value: Drought vs. No Drought
gtagggttcctcaaaatcatttcaataattcaatttcagatgtatggtgatgcttctttgattacaaatcggcgttgaacaattctccgattttacactctaatcgaatcactttggggtgttttgttaatcgctgttctcaagatctgagatttacagggagaagtgagctggaacaaggtgccggagtagatggcgatcatatttgcgttggtggctcgtggaacggtggtgttatcggagtttagcgctacttcgactaacgctagctcaatctcgaagcagattttggagaagttgcctggaaacgatagcgatagccatatgtcttactctcaggatcgctacatcttccatgtgaaacgaacagatggtcttaccgttctctgtatggccgacgaaaccgccggaaggaatattccgtttgcgtttttggatgatattcatcagaggtttgtgaaaacatatggccgagctattcattcagctcaagcttattccatgaatgatgaattttcaagagttctgagtcaacagatggagttttattccaatgatcctaatgcagacaggatgagcagaatcaaaggtgaaatgagtcaggttcgaaatgtgatgattgagaatattgataaagttttggatagaggggagcgtttggagttgctagttgataaaaccgaaaatatgcaaggcaacacttttcgtttcagaaagcaagctcgtcgttacagaaccattatgtggtggagaaatgtcaagcttacaattgctctgatacttgtactagctttggttgtgtacatcgcgatggcctttgtttgccatgggccaagtcttccttcttgtttcaagtaagaagacattctcttatcttcttcacctttcccttcttgggaattatcagactctgcttcgattttggaatgtgagattatatgcgtttgtctaaaatgtgtgtttatgtgatctttcaatttcagcttctgcttattgctttgaattacagagtcgattatttatttgtaagtgtgatatttcactgttaatgatcatcccctgtctgtttgcaatttatgctgcggcgttaaaagttgtattaaatgatgacgtttttagc

SEQ ID NO: 25186 - protein, 221 aa, Arabidopsis thaliana
  peptide (1)..(221): Ceres Seq. ID no. 12423004
  misc_feature (124)..(212): Pfam Name: Synaptobrevin Pfam Description: Synaptobrevin
  misc_feature (1)..(221): Homolog of NCBI NO: 33468929 NR Description: synaptobrevin like 1 [Mus musculus]
  misc_feature (1)..(219): Homolog of NCBI NO: 19921940 NR Description: CG1599-PA [Drosophila melanogaster]
  misc_feature (1)..(138): Homolog of NCBI NO: 16323190 NR Description: AT5g22360/MWD9_16 [Arabidopsis thaliana]
  misc_feature (1)..(213): Homolog of NCBI NO: 28828593 NR Description: similar to Arabidopsis thaliana (Mouse-ear
  misc_feature (1)..(219): Homolog of NCBI NO: 37531190 NR Description: putative synaptobrevin-like protein
  misc_feature (1)..(219): Homolog of NCBI NO: 15242224 NR Description: synaptobrevin-like protein; protein id:
  misc_feature (1)..(221): Homolog of NCBI NO: 34898442 NR Description: ESTs AU082579(S2069),D40238(S2069) correspond to region of the predicted gene.~Similar to Arabidopsis thaliana
  misc_feature (1)..(219): Homolog of NCBI NO: 15224711 NR Description: putative synaptobrevin; protein id: At2g25340.1
  misc_feature (1)..(219): Homolog of NCBI NO: 15236687 NR Description: synaptobrevin-like protein
  misc_feature (1)..(221): Homolog of NCBI NO: 15238971 NR Description: putative protein
MAIIFALVARGTVVLSEFSATSTNASSISKQILEKLPGNDSDSHMSYSQDRYIFHVKRTDGLTVLCMADETAGRNIPFAFLDDIHQRFVKTYGRAIHSAQAYSMNDEFSRVLSQQMEFYSNDPNADRMSRIKGEMSQVRNVMIENIDKVLDRGERLELLVDKTENMQGNTFRFRKQARRYRTIMWWRNVKLTIALILVLALVVYIAMAFVCHGPSLPSCFK

SEQ ID NO: 25187 - protein, 177 aa, Arabidopsis thaliana
  peptide (1)..(177): Ceres Seq. ID no. 12423005
  misc_feature (80)..(168): Pfam Name: Synaptobrevin Pfam Description: Synaptobrevin
  misc_feature (1)..(177): Homolog of NCBI NO: 33468929 NR Description: synaptobrevin like 1 [Mus musculus]
  misc_feature (1)..(175): Homolog of NCBI NO: 19921940 NR Description: CG1599-PA [Drosophila melanogaster]
  misc_feature (1)..(94): Homolog of NCBI NO: 16323190 NR Description: AT5g22360/MWD9_16 [Arabidopsis thaliana]
  misc_feature (1)..(169): Homolog of NCBI NO: 28828593 NR Description: similar to Arabidopsis thaliana (Mouse-ear
  misc_feature (1)..(175): Homolog of NCBI NO: 37531190 NR Description: putative synaptobrevin-like protein
  misc_feature (1)..(175): Homolog of NCBI NO: 15242224 NR Description: synaptobrevin-like protein; protein id:
  misc_feature (1)..(177): Homolog of NCBI NO: 34898442 NR Description: ESTs AU082579(S2069),D40238(S2069) correspond to region of the predicted gene.~Similar to Arabidopsis thaliana
  misc_feature (1)..(175): Homolog of NCBI NO: 15224711 NR Description: putative synaptobrevin; protein id: At2g25340.1
  misc_feature (1)..(175): Homolog of NCBI NO: 15236687 NR Description: synaptobrevin-like protein
  misc_feature (1)..(177): Homolog of NCBI NO: 15238971 NR Description: putative protein
MSYSQDRYIFHVKRTDGLTVLCMADETAGRNIPFAFLDDIHQRFVKTYGRAIHSAQAYSMNDEFSRVLSQQMEFYSNDPNADRMSRIKGEMSQVRNVMIENIDKVLDRGERLELLVDKTENMQGNTFRFRKQARRYRTIMWWRNVKLTIALILVLALVVYIAMAFVCHGPSLPSCFK

SEQ ID NO: 25188 - protein, 155 aa, Arabidopsis thaliana
  peptide (1)..(155): Ceres Seq. ID no. 12423006
  misc_feature (58)..(146): Pfam Name: Synaptobrevin Pfam Description: Synaptobrevin
  misc_feature (1)..(155): Homolog of NCBI NO: 33468929 NR Description: synaptobrevin like 1 [Mus musculus]
  misc_feature (1)..(153): Homolog of NCBI NO: 19921940 NR Description: CG1599-PA [Drosophila melanogaster]
  misc_feature (1)..(72): Homolog of NCBI NO: 16323190 NR Description: AT5g22360/MWD9_16 [Arabidopsis thaliana]
  misc_feature (1)..(147): Homolog of NCBI NO: 28828593 NR Description: similar to Arabidopsis thaliana (Mouse-ear
  misc_feature (1)..(153): Homolog of NCBI NO: 37531190 NR Description: putative synaptobrevin-like protein
  misc_feature (1)..(153): Homolog of NCBI NO: 15242224 NR Description: synaptobrevin-like protein; protein id:
  misc_feature (1)..(155): Homolog of NCBI NO: 34898442 NR Description: ESTs AU082579(S2069),D40238(S2069) correspond to region of the predicted gene.~Similar to Arabidopsis thaliana
  misc_feature (1)..(153): Homolog of NCBI NO: 15224711 NR Description: putative synaptobrevin; protein id: At2g25340.1
  misc_feature (1)..(153): Homolog of NCBI NO: 15236687 NR Description: synaptobrevin-like protein
  misc_feature (1)..(155): Homolog of NCBI NO: 15238971 NR Description: putative protein
MADETAGRNIPFAFLDDIHQRFVKTYGRAIHSAQAYSMNDEFSRVLSQQMEFYSNDPNADRMSRIKGEMSQVRNVMIENIDKVLDRGERLELLVDKTENMQGNTFRFRKQARRYRTIMWWRNVKLTIALILVLALVVYIAMAFVCHGPSLPSCFK

SEQ ID NO: 25189 - DNA, 1302 bp, Arabidopsis thaliana
  misc_feature (1)..(1302): Ceres Seq. ID no. 12357714
  misc_feature: MA Experiment ID: 108434 Result: Down-regulated in Transcription
  misc_feature: MA Experiment 108434 PARAMETER Experiment Name: At_Root_Tips_cDNA_P Parameter: Tissue Value: Root Tips
  misc_feature: MA Experiment ID: 108595 Result: Down-regulated in Transcription
  misc_feature: MA Experiment 108595 PARAMETER Experiment Name: At_Ler-pi_Ovule_cDNA_P Parameter: Plant Line Value: null
  misc_feature: MA Experiment ID: 20000794 Result: Up-regulated in Transcription
  misc_feature: MA Experiment 20000794 PARAMETER Experiment Name: At_Petals_P Parameter: Age (day) Value: 23-25 days
  misc_feature: MA Experiment 20000794 PARAMETER Experiment Name: At_Petals_P Parameter: Plant Line Value: WS
  misc_feature: MA Experiment 20000794 PARAMETER Experiment Name: At_Petals_P Parameter: Tissue Value: Petals vs. Whole plant
atatatcgcgtggatttgaagacgaagaggaatcataaaaagcctaacgaagaagacgaagaagaagaggaacaaacaaccatgggtgaagtggttaaggtaatcgtaaatctcttgcttctgattctgatttcgtgaaagctcatcggaaaatttcttgtttcagctatgaaaacatgaatcgccgccgattgttaattaagtggtcttcaatcactgatcactattccaattttgatttttgttttattttaatcatcaaatttgatgttttctagtttcacttgttgtgtatgaaattcaggctttgtcttggaggttgcaatcgaaaatttcactaattgctgaacgttttttgtttctctttcaagcttagcatcataaatttatgttttcttgttgtgtttgtgtatgtgtgtttttgcttaggatggaagagaagaagtgatccaggcatggtatatggatgatagcgaagaggatcagagacttcctcaccacaaggatcctaaggagtttctatctttggacaaacttgcaggtctctttgtgtgtttcaattagtgttcttctctctgtttctctatttttttcagatgtaatgtttgtgtgcagagctgggagtacttagctggagacttgatgctgataactatgaaaccgatgaggatttgaaaaagatccgcgaatctcgtggttactcttacatggacttttgtgaggtatgcccggaaaagcttccaaactatgaagtgaaagtgaagagctttttcgaagaacatttgcacactgatgaagagatccgttactgcgttgcaggaagcggttactttgatgtgagggatcgcaatgaagcttggattagagtatgggtaaagaagggaggtatgatagtcttacctgctggaatatatcatcgcttcaccgtagactcagacaactatatcaaggcaatgcggcttttcgtgggtgaaccggtctggacaccatacaatcgcccacacgaccacctccctgcaaggaaagagtacatcgataatttcgtgaaggtgaatgaaggtggtgtcatagacgcgtcagcctagaggattctcagtcttatgcatcagatttctataaactaagcatacaataaagagagctttctgtctcatgttggatattatgtcatctacagatccacttgtgaagaaactttgattcgtgtggctttggcattatggttgtgttgtaactgtatttatagtttatactccagaaatcaaactgtgttacattatcaatctctccaaagttttcctc

SEQ ID NO: 25190 - protein, 125 aa, Arabidopsis thaliana
  peptide (1)..(125): Ceres Seq. ID no. 12357715
  misc_feature (1)..(94): Pfam Name: ARD/ARD' family Pfam Description: ARD/ARD' family
  misc_feature (1)..(109): Homolog of NCBI NO: 10177955 NR Description: gene_id:MQD19.21~pir||T02918~similar to unknown
  misc_feature (1)..(118): Homolog of NCBI NO: 7489558 NR Description: probable submergence induced protein 2 - rice
  misc_feature (1)..(118): Homolog of NCBI NO: 37534408 NR Description: putative zinc finger protein ID1
  misc_feature (1)..(119): Homolog of NCBI NO: 34902616 NR Description: Putative probable submergence induced,
  misc_feature (1)..(119): Homolog of NCBI NO: 14522834 NR Description: iron-deficiency induced gene [Hordeum vulgare]
  misc_feature (1)..(119): Homolog of NCBI NO: 7489559 NR Description: probable submergence induced, nickel-binding
  misc_feature (1)..(125): Homolog of NCBI NO: 15225298 NR Description: unknown protein; protein id: At2g26400.1
  misc_feature (1)..(105): Homolog of NCBI NO: 7485194 NR Description: hypothetical protein - Arabidopsis thaliana
  misc_feature (1)..(113): Homolog of NCBI NO: 18414293 NR Description: Expressed protein
  misc_feature (1)..(125): Homolog of NCBI NO: 18414289 NR Description: Expressed protein
MDFCEVCPEKLPNYEVKVKSFFEEHLHTDEEIRYCVAGSGYFDVRDRNEAWIRVWVKKGGMIVLPAGIYHRFTVDSDNYIKAMRLFVGEPVWTPYNRPHDHLPARKEYIDNFVKVNEGGVIDASA

SEQ ID NO: 25191 - protein, 65 aa, Arabidopsis thaliana
  peptide (1)..(65): Ceres Seq. ID no. 12357716
  misc_feature (1)..(65): Homolog of NCBI NO: 18414289 NR Description: Expressed protein
  misc_feature (1)..(49): Homolog of NCBI NO: 10177955 NR Description: gene_id:MQD19.21~pir||T02918~similar to unknown
  misc_feature (1)..(58): Homolog of NCBI NO: 7489558 NR Description: probable submergence induced protein 2 - rice
  misc_feature (1)..(58): Homolog of NCBI NO: 37534408 NR Description: putative zinc finger protein ID1
  misc_feature (1)..(59): Homolog of NCBI NO: 34902616 NR Description: Putative probable submergence induced,
  misc_feature (1)..(59): Homolog of NCBI NO: 14522834 NR Description: iron-deficiency induced gene [Hordeum vulgare]
  misc_feature (1)..(59): Homolog of NCBI NO: 7489559 NR Description: probable submergence induced, nickel-binding
  misc_feature (1)..(65): Homolog of NCBI NO: 15225298 NR Description: unknown protein; protein id: At2g26400.1
  misc_feature (1)..(45): Homolog of NCBI NO: 7485194 NR Description: hypothetical protein - Arabidopsis thaliana
  misc_feature (1)..(53): Homolog of NCBI NO: 18414293 NR Description: Expressed protein
MIVLPAGIYHRFTVDSDNYIKAMRLFVGEPVWTPYNRPHDHLPARKEYIDNFVKVNEGGVIDASA

SEQ ID NO: 25192 - DNA, 1669 bp, Arabidopsis thaliana
  misc_feature (1)..(1669): Ceres Seq. ID no. 12578090
  misc_feature: MA Experiment ID: 108434 Result: Up-regulated in Transcription
  misc_feature: MA Experiment 108434 PARAMETER Experiment Name: At_Root_Tips_cDNA_P Parameter: Tissue Value: Root Tips
  misc_feature: MA Experiment ID: 108461 Result: Up-regulated in Transcription
  misc_feature: MA Experiment 108461 PARAMETER Experiment Name: At_Germinating_Seeds_cDNA_P Parameter: Age (day) Value: 1 vs. 0
  misc_feature: MA Experiment 108461 PARAMETER Experiment Name: At_Germinating_Seeds_cDNA_P Parameter: Tissue Value: Germinating Seeds
  misc_feature: MA Experiment ID: 108462 Result: Up-regulated in Transcription
  misc_feature: MA Experiment 108462 PARAMETER Experiment Name: At_Germinating_Seeds_cDNA_P Parameter: Age (day) Value: 2 vs. 0
  misc_feature: MA Experiment 108462 PARAMETER Experiment Name: At_Germinating_Seeds_cDNA_P Parameter: Tissue Value: Germinating Seeds
  misc_feature: MA Experiment ID: 108585 Result: Up-regulated in Transcription
  misc_feature: MA Experiment 108585 PARAMETER Experiment Name: At_5mM_NaNP_cDNA_P Parameter: Timepoint (hr) Value: 6
  misc_feature: MA Experiment 108585 PARAMETER Experiment Name: At_5mM_NaNP_cDNA_P Parameter: Tissue Value: Aerial
  misc_feature: MA Experiment 108585 PARAMETER Experiment Name: At_5mM_NaNP_cDNA_P Parameter: Treatment Value: null
  misc_feature: MA Experiment ID: 108595 Result: Down-regulated in Transcription
  misc_feature: MA Experiment 108595 PARAMETER Experiment Name: At_Ler-pi_Ovule_cDNA_P Parameter: Plant Line Value: null
  misc_feature: MA Experiment ID: 108668 Result: Down-regulated in Transcription
  misc_feature: MA Experiment 108668 PARAMETER Experiment Name: At_2mM_SA_cDNA_P Parameter: Plant Line Value: WS
  misc_feature: MA Experiment 108668 PARAMETER Experiment Name: At_2mM_SA_cDNA_P Parameter: Timepoint (hr) Value: 6
  misc_feature: MA Experiment 108668 PARAMETER Experiment Name: At_2mM_SA_cDNA_P Parameter: Treatment Value: 2mM SA vs. No Treatment
  misc_feature: MA Experiment ID: 20000087 Result: Down-regulated in Transcription
  misc_feature: MA Experiment 20000087 PARAMETER Experiment Name: At_100uM_ABA_Mutants_cDNA_P Parameter: Plant Line Value: WS
  misc_feature: MA Experiment 20000087 PARAMETER Experiment Name: At_100uM_ABA_Mutants_cDNA_P Parameter: Timepoint (hr) Value: 6
  misc_feature: MA Experiment 20000087 PARAMETER Experiment Name: At_100uM_ABA_Mutants_cDNA_P Parameter: Tissue Value: Aerial
  misc_feature: MA Experiment 20000087 PARAMETER Experiment Name: At_100uM_ABA_Mutants_cDNA_P Parameter: Treatment Value: 100uM ABA vs. No Treatment
  misc_feature: MA Experiment ID: 20000113 Result: Down-regulated in Transcription
  misc_feature: MA Experiment 20000113 PARAMETER Experiment Name: At_42deg_Heat_cDNA_P Parameter: Temperature (deg C) Value: 42 vs. 22
  misc_feature: MA Experiment 20000113 PARAMETER Experiment Name: At_42deg_Heat_cDNA_P Parameter: Timepoint (hr) Value: 8
  misc_feature: MA Experiment 20000113 PARAMETER Experiment Name: At_42deg_Heat_cDNA_P Parameter: Tissue Value: Aerial
  misc_feature: MA Experiment ID: 20000117 Result: Down-regulated in Transcription
  misc_feature: MA Experiment 20000117 PARAMETER Experiment Name: At_100uM_ABA_Mutants_cDNA_P Parameter: Plant Line Value: Columbia
  misc_feature: MA Experiment 20000117 PARAMETER Experiment Name: At_100uM_ABA_Mutants_cDNA_P Parameter: Timepoint (hr) Value: 6
  misc_feature: MA Experiment 20000117 PARAMETER Experiment Name: At_100uM_ABA_Mutants_cDNA_P Parameter: Tissue Value: Aerial
  misc_feature: MA Experiment 20000117 PARAMETER Experiment Name: At_100uM_ABA_Mutants_cDNA_P Parameter: Treatment Value: 100uM ABA vs. No Treatment
  misc_feature: MA Experiment ID: 20000224 Result: Down-regulated in Transcription
  misc_feature: MA Experiment ID: 20000306 Result: Up-regulated in Transcription
  misc_feature: MA Experiment 20000306 PARAMETER Experiment Name: At_Germinating_Seeds_Sub_P Parameter: Age (hr) Value: 6 vs. 0
  misc_feature: MA Experiment 20000306 PARAMETER Experiment Name: At_Germinating_Seeds_Sub_P Parameter: Organism Value: A. thaliana
  misc_feature: MA Experiment 20000306 PARAMETER Experiment Name: At_Germinating_Seeds_Sub_P Parameter: Plant Line Value: WS
  misc_feature: MA Experiment 20000306 PARAMETER Experiment Name: At_Germinating_Seeds_Sub_P Parameter: Tissue Value: Germinating Seeds
  misc_feature: MA Experiment ID: 20000307 Result: Up-regulated in Transcription
  misc_feature: MA Experiment 20000307 PARAMETER Experiment Name: At_Germinating_Seeds_Sub_P Parameter: Age (hr) Value: 24 vs. 0
  misc_feature: MA Experiment 20000307 PARAMETER Experiment Name: At_Germinating_Seeds_Sub_P Parameter: Organism Value: A. thaliana
  misc_feature: MA Experiment 20000307 PARAMETER Experiment Name: At_Germinating_Seeds_Sub_P Parameter: Plant Line Value: WS
  misc_feature: MA Experiment 20000307 PARAMETER Experiment Name: At_Germinating_Seeds_Sub_P Parameter: Tissue Value: Germinating Seeds
  misc_feature: MA Experiment ID: 20000347 Result: Down-regulated in Transcription
  misc_feature: MA Experiment 20000347 PARAMETER Experiment Name: At_2mM_SA_Sub_P Parameter: Age (day) Value: 14
  misc_feature: MA Experiment 20000347 PARAMETER Experiment Name: At_2mM_SA_Sub_P Parameter: Organism Value: A. thaliana
  misc_feature: MA Experiment 20000347 PARAMETER Experiment Name: At_2mM_SA_Sub_P Parameter: Plant Line Value: WS
  misc_feature: MA Experiment 20000347 PARAMETER Experiment Name: At_2mM_SA_Sub_P Parameter: Timepoint (hr) Value: 6
  misc_feature: MA Experiment 20000347 PARAMETER Experiment Name: At_2mM_SA_Sub_P Parameter: Tissue Value: Aerial
  misc_feature: MA Experiment 20000347 PARAMETER Experiment Name: At_2mM_SA_Sub_P Parameter: Treatment Value: 2mM SA vs. No Treatment
agaaatagaaaaatcagatctagattcagtttttttcatcaaaaaagagcgtcttcataaacgcccttcgtcttcttccctggaaatctagtttctttcttccacgaaaatgagagagtgcatttcgatccacattggtcaggctggtatccaggtcggaaatgcttgctgggagctgtactgtcttgaacatggcattcagcctgatggccagatgccgagtgacaagactgttggtggaggtgacgatgctttcaacaccttcttcagtgaaaccggtgcaggtaagcacgtcccacgtgctgtctttgttgatcttgagccaactgtgatcgacgaggtcaggactggtacttaccgtcagcttttccaccctgaacaactcatcagcggtaaagaagatgcagctaacaatttcgcccgtggtcattacaccattgggaaagagattgttgacctgtgcttagaccgtatcagaaagcttgctgataactgtactggtctccaaggattcctcgtcttcaacgctgttggtggagggactggatctggtcttggatctctcctccttgagagactttctgttgactacgggaaaaagtccaagttgggtttcacagtttacccatctccacaggtctctacctccgttgttgagccttacaacagtgtcctctccactcactctctcttggaacacactgatgtctccatcctcctcgacaatgaagctatctatgacatctgcagacgctccctaagcattgagagaccaacctacaccaacctcaaccgcctcgtctctcaggttatttcttccttgactgcttctctgaggtttgatggtgccttaaatgttgatgtcactgagttccaaaccaacttggtcccatacccaagaatccacttcatgctttcctcctatgccccagtcatctccgcagagaaagccttccatgagcaactctcagttgctgagatcacaaacagtgcttttgagccagcttccatgatggctaagtgtgacccacgtcacggaaagtacatggcttgctgtttgatgtaccgtggtgatgttgtccccaaggatgtaaacgcagctgttggcaccatcaagaccaagcgcactattcagtttgttgactggtgtcctactggattcaagtgtggtatcaactaccagccaccaacagttgttccaggaggtgatcttgctaaagtccagagagctgtttgcatgatctcaaactcgaccagtgttgctgaggtgttctcccgtattgatcacaagtttgatcttatgtacgccaaacgtgctttcgttcactggtatgtgggtgagggtatggaagaaggagaattctcagaggcacgtgaggatcttgcagcattggagaaggattatgaagaggtcggtgctgaaggtggtgacgatgaagatgatgaaggagaggaatactaagaagaatgtttctaaaaactttggatttgtgtgggtttctctataatctcgtcttgtgagaatgggctcaaaactcttgggagtctttaatcgtgtgtgttttaaaacctacttctctatcttttcgtagccatgttatctctctattatctatttcctttgtgtgttaaatcgtttctgcctttctggtaatatcttatcactact

SEQ ID NO: 25193 - protein, 450 aa, Arabidopsis thaliana; identical to SEQ ID NO: 24489
  peptide (1)..(450): Ceres Seq. ID no. 12578091
  misc_feature (49)..(246): Pfam Name: Tubulin/FtsZ family, GTPase domain Pfam Description: Tubulin/FtsZ family, GTPase domain
  misc_feature (1)..(450): Homolog of NCBI NO: 25396550 NR Description: alpha tubulin [Physcomitrella patens]
  misc_feature (1)..(450): Homolog of NCBI NO: 6723478 NR Description: alpha-tubulin [Betula pendula]
  misc_feature (1)..(450): Homolog of NCBI NO: 464840 NR Description: Tubulin alpha-1 chain
  misc_feature (1)..(449): Homolog of NCBI NO: 1174592 NR Description: TUBULIN ALPHA-1 CHAIN
  misc_feature (1)..(450): Homolog of NCBI NO: 15029368 NR Description: alpha tubulin subunit [Rosa hybrid cultivar]
  misc_feature (1)..(450): Homolog of NCBI NO: 29124983 NR Description: alpha-tubulin 1 [Populus tremuloides]
  misc_feature (1)..(450): Homolog of NCBI NO: 464849 NR Description: TUBULIN ALPHA CHAIN
  misc_feature (1)..(450): Homolog of NCBI NO: 16226462 NR Description: AT4g14960/dl3520c [Arabidopsis thaliana]
  misc_feature (1)..(450): Homolog of NCBI NO: 15233627 NR Description: tubulin alpha-6 chain (TUA6)
  misc_feature (1)..(450): Homolog of NCBI NO: 15220329 NR Description: tubulin alpha-2/alpha-4 chain

SEQ ID NO: 25194 - protein, 415 aa, Arabidopsis thaliana; identical to SEQ ID NO: 24490
  peptide (1)..(415): Ceres Seq. ID no. 12578092
  misc_feature (14)..(211): Pfam Name: Tubulin/FtsZ family, GTPase domain Pfam Description: Tubulin/FtsZ family, GTPase domain
  misc_feature (1)..(415): Homolog of NCBI NO: 25396550 NR Description: alpha tubulin [Physcomitrella patens]
  misc_feature (1)..(415): Homolog of NCBI NO: 6723478 NR Description: alpha-tubulin [Betula pendula]
  misc_feature (1)..(415): Homolog of NCBI NO: 464840 NR Description: Tubulin alpha-1 chain
  misc_feature (1)..(414): Homolog of NCBI NO: 1174592 NR Description: TUBULIN ALPHA-1 CHAIN
  misc_feature (1)..(415): Homolog of NCBI NO: 15029368 NR Description: alpha tubulin subunit [Rosa hybrid cultivar]
  misc_feature (1)..(415): Homolog of NCBI NO: 29124983 NR Description: alpha-tubulin 1 [Populus tremuloides]
  misc_feature (1)..(415): Homolog of NCBI NO: 464849 NR Description: TUBULIN ALPHA CHAIN
  misc_feature (1)..(415): Homolog of NCBI NO: 16226462 NR Description: AT4g14960/dl3520c [Arabidopsis thaliana]
  misc_feature (1)..(415): Homolog of NCBI NO: 15233627 NR Description: tubulin alpha-6 chain (TUA6)
  misc_feature (1)..(415): Homolog of NCBI NO: 15220329 NR Description: tubulin alpha-2/alpha-4 chain

SEQ ID NO: 25195 - DNA, 1664 bp, Arabidopsis thaliana
  misc_feature (1)..(1664): Ceres Seq. ID no. 12357598
  misc_feature: MA Experiment ID: 108463 Result: Up-regulated in Transcription
  misc_feature: MA Experiment 108463 PARAMETER Experiment Name: At_Germinating_Seeds_cDNA_P Parameter: Age (day) Value: 3 vs. 0
  misc_feature: MA Experiment 108463 PARAMETER Experiment Name: At_Germinating_Seeds_cDNA_P Parameter: Tissue Value: Germinating Seeds
  misc_feature: MA Experiment ID: 108488 Result: Down-regulated in Transcription
  misc_feature: MA Experiment ID: 108595 Result: Up-regulated in Transcription
  misc_feature: MA Experiment 108595 PARAMETER Experiment Name: At_Ler-pi_Ovule_cDNA_P Parameter: Plant Line Value: null
  misc_feature: MA Experiment ID: 20000180 Result: Up-regulated in Transcription
  misc_feature: MA Experiment 20000180 PARAMETER Experiment Name: At_Germinating_Seeds_P Parameter: Age (hr) Value: 24 vs. 0
  misc_feature: MA Experiment 20000180 PARAMETER Experiment Name: At_Germinating_Seeds_P Parameter: Tissue Value: Germinating Seeds
  misc_feature: MA Experiment ID: 20000182 Result: Up-regulated in Transcription
  misc_feature: MA Experiment 20000182 PARAMETER Experiment Name: At_2mM_SA_P Parameter: Age (day) Value: 14
  misc_feature: MA Experiment 20000182 PARAMETER Experiment Name: At_2mM_SA_P Parameter: Organism Value: A. thaliana
  misc_feature: MA Experiment 20000182 PARAMETER Experiment Name: At_2mM_SA_P Parameter: Plant Line Value: WS
  misc_feature: MA Experiment 20000182 PARAMETER Experiment Name: At_2mM_SA_P Parameter: Timepoint (hr) Value: 6
  misc_feature: MA Experiment 20000182 PARAMETER Experiment Name: At_2mM_SA_P Parameter: Tissue Value: Aerial
  misc_feature: MA Experiment 20000182 PARAMETER Experiment Name: At_2mM_SA_P Parameter: Treatment Value: 2mM SA vs. No Treatment
  misc_feature: MA Experiment ID: 20000185 Result: Up-regulated in Transcription
  misc_feature: MA Experiment 20000185 PARAMETER Experiment Name: At_Roots__P Parameter: Age (day) Value: 7 vs. 21
  misc_feature: MA Experiment 20000185 PARAMETER Experiment Name: At_Roots__P Parameter: Organism Value: A. thaliana
  misc_feature: MA Experiment 20000185 PARAMETER Experiment Name: At_Roots__P Parameter: Tissue Value: Roots vs. Whole Plant
  misc_feature: MA Experiment ID: 20000227 Result: Up-regulated in Transcription
  misc_feature: MA Experiment 20000227 PARAMETER Experiment Name: At_Root-Tips-vs-Tops_P Parameter: Tissue Value: Root Tips vs. Root Tops
  misc_feature: MA Experiment ID: 20000439 Result: Up-regulated in Transcription
  misc_feature: MA Experiment 20000439 PARAMETER Experiment Name: At_Roots__P Parameter: Age (day) Value: 14 vs. 21
  misc_feature: MA Experiment 20000439 PARAMETER Experiment Name: At_Roots__P Parameter: Organism Value: A. thaliana
  misc_feature: MA Experiment 20000439 PARAMETER Experiment Name: At_Roots__P Parameter: Tissue Value: Roots vs. Whole Plant
  misc_feature: MA Experiment ID: 20000495 Result: Up-regulated in Transcription
  misc_feature: MA Experiment 20000495 PARAMETER Experiment Name: At_Guard_Cells_P Parameter: Harvest Date Value: 8/2/2002
  misc_feature: MA Experiment 20000495 PARAMETER Experiment Name: At_Guard_Cells_P Parameter: Organism Value: A. thaliana
  misc_feature: MA Experiment 20000495 PARAMETER Experiment Name: At_Guard_Cells_P Parameter: Tissue Value: Guard Cells vs. Leaves
atcacaaccaaattccttagagaaaaaggaagagaaaggtcaaagatgttttactatgtgattgtccttcctttagctctctttctcttggctaacaaattattcttcacctccaaaacgaagcgtttcaacctccctccctctccaccttactctctcccaatcctcggccaccacaacctcctcaaaccgccggtccaccgtctcttccaccgcctctccaaaacacacggcccaatcttctccctccaatttggctcccgccgtgccgtcgtaatctcctcctcctcactcgcaacacaatgcttcacaggccaaaacgacattattctctcaaaccggccttgtttcctaaccgctaaatacgtcgcttacaactacacaaccgtaggaaccgcgccttatggcgaccactggcgtaacctccgccgcatttgctccctggaaatcctctcctcgaaccgtctcacaaacttcctccacatccgtaaagacgaaatccaccgcatgctcacgagactctcacgcgacgtcaagaaagagatcgagctcgagccgctcttgtccgatctaacgttcaacaacatagtaagaatggttacagggaagagatactacggcgacgaagtccataacgaagaagaggcaaatgttttcaagaaactcgtcgccgatatcaacgactgtagcggcgcgagacatcccggagattacttgcccttcatgaagatgttcggagggagctttgagaagaaagtgaaagctcttgcggaagccatggatgagatcttgcagcgtttgcttgaagaatgcaggagagataaagatggtaacactatggttaatcatttgctctctctgcaacaaaatgaaccagagtattacactgacgtcactatcaaaggcctaatgctgggcatgatgatcgccggaacagacacttccgctgtgacgctggagtgggcgatgtcgagcttgctaaatcatcccgaggctttggaaaaagcaaaactagagattgacgagaaaatcggacaagaacgtttgatcgatgaaccagacatcgcaaacttgccttaccttcaaaacatagtgtcggaaacattccgattatatccagcggcaccgcttctagtaccaagatcaccaacagaggatattaaagtcggaggatacgatgtgccacgtggcacaatggtgatggttaatgcgtgggctatacacagagatccagagctctggaacgaaccggagaagtttaaaccagagaggtttaatggcggagaaggtggaggaagaggagaagacgttcataagctgatgccgtttgggaatggacggagatcgtgtcccggcgccggactagggcagaagatcgtgacattagcgttaggttcgttgatccaatgctttgactggcaaaaagtcaacggcgaagcaatcgatatgacggagactccggggatggcaatgcgtaagaaaatacctctatctgctttgtgtcaatctcggcccattatgagtaagcttcaggcccatttaaaaggttagatgtttctttttctttttctttttagttatctgttttctatgcgttgagatgtgagattttgctgcgtttgtgtaacgaaggatatttgtgtaatgcgaacaaatgaaattcc

SEQ ID NO: 25196 - protein, 516 aa, Arabidopsis thaliana
  peptide (1)..(516): Ceres Seq. ID no. 12357599
  misc_feature (19)..(496): Homolog of NCBI NO: 23397303 NR Description: putative cytochrome P450 monooxygenase (CYP91A2)
  misc_feature (19)..(510): Homolog of NCBI NO: 25282605 NR Description: cytochrome P450 monooxygenase [imported] -
  misc_feature (19)..(510): Homolog of NCBI NO: 18491105 NR Description: AT4g37430/F6G17_80 [Arabidopsis thaliana]
  misc_feature (16)..(472): Homolog of NCBI NO: 18252165 NR Description: cytochrome P450 monooxygenase - like protein
  misc_feature (19)..(510): Homolog of NCBI NO: 21618274 NR Description: cytochrome P450 monooxygenase CYP91A2
  misc_feature (19)..(510): Homolog of NCBI NO: 15235559 NR Description: cytochrome p450 family
  misc_feature (16)..(512): Homolog of NCBI NO: 15242068 NR Description: cytochrome p450 family
  misc_feature (16)..(515): Homolog of NCBI NO: 15235541 NR Description: cytochrome p450, putative
  misc_feature (16)..(516): Homolog of NCBI NO: 18420031 NR Description: cytochrome p450 family
  misc_feature (16)..(516): Homolog of NCBI NO: 21618287 NR Description: cytochrome P450 monooxygenase-like protein
ITTKFLREKGRERSKMFYYVIVLPLALFLLANKLFFTSKTKRFNLPPSPPYSLPILGHHNLLKPPVHRLFHRLSKTHGPIFSLQFGSRRAVVISSSSLATQCFTGQNDIILSNRPCFLTAKYVAYNYTTVGTAPYGDHWRNLRRICSLEILSSNRLTNFLHIRKDEIHRMLTRLSRDVKKEIELEPLLSDLTFNNIVRMVTGKRYYGDEVHNEEEANVFKKLVADINDCSGARHPGDYLPFMKMFGGSFEKKVKALAEAMDEILQRLLEECRRDKDGNTMVNHLLSLQQNEPEYYTDVTIKGLMLGMMIAGTDTSAVTLEWAMSSLLNHPEALEKAKLEIDEKIGQERLIDEPDIANLPYLQNIVSETFRLYPAAPLLVPRSPTEDIKVGGYDVPRGTMVMVNAWAIHRDPELWNEPEKFKPERFNGGEGGGRGEDVHKLMPFGNGRRSCPGAGLGQKIVTLALGSLIQCFDWQKVNGEAIDMTETPGMAMRKKIPLSALCQSRPIMSKLQAHLKG

SEQ ID NO: 25197 - protein, 501 aa, Arabidopsis thaliana
  peptide (1)..(501): Ceres Seq. ID no. 12357600
  misc_feature (4)..(481): Homolog of NCBI NO: 23397303 NR Description: putative cytochrome P450 monooxygenase (CYP91A2)
  misc_feature (4)..(495): Homolog of NCBI NO: 25282605 NR Description: cytochrome P450 monooxygenase [imported] -
  misc_feature (4)..(495): Homolog of NCBI NO: 18491105 NR Description: AT4g37430/F6G17_80 [Arabidopsis thaliana]
  misc_feature (1)..(457): Homolog of NCBI NO: 18252165 NR Description: cytochrome P450 monooxygenase - like protein
  misc_feature (4)..(495): Homolog of NCBI NO: 21618274 NR Description: cytochrome P450 monooxygenase CYP91A2
  misc_feature (4)..(495): Homolog of NCBI NO: 15235559 NR Description: cytochrome p450 family
  misc_feature (1)..(497): Homolog of NCBI NO: 15242068 NR Description: cytochrome p450 family
  misc_feature (1)..(500): Homolog of NCBI NO: 15235541 NR Description: cytochrome p450, putative
  misc_feature (1)..(501): Homolog of NCBI NO: 18420031 NR Description: cytochrome p450 family
  misc_feature (1)..(501): Homolog of NCBI NO: 21618287 NR Description: cytochrome P450 monooxygenase-like protein
MFYYVIVLPLALFLLANKLFFTSKTKRFNLPPSPPYSLPILGHHNLLKPPVHRLFHRLSKTHGPIFSLQFGSRRAVVISSSSLATQCFTGQNDIILSNRPCFLTAKYVAYNYTTVGTAPYGDHWRNLRRICSLEILSSNRLTNFLHIRKDEIHRMLTRLSRDVKKEIELEPLLSDLTFNNIVRMVTGKRYYGDEVHNEEEANVFKKLVADINDCSGARHPGDYLPFMKMFGGSFEKKVKALAEAMDEILQRLLEECRRDKDGNTMVNHLLSLQQNEPEYYTDVTIKGLMLGMMIAGTDTSAVTLEWAMSSLLNHPEALEKAKLEIDEKIGQERLIDEPDIANLPYLQNIVSETFRLYPAAPLLVPRSPTEDIKVGGYDVPRGTMVMVNAWAIHRDPELWNEPEKFKPERFNGGEGGGRGEDVHKLMPFGNGRRSCPGAGLGQKIVTLALGSLIQCFDWQKVNGEAIDMTETPGMAMRKKIPLSALCQSRPIMSKLQAHLKG

SEQ ID NO: 25198 - protein, 347 aa, Arabidopsis thaliana
  peptide (1)..(347): Ceres Seq. ID no. 12357601
  misc_feature (1)..(327): Homolog of NCBI NO: 23397303 NR Description: putative cytochrome P450 monooxygenase (CYP91A2)
  misc_feature (1)..(341): Homolog of NCBI NO: 25282605 NR Description: cytochrome P450 monooxygenase [imported] -
  misc_feature (1)..(341): Homolog of NCBI NO: 18491105 NR Description: AT4g37430/F6G17_80 [Arabidopsis thaliana]
  misc_feature (1)..(303): Homolog of NCBI NO: 18252165 NR Description: cytochrome P450 monooxygenase - like protein
  misc_feature (1)..(341): Homolog of NCBI NO: 21618274 NR Description: cytochrome P450 monooxygenase CYP91A2
  misc_feature (1)..(341): Homolog of NCBI NO: 15235559 NR Description: cytochrome p450 family
  misc_feature (1)..(343): Homolog of NCBI NO: 15242068 NR Description: cytochrome p450 family
  misc_feature (1)..(346): Homolog of NCBI NO: 15235541 NR Description: cytochrome p450, putative
  misc_feature (1)..(347): Homolog of NCBI NO: 18420031 NR Description: cytochrome p450 family
  misc_feature (1)..(347): Homolog of NCBI NO: 21618287 NR Description: cytochrome P450 monooxygenase-like protein
MLTRLSRDVKKEIELEPLLSDLTFNNIVRMVTGKRYYGDEVHNEEEANVFKKLVADINDCSGARHPGDYLPFMKMFGGSFEKKVKALAEAMDEILQRLLEECRRDKDGNTMVNHLLSLQQNEPEYYTDVTIKGLMLGMMIAGTDTSAVTLEWAMSSLLNHPEALEKAKLEIDEKIGQERLIDEPDIANLPYLQNIVSETFRLYPAAPLLVPRSPTEDIKVGGYDVPRGTMVMVNAWAIHRDPELWNEPEKFKPERFNGGEGGGRGEDVHKLMPFGNGRRSCPGAGLGQKIVTLALGSLIQCFDWQKVNGEAIDMTETPGMAMRKKIPLSALCQSRPIMSKLQAHLKG

SEQ ID NO: 25199 - DNA, 1184 bp, Arabidopsis thaliana
  misc_feature (1)..(1184): Ceres Seq. ID no. 12324958
  misc_feature: MA Experiment ID: 108434 Result: Up-regulated in Transcription
  misc_feature: MA Experiment 108434 PARAMETER Experiment Name: At_Root_Tips_cDNA_P Parameter: Tissue Value: Root Tips
  misc_feature: MA Experiment ID: 108462 Result: Down-regulated in Transcription
  misc_feature: MA Experiment 108462 PARAMETER Experiment Name: At_Germinating_Seeds_cDNA_P Parameter: Age (day) Value: 2 vs. 0
  misc_feature: MA Experiment 108462 PARAMETER Experiment Name: At_Germinating_Seeds_cDNA_P Parameter: Tissue Value: Germinating Seeds
  misc_feature: MA Experiment ID: 108463 Result: Down-regulated in Transcription
  misc_feature: MA Experiment 108463 PARAMETER Experiment Name: At_Germinating_Seeds_cDNA_P Parameter: Age (day) Value: 3 vs. 0
  misc_feature: MA Experiment 108463 PARAMETER Experiment Name: At_Germinating_Seeds_cDNA_P Parameter: Tissue Value: Germinating Seeds
  misc_feature: MA Experiment ID: 108464 Result: Down-regulated in Transcription
  misc_feature: MA Experiment 108464 PARAMETER Experiment Name: At_Germinating_Seeds_cDNA_P Parameter: Age (day) Value: 4 vs. 0
  misc_feature: MA Experiment 108464 PARAMETER Experiment Name: At_Germinating_Seeds_cDNA_P Parameter: Tissue Value: Germinating Seeds
  misc_feature: MA Experiment ID: 108569 Result: Up-regulated in Transcription
  misc_feature: MA Experiment 108569 PARAMETER Experiment Name: At_0.001%_MeJA__cDNA_P Parameter: Timepoint (hr) Value: 6
  misc_feature: MA Experiment 108569 PARAMETER Experiment Name: At_0.001%_MeJA__cDNA_P Parameter: Tissue Value: Aerial
  misc_feature: MA Experiment 108569 PARAMETER Experiment Name: At_0.001%_MeJA__cDNA_P Parameter: Treatment Value: 0.001% MeJA vs. No Treatment
aatattcggaaataaaatcaaattagggttttcctcagtctctctctcttatagacgccaaccacgttttccagctcttgttctttcgattctcagagaagacttttcagaacatcctccaactttctcagataagcaacaatggtgaaaggtcccggtctctacaccgaaatcggcaaaaaggccagagatcttctgtacaaagaccacaacagtgaccagaaattcagtatcaccactttctctcctgccggtgttgccatcacctcaaccggaactaagaaaggtgacttattgttgggagatgtcgcttttcagtcgaggcgaaagaacattactactgatttgaaagtttgcactgattctacttttctgatcaccgctaccgttgatgaggctgcacccggactgaggtcaatcttcagcttcaaggttcctgaccaaaattctggcaaggttgagctgcaatacttgcatgagtacgccggtatcagcacaagcatgggattgactcagaacccaactgtcaacttctctggtgtgattggctccaatgtcttggctgttggtactgatgtttcatttgacaccaagtctggaaatttcaccaagatcaatgctggtttaagcttcaccaaggaggacttaattgcctcccttactgtgaacgacaagggcgatctattgaatgcatcttactatcacattgtgaacccgctgttcaacactgcggttggagccgaagtgagccacaagttatctagcaaggacagcaccataactgttggaacacagcactcgcttgaccccttgacctctgtgaaggctcgtgtcaatagtgcgggtattgcaagtgctctcattcaacacgagtggaaacccaagtcattcttcacaatctctggagaagtcgacacaaagtcaattgacaagagtgctaaagttggattggctctcgcactcaagccttgaaactgagatggaagaagaagttgcaatagtttttttaaactagtttctttctacgtactctgttttttctctgcttggttcatggtttgagtgggcaactactgatctttcccattttcctgccggatttgtagaagaataaaaaggttgaaaatgatcatcttgagatggtgatgaaactcttaagatcctcctcttctgcttctcttttt

SEQ ID NO: 25200 - protein, 276 aa, Arabidopsis thaliana
  peptide (1)..(276): Ceres Seq. ID no. 12324959
  misc_feature (4)..(269): Pfam Name: Eukaryotic porin Pfam Description: Eukaryotic porin
  misc_feature (1)..(276): Homolog of NCBI NO: 629728 NR Description: porin I, 36K - potato
  misc_feature (1)..(276): Homolog of NCBI NO: 1172556 NR Description: 36 kDa outer mitochondrial membrane protein porin
  misc_feature (1)..(276): Homolog of NCBI NO: 7442953 NR Description: porin - common ice plant
  misc_feature (1)..(276): Homolog of NCBI NO: 7442952 NR Description: voltage-dependent anion channel protein - spinach
  misc_feature (1)..(276): Homolog of NCBI NO: 5031279 NR Description: porin [Prunus armeniaca]
  misc_feature (1)..(276): Homolog of NCBI NO: 1172555 NR Description: 34 kDa outer mitochondrial membrane protein porin
  misc_feature (1)..(276): Homolog of NCBI NO: 36957170 NR Description: VDAC1.1 [Lotus corniculatus var. japonicus]
  misc_feature (1)..(276): Homolog of NCBI NO: 36957183 NR Description: VDAC1.2 [Lotus corniculatus var. japonicus]
  misc_feature (1)..(276): Homolog of NCBI NO: 21593558 NR Description: putative porin [Arabidopsis thaliana]
  misc_feature (1)..(276): Homolog of NCBI NO: 15232074 NR Description: putative porin
MVKGPGLYTEIGKKARDLLYKDHNSDQKFSITTFSPAGVAITSTGTKKGDLLLGDVAFQSRRKNITTDLKVCTDSTFLITATVDEAAPGLRSIFSFKVPDQNSGKVELQYLHEYAGISTSMGLTQNPTVNFSGVIGSNVLAVGTDVSFDTKSGNFTKINAGLSFTKEDLIASLTVNDKGDLLNASYYHIVNPLFNTAVGAEVSHKLSSKDSTITVGTQHSLDPLTSVKARVNSAGIASALIQHEWKPKSFFTISGEVDTKSIDKSAKVGLALALKP

SEQ ID NO: 25201 - protein, 156 aa, Arabidopsis thaliana
  peptide (1)..(156): Ceres Seq. ID no. 12324960
  misc_feature (1)..(149): Pfam Name: Eukaryotic porin Pfam Description: Eukaryotic porin
  misc_feature (1)..(156): Homolog of NCBI NO: 629728 NR Description: porin I, 36K - potato
  misc_feature (1)..(156): Homolog of NCBI NO: 1172556 NR Description: 36 kDa outer mitochondrial membrane protein porin
  misc_feature (1)..(156): Homolog of NCBI NO: 7442953 NR Description: porin - common ice plant
  misc_feature (1)..(156): Homolog of NCBI NO: 7442952 NR Description: voltage-dependent anion channel protein - spinach
  misc_feature (1)..(156): Homolog of NCBI NO: 5031279 NR Description: porin [Prunus armeniaca]
  misc_feature (1)..(156): Homolog of NCBI NO: 1172555 NR Description: 34 kDa outer mitochondrial membrane protein porin
  misc_feature (1)..(156): Homolog of NCBI NO: 36957170 NR Description: VDAC1.1 [Lotus corniculatus var. japonicus]
  misc_feature (1)..(156): Homolog of NCBI NO: 36957183 NR Description: VDAC1.2 [Lotus corniculatus var. japonicus]
  misc_feature (1)..(156): Homolog of NCBI NO: 21593558 NR Description: putative porin [Arabidopsis thaliana]
  misc_feature (1)..(156): Homolog of NCBI NO: 15232074 NR Description: putative porin
MGLTQNPTVNFSGVIGSNVLAVGTDVSFDTKSGNFTKINAGLSFTKEDLIASLTVNDKGDLLNASYYHIVNPLFNTAVGAEVSHKLSSKDSTITVGTQHSLDPLTSVKARVNSAGIASALIQHEWKPKSFFTISGEVDTKSIDKSAKVGLALALKP

SEQ ID NO: 25202 - DNA, 1701 bp, Arabidopsis thaliana
  misc_feature (1)..(1701): Ceres Seq. ID no. 12422376
  misc_feature: MA Experiment ID: 108434 Result: Down-regulated in Transcription
  misc_feature: MA Experiment 108434 PARAMETER Experiment Name: At_Root_Tips_cDNA_P Parameter: Tissue Value: Root Tips
  misc_feature: MA Experiment ID: 108585 Result: Up-regulated in Transcription
  misc_feature: MA Experiment 108585 PARAMETER Experiment Name: At_5mM_NaNP_cDNA_P Parameter: Timepoint (hr) Value: 6
  misc_feature: MA Experiment 108585 PARAMETER Experiment Name: At_5mM_NaNP_cDNA_P Parameter: Tissue Value: Aerial
  misc_feature: MA Experiment 108585 PARAMETER Experiment Name: At_5mM_NaNP_cDNA_P Parameter: Treatment Value: null
  misc_feature: MA Experiment ID: 108668 Result: Up-regulated in Transcription
  misc_feature: MA Experiment 108668 PARAMETER Experiment Name: At_2mM_SA_cDNA_P Parameter: Plant Line Value: WS
  misc_feature: MA Experiment 108668 PARAMETER Experiment Name: At_2mM_SA_cDNA_P Parameter: Timepoint (hr) Value: 6
  misc_feature: MA Experiment 108668 PARAMETER Experiment Name: At_2mM_SA_cDNA_P Parameter: Treatment Value: 2mM SA vs. No Treatment
  misc_feature: MA Experiment ID: 20000182 Result: Up-regulated in Transcription
  misc_feature: MA Experiment 20000182 PARAMETER Experiment Name: At_2mM_SA_P Parameter: Age (day) Value: 14
  misc_feature: MA Experiment 20000182 PARAMETER Experiment Name: At_2mM_SA_P Parameter: Organism Value: A. thaliana
  misc_feature: MA Experiment 20000182 PARAMETER Experiment Name: At_2mM_SA_P Parameter: Plant Line Value: WS
  misc_feature: MA Experiment 20000182 PARAMETER Experiment Name: At_2mM_SA_P Parameter: Timepoint (hr) Value: 6
  misc_feature: MA Experiment 20000182 PARAMETER Experiment Name: At_2mM_SA_P Parameter: Tissue Value: Aerial
  misc_feature: MA Experiment 20000182 PARAMETER Experiment Name: At_2mM_SA_P Parameter: Treatment Value: 2mM SA vs. No Treatment
  misc_feature: MA Experiment ID: 20000224 Result: Down-regulated in Transcription
  misc_feature: MA Experiment ID: 20000286 Result: Down-regulated in Transcription
  misc_feature: MA Experiment 20000286 PARAMETER Experiment Name: At_Open_Flower_P Parameter: Age (day) Value: 21
  misc_feature: MA Experiment 20000286 PARAMETER Experiment Name: At_Open_Flower_P Parameter: Plant Line Value: WS
  misc_feature: MA Experiment 20000286 PARAMETER Experiment Name: At_Open_Flower_P Parameter: Tissue Value: Half Open vs. Whole Plant
  misc_feature: MA Experiment ID: 20001905 Result: Up-regulated in Transcription
  misc_feature: MA Experiment 20001905 PARAMETER Experiment Name: At_Drought_Reproduction_P Parameter: Age (day) Value: 40
  misc_feature: MA Experiment 20001905 PARAMETER Experiment Name: At_Drought_Reproduction_P Parameter: Organism Value: A. thaliana
  misc_feature: MA Experiment 20001905 PARAMETER Experiment Name: At_Drought_Reproduction_P Parameter: Plant Line Value: WS
  misc_feature: MA Experiment 20001905 PARAMETER Experiment Name: At_Drought_Reproduction_P Parameter: Timepoint (day) Value: 10
  misc_feature: MA Experiment 20001905 PARAMETER Experiment Name: At_Drought_Reproduction_P Parameter: Tissue Value: Rosettes
  misc_feature: MA Experiment 20001905 PARAMETER Experiment Name: At_Drought_Reproduction_P Parameter: Treatment Value: Drought vs. No Drought
aattcgcgtcgtttttgagtaaaaaaatggcgcaacaatcgttgatctacagtttcgtcgctcgtggtaccgttatcctcgttgagttcacagatttcaaaggcaatttcacatcaatcgctgctcagtgccttcagaagcttccttcttctaacaacaagtttacctacaactgcgatggtcacacgttcaattacctcgtcgaaaatggattcagtgagtcaaaatattgctcgatctgtaagcgtagcttgtttgtgttttgatttatccattgtttgaattagattttttgcctaattgagaaatatgaatcgagttcttatgtttggtatagtttccagtaataattatgtattggcgttgataattaattgatgttagatctatggtaatcagtgatatgtttggtggatctatcaatgaatatttgcaatttttgttctggatctattgattctttgcttatttgcgtgtagctttcgatatcatgaagtttttggcattagtgtattgtgttctttatgtaactctgttttactaaacctaattgggttttgggtgatgttgatggcggatatggtctctttatgatagtgttaactttcttatcagcgatatattgatgaatctattgctttatctcttaatatagagtttaaaatggaccggttttgttttcgtttgtgcagcctattgtgttgttgcagttgattctgctgggaggcagattcctatggctttcttggaacgagttaaggaggatttcaacaagagatatggtggtggaaaggctgcaactgctcaagcaaacagcttgaatatagaatttgggtcgaaactgaaagagcatatgcagtattgcatggatcatcctgatgagattagcaagcttgctaaggttaaagctcaagtgtctgaagttaaaggtgttatgatggaaaacattgagaaggtttgattctgacccttttttctttttatcgatatagttttatgttgtaaaccttttcgaacagagttcagcttgtatgactttagtaccaggatcttatgattcgtaaagcattaactgtagagcggaatgttttattctcggttgtgaagacatattctgttgttaactcgtttatgcattcgtttgcaggttcttgaccgtggtgagaagattgagcttttggttgacaaaacagaaaaccttcgctcacaggtttgttttctaaatggttcaaagtcaatagacccacacagagacatgcaagagtttgcagctttctcttactgattgttgtttctttggtttctaactttaaatttgaactcgactttatcacaggcgcaagattttagaacacaaggaactcaaatgagaagaaagatgtggtttcagaacatgaagataaagctcattgtccttgcaattatcattgccttgattctcatcatcatcctctcaatttgtgggggattcaactgcggtaaataagtctggaacatttcttcccggcgttatcgactgcgctctgtgcttcccaagatctctgagaatatcttcattcagttcgttgtgctacctttttttttgtttttgtttttgtgatttctatattctcatactatatgtttcttcttagattgtacttcttgaaatttgttttgtataggctatatatattatacatatatgtatgcatgttcggc

SEQ ID NO: 25203 - protein, 87 aa, Arabidopsis thaliana
  peptide (1)..(87): Ceres Seq. ID no. 12422377
  misc_feature (9)..(84): Homolog of NCBI NO: 29150380 NR Description: synaptobrevin-like protein
  misc_feature (9)..(79): Homolog of NCBI NO: 15220315 NR Description: synaptobrevin 7B, putative; protein id:
  misc_feature (9)..(79): Homolog of NCBI NO: 27805765 NR Description: Putative vesicle-associated membrane protein 726
  misc_feature (9)..(84): Homolog of NCBI NO: 27805753 NR Description: Vesicle-associated membrane protein 725
  misc_feature (5)..(84): Homolog of NCBI NO: 30685375 NR Description: synaptobrevin -related [Arabidopsis thaliana]
  misc_feature (9)..(79): Homolog of NCBI NO: 15220943 NR Description: synaptobrevin 7B, putative; protein id:
  misc_feature (9)..(79): Homolog of NCBI NO: 600710 NR Description: formerly called HAT24; synaptobrevin-related
  misc_feature (9)..(79): Homolog of NCBI NO: 15225796 NR Description: putative synaptobrevin
  misc_feature (9)..(79): Homolog of NCBI NO: 30685571 NR Description: synaptobrevin -related [Arabidopsis thaliana]
  misc_feature (9)..(79): Homolog of NCBI NO: 25408245 NR Description: probable synaptobrevin [imported] - Arabidopsis
FASFLSKKMAQQSLIYSFVARGTVILVEFTDFKGNFTSIAAQCLQKLPSSNNKFTYNCDGHTFNYLVENGFSESKYCSICKRSLFVF

SEQ ID NO: 25204 - protein, 79 aa, Arabidopsis thaliana
  peptide (1)..(79): Ceres Seq. ID no. 12422378
  misc_feature (1)..(71): Homolog of NCBI NO: 30685571 NR Description: synaptobrevin -related [Arabidopsis thaliana]
  misc_feature (1)..(71): Homolog of NCBI NO: 25408245 NR Description: probable synaptobrevin [imported] - Arabidopsis
  misc_feature (1)..(76): Homolog of NCBI NO: 29150380 NR Description: synaptobrevin-like protein
  misc_feature (1)..(71): Homolog of NCBI NO: 15220315 NR Description: synaptobrevin 7B, putative; protein id:
  misc_feature (1)..(71): Homolog of NCBI NO: 27805765 NR Description: Putative vesicle-associated membrane protein 726
  misc_feature (1)..(76): Homolog of NCBI NO: 27805753 NR Description: Vesicle-associated membrane protein 725
  misc_feature (1)..(76): Homolog of NCBI NO: 30685375 NR Description: synaptobrevin -related [Arabidopsis thaliana]
  misc_feature (1)..(71): Homolog of NCBI NO: 15220943 NR Description: synaptobrevin 7B, putative; protein id:
  misc_feature (1)..(71): Homolog of NCBI NO: 600710 NR Description: formerly called HAT24; synaptobrevin-related
  misc_feature (1)..(71): Homolog of NCBI NO: 15225796 NR Description: putative synaptobrevin
MAQQSLIYSFVARGTVILVEFTDFKGNFTSIAAQCLQKLPSSNNKFTYNCDGHTFNYLVENGFSESKYCSICKRSLFVF

SEQ ID NO: 25205 - protein, 74 aa, Arabidopsis thaliana
  peptide (1)..(74): Ceres Seq. ID no. 12422379
  misc_feature (1)..(74): Homolog of NCBI NO: 30685571 NR Description: synaptobrevin -related [Arabidopsis thaliana]
  misc_feature (1)..(74): Homolog of NCBI NO: 25408245 NR Description: probable synaptobrevin [imported] - Arabidopsis
  misc_feature (1)..(74): Homolog of NCBI NO: 29150380 NR Description: synaptobrevin-like protein
  misc_feature (1)..(74): Homolog of NCBI NO: 15220315 NR Description: synaptobrevin 7B, putative; protein id:
  misc_feature (1)..(74): Homolog of NCBI NO: 27805765 NR Description: Putative vesicle-associated membrane protein 726
  misc_feature (1)..(74): Homolog of NCBI NO: 27805753 NR Description: Vesicle-associated membrane protein 725
  misc_feature (1)..(74): Homolog of NCBI NO: 30685375 NR Description: synaptobrevin -related [Arabidopsis thaliana]
  misc_feature (1)..(74): Homolog of NCBI NO: 15220943 NR Description: synaptobrevin 7B, putative; protein id:
  misc_feature (1)..(74): Homolog of NCBI NO: 600710 NR Description: formerly called HAT24; synaptobrevin-related
  misc_feature (1)..(74): Homolog of NCBI NO: 15225796 NR Description: putative synaptobrevin
MAFLERVKEDFNKRYGGGKAATAQANSLNIEFGSKLKEHMQYCMDHPDEISKLAKVKAQVSEVKGVMMENIEKV

SEQ ID NO: 25206 - DNA, 1258 bp, Arabidopsis thaliana
  misc_feature (1)..(1258): Ceres Seq. ID no. 12335762
  misc_feature: MA Experiment ID: 108434 Result: Down-regulated in Transcription
  misc_feature: MA Experiment 108434 PARAMETER Experiment Name: At_Root_Tips_cDNA_P Parameter: Tissue Value: Root Tips
  misc_feature: MA Experiment ID: 108569 Result: Up-regulated in Transcription
  misc_feature: MA Experiment 108569 PARAMETER Experiment Name: At_0.001%_MeJA__cDNA_P Parameter: Timepoint (hr) Value: 6
  misc_feature: MA Experiment 108569 PARAMETER Experiment Name: At_0.001%_MeJA__cDNA_P Parameter: Tissue Value: Aerial
  misc_feature: MA Experiment 108569 PARAMETER Experiment Name: At_0.001%_MeJA__cDNA_P Parameter: Treatment Value: 0.001% MeJA vs. No Treatment
  misc_feature: MA Experiment ID: 108579 Result: Up-regulated in Transcription
  misc_feature: MA Experiment 108579 PARAMETER Experiment Name: At_4deg_Cold_cDNA_P Parameter: Temperature (deg C) Value: 4 vs. 22
  misc_feature: MA Experiment 108579 PARAMETER Experiment Name: At_4deg_Cold_cDNA_P Parameter: Timepoint (hr) Value: 6
  misc_feature: MA Experiment 108579 PARAMETER Experiment Name: At_4deg_Cold_cDNA_P Parameter: Tissue Value: Aerial
  misc_feature: MA Experiment ID: 108595 Result: Down-regulated in Transcription
  misc_feature: MA Experiment 108595 PARAMETER Experiment Name: At_Ler-pi_Ovule_cDNA_P Parameter: Plant Line Value: null
  misc_feature: MA Experiment ID: 20000090 Result: Up-regulated in Transcription
  misc_feature: MA Experiment ID: 20000111 Result: Down-regulated in Transcription
  misc_feature: MA Experiment 20000111 PARAMETER Experiment Name: At_42deg_Heat_cDNA_P Parameter: Temperature (deg C) Value: 42 vs. 22
  misc_feature: MA Experiment 20000111 PARAMETER Experiment Name: At_42deg_Heat_cDNA_P Parameter: Timepoint (hr) Value: 6
  misc_feature: MA Experiment 20000111 PARAMETER Experiment Name: At_42deg_Heat_cDNA_P Parameter: Tissue Value: Aerial
  misc_feature: MA Experiment ID: 20000112 Result: Down-regulated in Transcription
  misc_feature: MA Experiment 20000112 PARAMETER Experiment Name: At_42deg_Heat_cDNA_P Parameter: Temperature (deg C) Value: 42 vs. 22
  misc_feature: MA Experiment 20000112 PARAMETER Experiment Name: At_42deg_Heat_cDNA_P Parameter: Timepoint (hr) Value: 2
  misc_feature: MA Experiment 20000112 PARAMETER Experiment Name: At_42deg_Heat_cDNA_P Parameter: Tissue Value: Aerial
  misc_feature: MA Experiment ID: 20000113 Result: Down-regulated in Transcription
  misc_feature: MA Experiment 20000113 PARAMETER Experiment Name: At_42deg_Heat_cDNA_P Parameter: Temperature (deg C) Value: 42 vs. 22
  misc_feature: MA Experiment 20000113 PARAMETER Experiment Name: At_42deg_Heat_cDNA_P Parameter: Timepoint (hr) Value: 8
  misc_feature: MA Experiment 20000113 PARAMETER Experiment Name: At_42deg_Heat_cDNA_P Parameter: Tissue Value: Aerial
  misc_feature: MA Experiment ID: 20000794 Result: Down-regulated in Transcription
  misc_feature: MA Experiment 20000794 PARAMETER Experiment Name: At_Petals_P Parameter: Age (day) Value: 23-25 days
  misc_feature: MA Experiment 20000794 PARAMETER Experiment Name: At_Petals_P Parameter: Plant Line Value: WS
  misc_feature: MA Experiment 20000794 PARAMETER Experiment Name: At_Petals_P Parameter: Tissue Value: Petals vs. Whole plant
  misc_feature: MA Experiment ID: 20001451 Result: Down-regulated in Transcription
  misc_feature: MA Experiment 20001451 PARAMETER Experiment Name: At_Far-red-induction_P Parameter: Age (day) Value: 7
  misc_feature: MA Experiment 20001451 PARAMETER Experiment Name: At_Far-red-induction_P Parameter: Light Value: Far-red vs. White
  misc_feature: MA Experiment 20001451 PARAMETER Experiment Name: At_Far-red-induction_P Parameter: Organism Value: A. thaliana
  misc_feature: MA Experiment 20001451 PARAMETER Experiment Name: At_Far-red-induction_P Parameter: Plant Line Value: Columbia
  misc_feature: MA Experiment 20001451 PARAMETER Experiment Name: At_Far-red-induction_P Parameter: Timepoint (hr) Value: 24
  misc_feature: MA Experiment 20001451 PARAMETER Experiment Name: At_Far-red-induction_P Parameter: Tissue Value: Whole Plant
  misc_feature: MA Experiment ID: 20001905 Result: Down-regulated in Transcription
  misc_feature: MA Experiment 20001905 PARAMETER Experiment Name: At_Drought_Reproduction_P Parameter: Age (day) Value: 40
  misc_feature: MA Experiment 20001905 PARAMETER Experiment Name: At_Drought_Reproduction_P Parameter: Organism Value: A. thaliana
  misc_feature: MA Experiment 20001905 PARAMETER Experiment Name: At_Drought_Reproduction_P Parameter: Plant Line Value: WS
  misc_feature: MA Experiment 20001905 PARAMETER Experiment Name: At_Drought_Reproduction_P Parameter: Timepoint (day) Value: 10
  misc_feature: MA Experiment 20001905 PARAMETER Experiment Name: At_Drought_Reproduction_P Parameter: Tissue Value: Rosettes
  misc_feature: MA Experiment 20001905 PARAMETER Experiment Name: At_Drought_Reproduction_P Parameter: Treatment Value: Drought vs. No Drought
  misc_feature: MA Experiment ID: 20001911 Result: Down-regulated in Transcription
  misc_feature: MA Experiment 20001911 PARAMETER Experiment Name: At_Drought_Reproduction_P Parameter: Age (day) Value: 40
  misc_feature: MA Experiment 20001911 PARAMETER Experiment Name: At_Drought_Reproduction_P Parameter: Organism Value: A. thaliana
  misc_feature: MA Experiment 20001911 PARAMETER Experiment Name: At_Drought_Reproduction_P Parameter: Plant Line Value: WS
  misc_feature: MA Experiment 20001911 PARAMETER Experiment Name: At_Drought_Reproduction_P Parameter: Timepoint (day) Value: 10
  misc_feature: MA Experiment 20001911 PARAMETER Experiment Name: At_Drought_Reproduction_P Parameter: Tissue Value: Flowers
  misc_feature: MA Experiment 20001911 PARAMETER Experiment Name: At_Drought_Reproduction_P Parameter: Treatment Value: Drought vs. No Drought
gatttttacaaaacaaagatggaagagcaagtcagaagtcaaaatagctcgaagatgtaagtgacggcgcctgaatactcttggctggtagatttcacctacctcatttttttcatatatctcaaacgtggaatcgctgttactcagtttttatatataaaaataaacactctctcttcttcaaccaaactcatttccaaaatcccacaagcttttcaaatggcgattgctttcaaatccggcgtcttcttcctccaatccccaaaatctcaaattggattccgccattcttctcctcctgattcatcgctttctttcaagagattcactcccatggcttctctctccacctcttctcctactctcggtctcgctgatactttcacacagctcaaaaaacaaggcaaagtagcattcataccatatatcacagctggtgatccggatctctctactactgctgaagcattgaaagttcttgatgcttgtggttctgacataatcgaattgggtgttccttactctgaccctttagctgatggacctgttattcaggctgcggcaacaaggtcgttggagaggggaacaaacctcgatagcatccttgagatgttggataaggttgttccacaaatatcttgtccgatttcgttgttcacgtattacaacccgattcttaaacgtgggttggggaagttcatgtccagcatcagagctgttggtgtacagggacttgtggttcccgatgttcctcttgaggaaactgagatgctgagaaaagaagccctcaacaacgacattgagctggtcctactcactacaccaaccacaccaacagagcgaatgaagcgaattgttgatgcgtcagaaggatttatttaccttgtgagctcaattggagtgactggtgcacgatcatctgtaagcggaaaggttcagtcgctcttgaaggatatcaaagaggcgacagacaagccggtggcagtcggttttggaatatcaaagccggagcatgtgaaacagatagctggatggggagctgatggagtgatcgtaggcagtgcaatggtaaagctattgggtgatgcaaagtcgccaactgaaggacttaaggagcttgagaaactaaccaagtctcttaaatctgctcttctttgaaacacaaacatttgcagacaacatctttagattgtgtttttgattattatcggtgtgtgacaatgatgtctcaatcttttgatacatttcaagtatgatt

SEQ ID NO: 25207 - protein, 312 aa, Arabidopsis thaliana
  peptide (1)..(312): Ceres Seq. ID no. 12335763
  misc_feature (55)..(312): Pfam Name: Tryptophan synthase alpha chain Pfam Description: Tryptophan synthase alpha chain
  misc_feature (12)..(311): Homolog of NCBI NO: 34897216 NR Description: putative indole-3-glycerol phosphate lyase
  misc_feature (38)..(311): Homolog of NCBI NO: 34897218 NR Description: putative indole-3-glycerol phosphate lyase
  misc_feature (29)..(311): Homolog of NCBI NO: 34897212 NR Description: putative indole-3-glycerol phosphate lyase
  misc_feature (49)..(311): Homolog of NCBI NO: 11993325 NR Description: indole-3-glycerol phosphate lyase [Zea mays]
  misc_feature (39)..(311): Homolog of NCBI NO: 11993328 NR Description: putative tryptophan synthase alpha [Zea mays]
  misc_feature (50)..(311): Homolog of NCBI NO: 34897224 NR Description: putative indole-3-glycerol phosphate lyase
  misc_feature (31)..(311): Homolog of NCBI NO: 34393530 NR Description: putative tryptophan synthase alpha chain
  misc_feature (39)..(312): Homolog of NCBI NO: 15235430 NR Description: tryptophan synthase alpha 1-like protein; protein
  misc_feature (1)..(312): Homolog of NCBI NO: 18410104 NR Description: tryptophan synthase alpha chain
  misc_feature (1)..(312): Homolog of NCBI NO: 21593559 NR Description: tryptophan synthase alpha chain [Arabidopsis
MAIAFKSGVFFLQSPKSQIGFRHSSPPDSSLSFKRFTPMASLSTSSPTLGLADTFTQLKKQGKVAFIPYITAGDPDLSTTAEALKVLDACGSDIIELGVPYSDPLADGPVIQAAATRSLERGTNLDSILEMLDKVVPQISCPISLFTYYNPILKRGLGKFMSSIRAVGVQGLVVPDVPLEETEMLRKEALNNDIELVLLTTPTTPTERMKRIVDASEGFIYLVSSIGVTGARSSVSGKVQSLLKDIKEATDKPVAVGFGISKPEHVKQIAGWGADGVIVGSAMVKLLGDAKSPTEGLKELEKLTKSLKSALL

SEQ ID NO: 25208 - protein, 274 aa, Arabidopsis thaliana
  peptide (1)..(274): Ceres Seq. ID no. 12335764
  misc_feature (17)..(274): Pfam Name: Tryptophan synthase alpha chain Pfam Description: Tryptophan synthase alpha chain
  misc_feature (1)..(273): Homolog of NCBI NO: 34897216 NR Description: putative indole-3-glycerol phosphate lyase
  misc_feature (1)..(273): Homolog of NCBI NO: 34897218 NR Description: putative indole-3-glycerol phosphate lyase
  misc_feature (1)..(273): Homolog of NCBI NO: 34897212 NR Description: putative indole-3-glycerol phosphate lyase
  misc_feature (11)..(273): Homolog of NCBI NO: 11993325 NR Description: indole-3-glycerol phosphate lyase [Zea mays]
  misc_feature (1)..(273): Homolog of NCBI NO: 11993328 NR Description: putative tryptophan synthase alpha [Zea mays]
  misc_feature (12)..(273): Homolog of NCBI NO: 34897224 NR Description: putative indole-3-glycerol phosphate lyase
  misc_feature (1)..(273): Homolog of NCBI NO: 34393530 NR Description: putative tryptophan synthase alpha chain
  misc_feature (1)..(274): Homolog of NCBI NO: 15235430 NR Description: tryptophan synthase alpha 1-like protein; protein
  misc_feature (1)..(274): Homolog of NCBI NO: 18410104 NR Description: tryptophan synthase alpha chain
  misc_feature (1)..(274): Homolog of NCBI NO: 21593559 NR Description: tryptophan synthase alpha chain [Arabidopsis
MASLSTSSPTLGLADTFTQLKKQGKVAFIPYITAGDPDLSTTAEALKVLDACGSDIIELGVPYSDPLADGPVIQAAATRSLERGTNLDSILEMLDKVVPQISCPISLFTYYNPILKRGLGKFMSSIRAVGVQGLVVPDVPLEETEMLRKEALNNDIELVLLTTPTTPTERMKRIVDASEGFIYLVSSIGVTGARSSVSGKVQSLLKDIKEATDKPVAVGFGISKPEHVKQIAGWGADGVIVGSAMVKLLGDAKSPTEGLKELEKLTKSLKSALL

SEQ ID NO: 25209 - protein, 182 aa, Arabidopsis thaliana
  peptide (1)..(182): Ceres Seq. ID no. 12335765
  misc_feature (1)..(182): Pfam Name: Tryptophan synthase alpha chain Pfam Description: Tryptophan synthase alpha chain
  misc_feature (1)..(181): Homolog of NCBI NO: 34897216 NR Description: putative indole-3-glycerol phosphate lyase
  misc_feature (1)..(181): Homolog of NCBI NO: 34897218 NR Description: putative indole-3-glycerol phosphate lyase
  misc_feature (1)..(181): Homolog of NCBI NO: 34897212 NR Description: putative indole-3-glycerol phosphate lyase
  misc_feature (1)..(181): Homolog of NCBI NO: 11993325 NR Description: indole-3-glycerol phosphate lyase [Zea mays]
  misc_feature (1)..(181): Homolog of NCBI NO: 11993328 NR Description: putative tryptophan synthase alpha [Zea mays]
  misc_feature (1)..(181): Homolog of NCBI NO: 34897224 NR Description: putative indole-3-glycerol phosphate lyase
  misc_feature (1)..(181): Homolog of NCBI NO: 34393530 NR Description: putative tryptophan synthase alpha chain
  misc_feature (1)..(182): Homolog of NCBI NO: 15235430 NR Description: tryptophan synthase alpha 1-like protein; protein
  misc_feature (1)..(182): Homolog of NCBI NO: 18410104 NR Description: tryptophan synthase alpha chain
  misc_feature (1)..(182): Homolog of NCBI NO: 21593559 NR Description: tryptophan synthase alpha chain [Arabidopsis
MLDKVVPQISCPISLFTYYNPILKRGLGKFMSSIRAVGVQGLVVPDVPLEETEMLRKEALNNDIELVLLTTPTTPTERMKRIVDASEGFIYLVSSIGVTGARSSVSGKVQSLLKDIKEATDKPVAVGFGISKPEHVKQIAGWGADGVIVGSAMVKLLGDAKSPTEGLKELEKLTKSLKSALL

SEQ ID NO: 25210 - DNA, 1391 bp, Arabidopsis thaliana; identical to SEQ ID NO: 21324
  misc_feature (1)..(1391): Ceres Seq. ID no. 13488285
  misc_feature: MA Experiment ID: 108561 Result: Down-regulated in Transcription
  misc_feature: MA Experiment 108561 PARAMETER Experiment Name: At_100uM_ABA_cDNA_P Parameter: Timepoint (hr) Value: 6
  misc_feature: MA Experiment 108561 PARAMETER Experiment Name: At_100uM_ABA_cDNA_P Parameter: Tissue Value: Aerial
  misc_feature: MA Experiment 108561 PARAMETER Experiment Name: At_100uM_ABA_cDNA_P Parameter: Treatment Value: 100uM ABA vs. No Treatment
  misc_feature: MA Experiment ID: 108569 Result: Up-regulated in Transcription
  misc_feature: MA Experiment 108569 PARAMETER Experiment Name: At_0.001%_MeJA__cDNA_P Parameter: Timepoint (hr) Value: 6
  misc_feature: MA Experiment 108569 PARAMETER Experiment Name: At_0.001%_MeJA__cDNA_P Parameter: Tissue Value: Aerial
  misc_feature: MA Experiment 108569 PARAMETER Experiment Name: At_0.001%_MeJA__cDNA_P Parameter: Treatment Value: 0.001% MeJA vs. No Treatment
  misc_feature: MA Experiment ID: 108572 Result: Down-regulated in Transcription
  misc_feature: MA Experiment 108572 PARAMETER Experiment Name: At_Drought_cDNA_P Parameter: Timepoint (hr) Value: 1
  misc_feature: MA Experiment 108572 PARAMETER Experiment Name: At_Drought_cDNA_P Parameter: Tissue Value: Aerial
  misc_feature: MA Experiment 108572 PARAMETER Experiment Name: At_Drought_cDNA_P Parameter: Treatment Value: Drought vs. No Drought
  misc_feature: MA Experiment ID: 108576 Result: Down-regulated in Transcription
  misc_feature: MA Experiment 108576 PARAMETER Experiment Name: At_42deg_Heat_cDNA_P Parameter: Temperature (deg C) Value: 42 vs. 22
  misc_feature: MA Experiment 108576 PARAMETER Experiment Name: At_42deg_Heat_cDNA_P Parameter: Timepoint (hr) Value: 1
  misc_feature: MA Experiment 108576 PARAMETER Experiment Name: At_42deg_Heat_cDNA_P Parameter: Tissue Value: Aerial
  misc_feature: MA Experiment ID: 108668 Result: Down-regulated in Transcription
  misc_feature: MA Experiment 108668 PARAMETER Experiment Name: At_2mM_SA_cDNA_P Parameter: Plant Line Value: WS
  misc_feature: MA Experiment 108668 PARAMETER Experiment Name: At_2mM_SA_cDNA_P Parameter: Timepoint (hr) Value: 6
  misc_feature: MA Experiment 108668 PARAMETER Experiment Name: At_2mM_SA_cDNA_P Parameter: Treatment Value: 2mM SA vs. No Treatment
  misc_feature: MA Experiment ID: 20000169 Result: Down-regulated in Transcription
  misc_feature: MA Experiment 20000169 PARAMETER Experiment Name: At_100uM_ABA_P Parameter: Age (day) Value: 14
  misc_feature: MA Experiment 20000169 PARAMETER Experiment Name: At_100uM_ABA_P Parameter: Organism Value: A. thaliana
  misc_feature: MA Experiment 20000169 PARAMETER Experiment Name: At_100uM_ABA_P Parameter: Plant Line Value: WS
  misc_feature: MA Experiment 20000169 PARAMETER Experiment Name: At_100uM_ABA_P Parameter: Timepoint (hr) Value: 6
  misc_feature: MA Experiment 20000169 PARAMETER Experiment Name: At_100uM_ABA_P Parameter: Tissue Value: Aerial
  misc_feature: MA Experiment 20000169 PARAMETER Experiment Name: At_100uM_ABA_P Parameter: Treatment Value: 100uM ABA vs. No Treatment
  misc_feature: MA Experiment ID: 20000171 Result: Down-regulated in Transcription
  misc_feature: MA Experiment 20000171 PARAMETER Experiment Name: At_42deg_Heat_P Parameter: Age (day) Value: 14
  misc_feature: MA Experiment 20000171 PARAMETER Experiment Name: At_42deg_Heat_P Parameter: Organism Value: A. thaliana
  misc_feature: MA Experiment 20000171 PARAMETER Experiment Name: At_42deg_Heat_P Parameter: Plant Line Value: WS
  misc_feature: MA Experiment 20000171 PARAMETER Experiment Name: At_42deg_Heat_P Parameter: Temperature (deg C) Value: 42 vs. 22
  misc_feature: MA Experiment 20000171 PARAMETER Experiment Name: At_42deg_Heat_P Parameter: Timepoint (hr) Value: 1
  misc_feature: MA Experiment 20000171 PARAMETER Experiment Name: At_42deg_Heat_P Parameter: Tissue Value: Aerial
  misc_feature: MA Experiment ID: 20000173 Result: Down-regulated in Transcription
  misc_feature: MA Experiment 20000173 PARAMETER Experiment Name: At_42deg_Heat_P Parameter: Age (day) Value: 14
  misc_feature: MA Experiment 20000173 PARAMETER Experiment Name: At_42deg_Heat_P Parameter: Organism Value: A. thaliana
  misc_feature: MA Experiment 20000173 PARAMETER Experiment Name: At_42deg_Heat_P Parameter: Plant Line Value: WS
  misc_feature: MA Experiment 20000173 PARAMETER Experiment Name: At_42deg_Heat_P Parameter: Temperature (deg C) Value: 42 vs. 22
  misc_feature: MA Experiment 20000173 PARAMETER Experiment Name: At_42deg_Heat_P Parameter: Timepoint (hr) Value: 6
  misc_feature: MA Experiment 20000173 PARAMETER Experiment Name: At_42deg_Heat_P Parameter: Tissue Value: Aerial
  misc_feature: MA Experiment ID: 20000180 Result: Up-regulated in Transcription
  misc_feature: MA Experiment 20000180 PARAMETER Experiment Name: At_Germinating_Seeds_P Parameter: Age (hr) Value: 24 vs. 0
  misc_feature: MA Experiment 20000180 PARAMETER Experiment Name: At_Germinating_Seeds_P Parameter: Tissue Value: Germinating Seeds
  misc_feature: MA Experiment ID: 20000182 Result: Down-regulated in Transcription
  misc_feature: MA Experiment 20000182 PARAMETER Experiment Name: At_2mM_SA_P Parameter: Age (day) Value: 14
  misc_feature: MA Experiment 20000182 PARAMETER Experiment Name: At_2mM_SA_P Parameter: Organism Value: A. thaliana
  misc_feature: MA Experiment 20000182 PARAMETER Experiment Name: At_2mM_SA_P Parameter: Plant Line Value: WS
  misc_feature: MA Experiment 20000182 PARAMETER Experiment Name: At_2mM_SA_P Parameter: Timepoint (hr) Value: 6
  misc_feature: MA Experiment 20000182 PARAMETER Experiment Name: At_2mM_SA_P Parameter: Tissue Value: Aerial
  misc_feature: MA Experiment 20000182 PARAMETER Experiment Name: At_2mM_SA_P Parameter: Treatment Value: 2mM SA vs. No Treatment
  misc_feature: MA Experiment ID: 20000184 Result: Up-regulated in Transcription
  misc_feature: MA Experiment 20000184 PARAMETER Experiment Name: At_Shoots__P Parameter: Age (day) Value: 7
  misc_feature: MA Experiment 20000184 PARAMETER Experiment Name: At_Shoots__P Parameter: Tissue Value: Shoots vs. Whole Plant
  misc_feature: MA Experiment ID: 20000227 Result: Up-regulated in Transcription
  misc_feature: MA Experiment 20000227 PARAMETER Experiment Name: At_Root-Tips-vs-Tops_P Parameter: Tissue Value: Root Tips vs. Root Tops
  misc_feature: MA Experiment ID: 20000234 Result: Up-regulated in Transcription
  misc_feature: MA Experiment 20000234 PARAMETER Experiment Name: At_Siliques_P Parameter: Age (day) Value: 21
  misc_feature: MA Experiment 20000234 PARAMETER Experiment Name: At_Siliques_P Parameter: Organism Value: A. thaliana
  misc_feature: MA Experiment 20000234 PARAMETER Experiment Name: At_Siliques_P Parameter: Plant Line Value: WS
  misc_feature: MA Experiment 20000234 PARAMETER Experiment Name: At_Siliques_P Parameter: Tissue Value: Less Than 5mm Siliques vs. Whole Plant
  misc_feature: MA Experiment ID: 20000264 Result: Up-regulated in Transcription
  misc_feature: MA Experiment 20000264 PARAMETER Experiment Name: At_Open_Flower_P Parameter: Age (day) Value: 21
  misc_feature: MA Experiment 20000264 PARAMETER Experiment Name: At_Open_Flower_P Parameter: Plant Line Value: WS
  misc_feature: MA Experiment 20000264 PARAMETER Experiment Name: At_Open_Flower_P Parameter: Tissue Value: Open Flower vs. Whole Plant
  misc_feature: MA Experiment ID: 20000265 Result: Up-regulated in Transcription
  misc_feature: MA Experiment 20000265 PARAMETER Experiment Name: At_Open_Flower_P Parameter: Age (day) Value: 21
  misc_feature: MA Experiment 20000265 PARAMETER Experiment Name: At_Open_Flower_P Parameter: Plant Line Value: WS
  misc_feature: MA Experiment 20000265 PARAMETER Experiment Name: At_Open_Flower_P Parameter: Tissue Value: Closed Flower vs. Whole Plant
  misc_feature: MA Experiment ID: 20000267 Result: Down-regulated in Transcription
  misc_feature: MA Experiment 20000267 PARAMETER Experiment Name: At_Drought_P Parameter: Age (day) Value: 7
  misc_feature: MA Experiment 20000267 PARAMETER Experiment Name: At_Drought_P Parameter: Organism Value: A. thaliana
  misc_feature: MA Experiment 20000267 PARAMETER Experiment Name: At_Drought_P Parameter: Plant Line Value: WS
  misc_feature: MA Experiment 20000267 PARAMETER Experiment Name: At_Drought_P Parameter: Timepoint (hr) Value: 6
  misc_feature: MA Experiment 20000267 PARAMETER Experiment Name: At_Drought_P Parameter: Tissue Value: Whole Plant
  misc_feature: MA Experiment 20000267 PARAMETER Experiment Name: At_Drought_P Parameter: Treatment Value: Drought vs. No Drought
  misc_feature: MA Experiment ID: 20000286 Result: Up-regulated in Transcription
  misc_feature: MA Experiment 20000286 PARAMETER Experiment Name: At_Open_Flower_P Parameter: Age (day) Value: 21
  misc_feature: MA Experiment 20000286 PARAMETER Experiment Name: At_Open_Flower_P Parameter: Plant Line Value: WS
  misc_feature: MA Experiment 20000286 PARAMETER Experiment Name: At_Open_Flower_P Parameter: Tissue Value: Half Open vs. Whole Plant
  misc_feature: MA Experiment ID: 20000436 Result: Down-regulated in Transcription
  misc_feature: MA Experiment 20000436 PARAMETER Experiment Name: At_Drought_P Parameter: Age (day) Value: 7
  misc_feature: MA Experiment 20000436 PARAMETER Experiment Name: At_Drought_P Parameter: Organism Value: A. thaliana
  misc_feature: MA Experiment 20000436 PARAMETER Experiment Name: At_Drought_P Parameter: Plant Line Value: WS
  misc_feature: MA Experiment 20000436 PARAMETER Experiment Name: At_Drought_P Parameter: Timepoint (hr) Value: 12
  misc_feature: MA Experiment 20000436 PARAMETER Experiment Name: At_Drought_P Parameter: Tissue Value: Whole Plant
  misc_feature: MA Experiment 20000436 PARAMETER Experiment Name: At_Drought_P Parameter: Treatment Value: Drought vs. No Drought
  misc_feature: MA Experiment ID: 20000437 Result: Down-regulated in Transcription
  misc_feature: MA Experiment 20000437 PARAMETER Experiment Name: At_Drought_P Parameter: Age (day) Value: 8
  misc_feature: MA Experiment 20000437 PARAMETER Experiment Name: At_Drought_P Parameter: Organism Value: A. thaliana
  misc_feature: MA Experiment 20000437 PARAMETER Experiment Name: At_Drought_P Parameter: Plant Line Value: WS
  misc_feature: MA Experiment 20000437 PARAMETER Experiment Name: At_Drought_P Parameter: Timepoint (hr) Value: 24
  misc_feature: MA Experiment 20000437 PARAMETER Experiment Name: At_Drought_P Parameter: Tissue Value: Whole Plant
  misc_feature: MA Experiment 20000437 PARAMETER Experiment Name: At_Drought_P Parameter: Treatment Value: Drought vs. No Drought
  misc_feature: MA Experiment ID: 20000438 Result: Up-regulated in Transcription
  misc_feature: MA Experiment 20000438 PARAMETER Experiment Name: At_Shoots__P Parameter: Age (day) Value: 14
  misc_feature: MA Experiment 20000438 PARAMETER Experiment Name: At_Shoots__P Parameter: Tissue Value: Shoots vs. Whole Plant
  misc_feature: MA Experiment ID: 20000527 Result: Down-regulated in Transcription
  misc_feature: MA Experiment 20000527 PARAMETER Experiment Name: At_10percent_PEG_P Parameter: Age (day) Value: 20
  misc_feature: MA Experiment 20000527 PARAMETER Experiment Name: At_10percent_PEG_P Parameter: Organism Value: A. thaliana
  misc_feature: MA Experiment 20000527 PARAMETER Experiment Name: At_10percent_PEG_P Parameter: Plant Line Value: WS
  misc_feature: MA Experiment 20000527 PARAMETER Experiment Name: At_10percent_PEG_P Parameter: Timepoint (day) Value: 20
  misc_feature: MA Experiment 20000527 PARAMETER Experiment Name: At_10percent_PEG_P Parameter: Tissue Value: Whole Plant
  misc_feature: MA Experiment 20000527 PARAMETER Experiment Name: At_10percent_PEG_P Parameter: Treatment Value: 10percent PEG vs. No Treatment
  misc_feature: MA Experiment ID: 20000794 Result: Up-regulated in Transcription
  misc_feature: MA Experiment 20000794 PARAMETER Experiment Name: At_Petals_P Parameter: Age (day) Value: 23-25 days
  misc_feature: MA Experiment 20000794 PARAMETER Experiment Name: At_Petals_P Parameter: Plant Line Value: WS
  misc_feature: MA Experiment 20000794 PARAMETER Experiment Name: At_Petals_P Parameter: Tissue Value: Petals vs. Whole plant
  misc_feature: MA Experiment ID: 20001450 Result: Up-regulated in Transcription
  misc_feature: MA Experiment 20001450 PARAMETER Experiment Name: At_Far-red-induction_P Parameter: Age (day) Value: 7
  misc_feature: MA Experiment 20001450 PARAMETER Experiment Name: At_Far-red-induction_P Parameter: Light Value: Far-red vs. White
  misc_feature: MA Experiment 20001450 PARAMETER Experiment Name: At_Far-red-induction_P Parameter: Organism Value: A. thaliana
  misc_feature: MA Experiment 20001450 PARAMETER Experiment Name: At_Far-red-induction_P Parameter: Plant Line Value: Columbia
  misc_feature: MA Experiment 20001450 PARAMETER Experiment Name: At_Far-red-induction_P Parameter: Timepoint (hr) Value: 8
  misc_feature: MA Experiment 20001450 PARAMETER Experiment Name: At_Far-red-induction_P Parameter: Tissue Value: Whole Plant
  misc_feature: MA Experiment ID: 20001554 Result: Down-regulated in Transcription
  misc_feature: MA Experiment 20001554 PARAMETER Experiment Name: At_Drought_Soil_Dry_P Parameter: Age (day) Value: 21
  misc_feature: MA Experiment 20001554 PARAMETER Experiment Name: At_Drought_Soil_Dry_P Parameter: Organism Value: A. thaliana
  misc_feature: MA Experiment 20001554 PARAMETER Experiment Name: At_Drought_Soil_Dry_P Parameter: Plant Line Value: WS
  misc_feature: MA Experiment 20001554 PARAMETER Experiment Name: At_Drought_Soil_Dry_P Parameter: Post Timepoint (hr) Value: None
  misc_feature: MA Experiment 20001554 PARAMETER Experiment Name: At_Drought_Soil_Dry_P Parameter: Post-Treatment Value: None
  misc_feature: MA Experiment 20001554 PARAMETER Experiment Name: At_Drought_Soil_Dry_P Parameter: Timepoint (day) Value: 7
  misc_feature: MA Experiment 20001554 PARAMETER Experiment Name: At_Drought_Soil_Dry_P Parameter: Treatment Value: Drought vs. No Drought
  misc_feature: MA Experiment ID: 20001555 Result: Down-regulated in Transcription
  misc_feature: MA Experiment 20001555 PARAMETER Experiment Name: At_Drought_Soil_Dry_P Parameter: Age (day) Value: 24
  misc_feature: MA Experiment 20001555 PARAMETER Experiment Name: At_Drought_Soil_Dry_P Parameter: Organism Value: A. thaliana
  misc_feature: MA Experiment 20001555 PARAMETER Experiment Name: At_Drought_Soil_Dry_P Parameter: Plant Line Value: WS
  misc_feature: MA Experiment 20001555 PARAMETER Experiment Name: At_Drought_Soil_Dry_P Parameter: Post Timepoint (hr) Value: None
  misc_feature: MA Experiment 20001555 PARAMETER Experiment Name: At_Drought_Soil_Dry_P Parameter: Post-Treatment Value: None
  misc_feature: MA Experiment 20001555 PARAMETER Experiment Name: At_Drought_Soil_Dry_P Parameter: Timepoint (day) Value: 10
  misc_feature: MA Experiment 20001555 PARAMETER Experiment Name: At_Drought_Soil_Dry_P Parameter: Treatment Value: Drought vs. No Drought
  misc_feature: MA Experiment ID: 20001556 Result: Down-regulated in Transcription
  misc_feature: MA Experiment 20001556 PARAMETER Experiment Name: At_Drought_Soil_Dry_P Parameter: Age (day) Value: 26
  misc_feature: MA Experiment 20001556 PARAMETER Experiment Name: At_Drought_Soil_Dry_P Parameter: Organism Value: A. thaliana
  misc_feature: MA Experiment 20001556 PARAMETER Experiment Name: At_Drought_Soil_Dry_P Parameter: Plant Line Value: WS
  misc_feature: MA Experiment 20001556 PARAMETER Experiment Name: At_Drought_Soil_Dry_P Parameter: Post Timepoint (hr) Value: None
  misc_feature: MA Experiment 20001556 PARAMETER Experiment Name: At_Drought_Soil_Dry_P Parameter: Post-Treatment Value: None
  misc_feature: MA Experiment 20001556 PARAMETER Experiment Name: At_Drought_Soil_Dry_P Parameter: Timepoint (day) Value: 12
  misc_feature: MA Experiment 20001556 PARAMETER Experiment Name: At_Drought_Soil_Dry_P Parameter: Treatment Value: Drought vs. No Drought
  misc_feature: MA Experiment ID: 20001559 Result: Down-regulated in Transcription
  misc_feature: MA Experiment 20001559 PARAMETER Experiment Name: At_Drought_Soil_Dry_P Parameter: Age (day) Value: 28
  misc_feature: MA Experiment 20001559 PARAMETER Experiment Name: At_Drought_Soil_Dry_P Parameter: Organism Value: A. thaliana
  misc_feature: MA Experiment 20001559 PARAMETER Experiment Name: At_Drought_Soil_Dry_P Parameter: Plant Line Value: WS
  misc_feature: MA Experiment 20001559 PARAMETER Experiment Name: At_Drought_Soil_Dry_P Parameter: Post Timepoint (hr) Value: 29
  misc_feature: MA Experiment 20001559 PARAMETER Experiment Name: At_Drought_Soil_Dry_P Parameter: Post-Treatment Value: Re-Water vs. No Drought
  misc_feature: MA Experiment 20001559 PARAMETER Experiment Name: At_Drought_Soil_Dry_P Parameter: Timepoint (day) Value: 14
  misc_feature: MA Experiment 20001559 PARAMETER Experiment Name: At_Drought_Soil_Dry_P Parameter: Treatment Value: Drought vs. No Drought
  misc_feature: MA Experiment ID: 20001757 Result: Up-regulated in Transcription
  misc_feature: MA Experiment 20001757 PARAMETER Experiment Name: At_50mM_NH4NO3_L-to-H_P Parameter: Timepoint (hr) Value: 6
  misc_feature: MA Experiment 20001757 PARAMETER Experiment Name: At_50mM_NH4NO3_L-to-H_P Parameter: Tissue Value: Leaf
  misc_feature: MA Experiment 20001757 PARAMETER Experiment Name: At_50mM_NH4NO3_L-to-H_P Parameter: Treatment Value: 50mM NH4NO3 vs 100mM Mannitol
  misc_feature: MA Experiment ID: 20001904 Result: Down-regulated in Transcription
  misc_feature: MA Experiment 20001904 PARAMETER Experiment Name: At_Drought_Reproduction_P Parameter: Age (day) Value: 37
  misc_feature: MA Experiment 20001904 PARAMETER Experiment Name: At_Drought_Reproduction_P Parameter: Organism Value: A. thaliana
  misc_feature: MA Experiment 20001904 PARAMETER Experiment Name: At_Drought_Reproduction_P Parameter: Plant Line Value: WS
  misc_feature: MA Experiment 20001904 PARAMETER Experiment Name: At_Drought_Reproduction_P Parameter: Timepoint (day) Value: 7
  misc_feature: MA Experiment 20001904 PARAMETER Experiment Name: At_Drought_Reproduction_P Parameter: Tissue Value: Rosettes
  misc_feature: MA Experiment 20001904 PARAMETER Experiment Name: At_Drought_Reproduction_P Parameter: Treatment Value: Drought vs. No Drought
  misc_feature: MA Experiment ID: 20001906 Result: Down-regulated in Transcription
  misc_feature: MA Experiment 20001906 PARAMETER Experiment Name: At_Drought_Reproduction_P Parameter: Age (day) Value: 35
  misc_feature: MA Experiment 20001906 PARAMETER Experiment Name: At_Drought_Reproduction_P Parameter: Organism Value: A. thaliana
  misc_feature: MA Experiment 20001906 PARAMETER Experiment Name: At_Drought_Reproduction_P Parameter: Plant Line Value: WS
  misc_feature: MA Experiment 20001906 PARAMETER Experiment Name: At_Drought_Reproduction_P Parameter: Timepoint (day) Value: 5
  misc_feature: MA Experiment 20001906 PARAMETER Experiment Name: At_Drought_Reproduction_P Parameter: Tissue Value: Siliques
  misc_feature: MA Experiment 20001906 PARAMETER Experiment Name: At_Drought_Reproduction_P Parameter: Treatment Value: Drought vs. No Drought
  misc_feature: MA Experiment ID: 20001908 Result: Down-regulated in Transcription
  misc_feature: MA Experiment 20001908 PARAMETER Experiment Name: At_Drought_Reproduction_P Parameter: Age (day) Value: 40
  misc_feature: MA Experiment 20001908 PARAMETER Experiment Name: At_Drought_Reproduction_P Parameter: Organism Value: A. thaliana
  misc_feature: MA Experiment 20001908 PARAMETER Experiment Name: At_Drought_Reproduction_P Parameter: Plant Line Value: WS
  misc_feature: MA Experiment 20001908 PARAMETER Experiment Name: At_Drought_Reproduction_P Parameter: Timepoint (day) Value: 10
  misc_feature: MA Experiment 20001908 PARAMETER Experiment Name: At_Drought_Reproduction_P Parameter: Tissue Value: Siliques
  misc_feature: MA Experiment 20001908 PARAMETER Experiment Name: At_Drought_Reproduction_P Parameter: Treatment Value: Drought vs. No Drought
  misc_feature: MA Experiment ID: 20001911 Result: Down-regulated in Transcription
  misc_feature: MA Experiment 20001911 PARAMETER Experiment Name: At_Drought_Reproduction_P Parameter: Age (day) Value: 40
  misc_feature: MA Experiment 20001911 PARAMETER Experiment Name: At_Drought_Reproduction_P Parameter: Organism Value: A. thaliana
  misc_feature: MA Experiment 20001911 PARAMETER Experiment Name: At_Drought_Reproduction_P Parameter: Plant Line Value: WS
  misc_feature: MA Experiment 20001911 PARAMETER Experiment Name: At_Drought_Reproduction_P Parameter: Timepoint (day) Value: 10
  misc_feature: MA Experiment 20001911 PARAMETER Experiment Name: At_Drought_Reproduction_P Parameter: Tissue Value: Flowers
  misc_feature: MA Experiment 20001911 PARAMETER Experiment Name: At_Drought_Reproduction_P Parameter: Treatment Value: Drought vs. No Drought

SEQ ID NO: 25211 - protein, 381 aa, Arabidopsis thaliana; identical to SEQ ID NO: 21325
  peptide (1)..(381): Ceres Seq. ID no. 13488286
  misc_feature (241)..(264): Pfam Name: Leucine Rich Repeat Pfam Description: Leucine Rich Repeat
  misc_feature (241)..(264): Pfam Name: Leucine Rich Repeat Pfam Description: Leucine Rich Repeat
  misc_feature (241)..(264): Pfam Name: Leucine Rich Repeat Pfam Description: Leucine Rich Repeat
  misc_feature (24)..(347): Homolog of NCBI NO: 21536600 NR Description: putative disease resistance protein [Arabidopsis
  misc_feature (18)..(347): Homolog of NCBI NO: 15225296 NR Description: disease resistance protien-related (LRR)
  misc_feature (59)..(377): Homolog of NCBI NO: 25004882 NR Description: polygalacturonase inhibitor-like protein [Cicer
  misc_feature (24)..(377): Homolog of NCBI NO: 15239943 NR Description: leucine rich repeat protein family [Arabidopsis
  misc_feature (24)..(377): Homolog of NCBI NO: 14532722 NR Description: unknown protein [Arabidopsis thaliana]
  misc_feature (24)..(347): Homolog of NCBI NO: 21536600 NR Description: putative disease resistance protein [Arabidopsis
  misc_feature (59)..(377): Homolog of NCBI NO: 25004882 NR Description: polygalacturonase inhibitor-like protein [Cicer
  misc_feature (24)..(377): Homolog of NCBI NO: 14532722 NR Description: unknown protein [Arabidopsis thaliana]
  misc_feature (24)..(377): Homolog of NCBI NO: 15239943 NR Description: leucine rich repeat protein family [Arabidopsis
  misc_feature (59)..(377): Homolog of NCBI NO: 25004882 NR Description: polygalacturonase inhibitor-like protein [Cicer
  misc_feature (18)..(347): Homolog of NCBI NO: 15225296 NR Description: disease resistance protien-related (LRR)
  misc_feature (24)..(347): Homolog of NCBI NO: 21536600 NR Description: putative disease resistance protein [Arabidopsis
  misc_feature (10)..(381): Homolog of NCBI NO: 15230539 NR Description: DNA-damage-repair/toleration protein, putative
  misc_feature (62)..(381): Homolog of NCBI NO: 421844 NR Description: DRT100 protein precursor - Arabidopsis thaliana
  misc_feature (14)..(379): Homolog of NCBI NO: 38566726 NR Description: leucine rich repeat protein [Cicer arietinum]
  misc_feature (20)..(377): Homolog of NCBI NO: 15232373 NR Description: disease resistance protein family (LRR)
  misc_feature (24)..(377): Homolog of NCBI NO: 21593689 NR Description: leucine rich repeat protein, putative
  misc_feature (10)..(381): Homolog of NCBI NO: 15230539 NR Description: DNA-damage-repair/toleration protein, putative
  misc_feature (62)..(381): Homolog of NCBI NO: 421844 NR Description: DRT100 protein precursor - Arabidopsis thaliana
  misc_feature (14)..(379): Homolog of NCBI NO: 38566726 NR Description: leucine rich repeat protein [Cicer arietinum]
  misc_feature (20)..(377): Homolog of NCBI NO: 15232373 NR Description: disease resistance protein family (LRR)
  misc_feature (24)..(377): Homolog of NCBI NO: 21593689 NR Description: leucine rich repeat protein, putative
  misc_feature (24)..(377): Homolog of NCBI NO: 14532722 NR Description: unknown protein [Arabidopsis thaliana]
  misc_feature (24)..(377): Homolog of NCBI NO: 15239943 NR Description: leucine rich repeat protein family [Arabidopsis
  misc_feature (18)..(347): Homolog of NCBI NO: 15225296 NR Description: disease resistance protien-related (LRR)
  misc_feature (24)..(377): Homolog of NCBI NO: 21593689 NR Description: leucine rich repeat protein, putative
  misc_feature (20)..(377): Homolog of NCBI NO: 15232373 NR Description: disease resistance protein family (LRR)
  misc_feature (14)..(379): Homolog of NCBI NO: 38566726 NR Description: leucine rich repeat protein [Cicer arietinum]
  misc_feature (62)..(381): Homolog of NCBI NO: 421844 NR Description: DRT100 protein precursor - Arabidopsis thaliana
  misc_feature (10)..(381): Homolog of NCBI NO: 15230539 NR Description: DNA-damage-repair/toleration protein, putative

SEQ ID NO: 25212 - protein, 372 aa, Arabidopsis thaliana; identical to SEQ ID NO: 21326
  peptide (1)..(372): Ceres Seq. ID no. 13488287
  misc_feature (232)..(255): Pfam Name: Leucine Rich Repeat Pfam Description: Leucine Rich Repeat
  misc_feature (232)..(255): Pfam Name: Leucine Rich Repeat Pfam Description: Leucine Rich Repeat
  misc_feature (232)..(255): Pfam Name: Leucine Rich Repeat Pfam Description: Leucine Rich Repeat
  misc_feature (15)..(338): Homolog of NCBI NO: 21536600 NR Description: putative disease resistance protein [Arabidopsis
  misc_feature (9)..(338): Homolog of NCBI NO: 15225296 NR Description: disease resistance protien-related (LRR)
  misc_feature (50)..(368): Homolog of NCBI NO: 25004882 NR Description: polygalacturonase inhibitor-like protein [Cicer
  misc_feature (15)..(368): Homolog of NCBI NO: 15239943 NR Description: leucine rich repeat protein family [Arabidopsis
  misc_feature (15)..(368): Homolog of NCBI NO: 14532722 NR Description: unknown protein [Arabidopsis thaliana]
  misc_feature (15)..(368): Homolog of NCBI NO: 14532722 NR Description: unknown protein [Arabidopsis thaliana]
  misc_feature (11)..(368): Homolog of NCBI NO: 15232373 NR Description: disease resistance protein family (LRR)
  misc_feature (53)..(372): Homolog of NCBI NO: 421844 NR Description: DRT100 protein precursor - Arabidopsis thaliana
  misc_feature (15)..(368): Homolog of NCBI NO: 15239943 NR Description: leucine rich repeat protein family [Arabidopsis
  misc_feature (50)..(368): Homolog of NCBI NO: 25004882 NR Description: polygalacturonase inhibitor-like protein [Cicer
  misc_feature (9)..(338): Homolog of NCBI NO: 15225296 NR Description: disease resistance protien-related (LRR)
  misc_feature (15)..(338): Homolog of NCBI NO: 21536600 NR Description: putative disease resistance protein [Arabidopsis
  misc_feature (15)..(368): Homolog of NCBI NO: 15239943 NR Description: leucine rich repeat protein family [Arabidopsis
  misc_feature (50)..(368): Homolog of NCBI NO: 25004882 NR Description: polygalacturonase inhibitor-like protein [Cicer
  misc_feature (9)..(338): Homolog of NCBI NO: 15225296 NR Description: disease resistance protien-related (LRR)
  misc_feature (15)..(338): Homolog of NCBI NO: 21536600 NR Description: putative disease resistance protein [Arabidopsis
  misc_feature (1)..(372): Homolog of NCBI NO: 15230539 NR Description: DNA-damage-repair/toleration protein, putative
  misc_feature (1)..(372): Homolog of NCBI NO: 15230539 NR Description: DNA-damage-repair/toleration protein, putative
  misc_feature (53)..(372): Homolog of NCBI NO: 421844 NR Description: DRT100 protein precursor - Arabidopsis thaliana
  misc_feature (5)..(370): Homolog of NCBI NO: 38566726 NR Description: leucine rich repeat protein [Cicer arietinum]
  misc_feature (11)..(368): Homolog of NCBI NO: 15232373 NR Description: disease resistance protein family (LRR)
  misc_feature (15)..(368): Homolog of NCBI NO: 21593689 NR Description: leucine rich repeat protein, putative
  misc_feature (15)..(368): Homolog of NCBI NO: 14532722 NR Description: unknown protein [Arabidopsis thaliana]
  misc_feature (5)..(370): Homolog of NCBI NO: 38566726 NR Description: leucine rich repeat protein [Cicer arietinum]
  misc_feature (15)..(368): Homolog of NCBI NO: 21593689 NR Description: leucine rich repeat protein, putative
  misc_feature (15)..(368): Homolog of NCBI NO: 21593689 NR Description: leucine rich repeat protein, putative
  misc_feature (11)..(368): Homolog of NCBI NO: 15232373 NR Description: disease resistance protein family (LRR)
  misc_feature (5)..(370): Homolog of NCBI NO: 38566726 NR Description: leucine rich repeat protein [Cicer arietinum]
  misc_feature (53)..(372): Homolog of NCBI NO: 421844 NR Description: DRT100 protein precursor - Arabidopsis thaliana
  misc_feature (1)..(372): Homolog of NCBI NO: 15230539 NR Description: DNA-damage-repair/toleration protein, putative

SEQ ID NO: 25213 - protein, 275 aa, Arabidopsis thaliana; identical to SEQ ID NO: 21327
  peptide (1)..(275): Ceres Seq. ID no. 13488288
  misc_feature (135)..(158): Pfam Name: Leucine Rich Repeat Pfam Description: Leucine Rich Repeat
  misc_feature (135)..(158): Pfam Name: Leucine Rich Repeat Pfam Description: Leucine Rich Repeat
  misc_feature (135)..(158): Pfam Name: Leucine Rich Repeat Pfam Description: Leucine Rich Repeat
  misc_feature (1)..(241): Homolog of NCBI NO: 21536600 NR Description: putative disease resistance protein [Arabidopsis
  misc_feature (1)..(241): Homolog of NCBI NO: 15225296 NR Description: disease resistance protien-related (LRR)
  misc_feature (1)..(271): Homolog of NCBI NO: 25004882 NR Description: polygalacturonase inhibitor-like protein [Cicer
  misc_feature (1)..(271): Homolog of NCBI NO: 15239943 NR Description: leucine rich repeat protein family [Arabidopsis
  misc_feature (1)..(271): Homolog of NCBI NO: 14532722 NR Description: unknown protein [Arabidopsis thaliana]
  misc_feature (1)..(241): Homolog of NCBI NO: 21536600 NR Description: putative disease resistance protein [Arabidopsis
  misc_feature (1)..(271): Homolog of NCBI NO: 25004882 NR Description: polygalacturonase inhibitor-like protein [Cicer
  misc_feature (1)..(271): Homolog of NCBI NO: 14532722 NR Description: unknown protein [Arabidopsis thaliana]
  misc_feature (1)..(241): Homolog of NCBI NO: 21536600 NR Description: putative disease resistance protein [Arabidopsis
  misc_feature (1)..(275): Homolog of NCBI NO: 15230539 NR Description: DNA-damage-repair/toleration protein, putative
  misc_feature (1)..(275): Homolog of NCBI NO: 421844 NR Description: DRT100 protein precursor - Arabidopsis thaliana
  misc_feature (1)..(273): Homolog of NCBI NO: 38566726 NR Description: leucine rich repeat protein [Cicer arietinum]
  misc_feature (1)..(275): Homolog of NCBI NO: 15230539 NR Description: DNA-damage-repair/toleration protein, putative
  misc_feature (1)..(275): Homolog of NCBI NO: 421844 NR Description: DRT100 protein precursor - Arabidopsis thaliana
  misc_feature (1)..(273): Homolog of NCBI NO: 38566726 NR Description: leucine rich repeat protein [Cicer arietinum]
  misc_feature (1)..(271): Homolog of NCBI NO: 15232373 NR Description: disease resistance protein family (LRR)
  misc_feature (1)..(271): Homolog of NCBI NO: 21593689 NR Description: leucine rich repeat protein, putative
  misc_feature (1)..(271): Homolog of NCBI NO: 15232373 NR Description: disease resistance protein family (LRR)
  misc_feature (1)..(271): Homolog of NCBI NO: 21593689 NR Description: leucine rich repeat protein, putative
  misc_feature (1)..(271): Homolog of NCBI NO: 14532722 NR Description: unknown protein [Arabidopsis thaliana]
  misc_feature (1)..(271): Homolog of NCBI NO: 15239943 NR Description: leucine rich repeat protein family [Arabidopsis
  misc_feature (1)..(271): Homolog of NCBI NO: 25004882 NR Description: polygalacturonase inhibitor-like protein [Cicer
  misc_feature (1)..(241): Homolog of NCBI NO: 15225296 NR Description: disease resistance protien-related (LRR)
  misc_feature (1)..(271): Homolog of NCBI NO: 15239943 NR Description: leucine rich repeat protein family [Arabidopsis
  misc_feature (1)..(241): Homolog of NCBI NO: 15225296 NR Description: disease resistance protien-related (LRR)
  misc_feature (1)..(271): Homolog of NCBI NO: 21593689 NR Description: leucine rich repeat protein, putative
  misc_feature (1)..(271): Homolog of NCBI NO: 15232373 NR Description: disease resistance protein family (LRR)
  misc_feature (1)..(273): Homolog of NCBI NO: 38566726 NR Description: leucine rich repeat protein [Cicer arietinum]
  misc_feature (1)..(275): Homolog of NCBI NO: 421844 NR Description: DRT100 protein precursor - Arabidopsis thaliana
  misc_feature (1)..(275): Homolog of NCBI NO: 15230539 NR Description: DNA-damage-repair/toleration protein, putative

SEQ ID NO: 25214 - DNA, 1201 bp, Arabidopsis thaliana
  misc_feature (1)..(1201): Ceres Seq. ID no. 13492933
  misc_feature: MA Experiment ID: 108434 Result: Down-regulated in Transcription
  misc_feature: MA Experiment 108434 PARAMETER Experiment Name: At_Root_Tips_cDNA_P Parameter: Tissue Value: Root Tips
  misc_feature: MA Experiment ID: 108462 Result: Down-regulated in Transcription
  misc_feature: MA Experiment 108462 PARAMETER Experiment Name: At_Germinating_Seeds_cDNA_P Parameter: Age (day) Value: 2 vs. 0
  misc_feature: MA Experiment 108462 PARAMETER Experiment Name: At_Germinating_Seeds_cDNA_P Parameter: Tissue Value: Germinating Seeds
  misc_feature: MA Experiment ID: 108605 Result: Up-regulated in Transcription
  misc_feature: MA Experiment 108605 PARAMETER Experiment Name: At_100uM_ABA_cDNA_P Parameter: Timepoint (hr) Value: 6
  misc_feature: MA Experiment 108605 PARAMETER Experiment Name: At_100uM_ABA_cDNA_P Parameter: Tissue Value: Aerial
  misc_feature: MA Experiment 108605 PARAMETER Experiment Name: At_100uM_ABA_cDNA_P Parameter: Treatment Value: 100uM ABA vs. No Treatment
  misc_feature: MA Experiment ID: 20000069 Result: Up-regulated in Transcription
  misc_feature: MA Experiment 20000069 PARAMETER Experiment Name: At_100uM_ABA_Mutants_cDNA_P Parameter: Plant Line Value: CS23
  misc_feature: MA Experiment 20000069 PARAMETER Experiment Name: At_100uM_ABA_Mutants_cDNA_P Parameter: Timepoint (hr) Value: 6
  misc_feature: MA Experiment 20000069 PARAMETER Experiment Name: At_100uM_ABA_Mutants_cDNA_P Parameter: Tissue Value: Aerial
  misc_feature: MA Experiment 20000069 PARAMETER Experiment Name: At_100uM_ABA_Mutants_cDNA_P Parameter: Treatment Value: 100uM ABA vs. No Treatment
  misc_feature: MA Experiment ID: 20000070 Result: Up-regulated in Transcription
  misc_feature: MA Experiment 20000070 PARAMETER Experiment Name: At_100uM_ABA_Mutants_cDNA_P Parameter: Plant Line Value: CS24
  misc_feature: MA Experiment 20000070 PARAMETER Experiment Name: At_100uM_ABA_Mutants_cDNA_P Parameter: Timepoint (hr) Value: 6
  misc_feature: MA Experiment 20000070 PARAMETER Experiment Name: At_100uM_ABA_Mutants_cDNA_P Parameter: Tissue Value: Aerial
  misc_feature: MA Experiment 20000070 PARAMETER Experiment Name: At_100uM_ABA_Mutants_cDNA_P Parameter: Treatment Value: 100uM ABA vs. No Treatment
  misc_feature: MA Experiment ID: 20000185 Result: Up-regulated in Transcription
  misc_feature: MA Experiment 20000185 PARAMETER Experiment Name: At_Roots__P Parameter: Age (day) Value: 7 vs. 21
  misc_feature: MA Experiment 20000185 PARAMETER Experiment Name: At_Roots__P Parameter: Organism Value: A. thaliana
  misc_feature: MA Experiment 20000185 PARAMETER Experiment Name: At_Roots__P Parameter: Tissue Value: Roots vs. Whole Plant
  misc_feature: MA Experiment ID: 20000224 Result: Up-regulated in Transcription
  misc_feature: MA Experiment ID: 20000227 Result: Down-regulated in Transcription
  misc_feature: MA Experiment 20000227 PARAMETER Experiment Name: At_Root-Tips-vs-Tops_P Parameter: Tissue Value: Root Tips vs. Root Tops
  misc_feature: MA Experiment ID: 20000439 Result: Up-regulated in Transcription
  misc_feature: MA Experiment 20000439 PARAMETER Experiment Name: At_Roots__P Parameter: Age (day) Value: 14 vs. 21
  misc_feature: MA Experiment 20000439 PARAMETER Experiment Name: At_Roots__P Parameter: Organism Value: A. thaliana
  misc_feature: MA Experiment 20000439 PARAMETER Experiment Name: At_Roots__P Parameter: Tissue Value: Roots vs. Whole Plant
accaatcaccactcacatgttatcaataattgcttataagaatttgtattcccactctaatcatcaactctattgattccacgcgatgacgacgttttcaacgagctttcttttccttttgttggttttctgcttgatcggttcactagctgccgatgatctccaacataaatccggtcgggacgtctgctccggtggttctgatcttagaacccccgatattcgtcttaaccggccgacagactctgtcgtcggaaactgcccgacggaggcgagtcctttagttatggctgacgacgagaagtacggtaacaaaatggttatcagtctcactcctcgcctttatgactatgtcctcaacaacgttcgtgagcatgagattttgaagcaacttcgagaagaaactgccattagtcaaattcaggtgtcacctgatcaagcgcaattgcttgcaatgcttgtagagattcttggagctaaacgatgtattgaagttggagtttacacgggatattcatcactggctgtggcgttggttctaccagaatcagggcgtcttgttgcctgtgataaagatgctaacgctcttgaagttgctaagaggtactacgagcttgccggagtgtctcacaaggtcactgtgaaacatggtcttgcagcagaatctttgatgtctatgattcagaacggtgaagagtccagctatgattttgcatttcttgatgctgataaggcgatgtatcaggagtacttcgaatcgctacttcgactcgtcagggttggtggagtcattgtgattgataatgttctttggcatggatgggttgcggattctacggtgaatgatgagaggaccatcagcctaagaaatttcaacaaaaaattaatggatgatcaacgtgtaagcattagtatggtatcaatcggcgatggtatgaccatatgccgcaagaggtaatcatccgtaaaaaccactcagctcgcagtgaacctgtttcaagatagaagaagtctttaaacataaaaggattgatgaagccaagatatccagtctcacaaacactaaagactcatcaacttttcccttttcagtcaaaaataagttgaataattgataaaccaatgtgtgggcctattgggctttgatatgtactgtttctatgtccgtttgaggccttttataaaatcgtcttacgaccct

SEQ ID NO: 25215 - protein, 290 aa, Arabidopsis thaliana
  peptide (1)..(290): Ceres Seq. ID no. 13492934
  misc_feature (94)..(290): Pfam Name: O-methyltransferase Pfam Description: O-methyltransferase
  misc_feature (71)..(289): Homolog of NCBI NO: 30580370 NR Description: Putative caffeoyl-CoA O-methyltransferase
  misc_feature (77)..(290): Homolog of NCBI NO: 16331769 NR Description: O-methyltransferase [Synechocystis sp. PCC 6803]
  misc_feature (80)..(290): Homolog of NCBI NO: 7463011 NR Description: probable O-methyltransferase (EC 2.1.1.-) safC -
  misc_feature (77)..(290): Homolog of NCBI NO: 23129851 NR Description: hypothetical protein [Nostoc punctiforme]
  misc_feature (79)..(290): Homolog of NCBI NO: 23043526 NR Description: hypothetical protein [Trichodesmium erythraeum
  misc_feature (80)..(290): Homolog of NCBI NO: 23126866 NR Description: hypothetical protein [Nostoc punctiforme]
  misc_feature (80)..(289): Homolog of NCBI NO: 17232671 NR Description: O-methyltransferase [Nostoc sp. PCC 7120]
  misc_feature (35)..(290): Homolog of NCBI NO: 15228652 NR Description: O-methyltransferase family 3 [Arabidopsis
  misc_feature (1)..(290): Homolog of NCBI NO: 21593560 NR Description: unknown [Arabidopsis thaliana]
  misc_feature (1)..(290): Homolog of NCBI NO: 15228651 NR Description: O-methyltransferase family 3 [Arabidopsis
MTTFSTSFLFLLLVFCLIGSLAADDLQHKSGRDVCSGGSDLRTPDIRLNRPTDSVVGNCPTEASPLVMADDEKYGNKMVISLTPRLYDYVLNNVREHEILKQLREETAISQIQVSPDQAQLLAMLVEILGAKRCIEVGVYTGYSSLAVALVLPESGRLVACDKDANALEVAKRYYELAGVSHKVTVKHGLAAESLMSMIQNGEESSYDFAFLDADKAMYQEYFESLLRLVRVGGVIVIDNVLWHGWVADSTVNDERTISLRNFNKKLMDDQRVSISMVSIGDGMTICRKR

SEQ ID NO: 25216 - protein, 223 aa, Arabidopsis thaliana
  peptide (1)..(223): Ceres Seq. ID no. 13492935
  misc_feature (27)..(223): Pfam Name: O-methyltransferase Pfam Description: O-methyltransferase
  misc_feature (4)..(222): Homolog of NCBI NO: 30580370 NR Description: Putative caffeoyl-CoA O-methyltransferase
  misc_feature (10)..(223): Homolog of NCBI NO: 16331769 NR Description: O-methyltransferase [Synechocystis sp. PCC 6803]
  misc_feature (13)..(223): Homolog of NCBI NO: 7463011 NR Description: probable O-methyltransferase (EC 2.1.1.-) safC -
  misc_feature (10)..(223): Homolog of NCBI NO: 23129851 NR Description: hypothetical protein [Nostoc punctiforme]
  misc_feature (12)..(223): Homolog of NCBI NO: 23043526 NR Description: hypothetical protein [Trichodesmium erythraeum
  misc_feature (13)..(223): Homolog of NCBI NO: 23126866 NR Description: hypothetical protein [Nostoc punctiforme]
  misc_feature (13)..(222): Homolog of NCBI NO: 17232671 NR Description: O-methyltransferase [Nostoc sp. PCC 7120]
  misc_feature (1)..(223): Homolog of NCBI NO: 15228652 NR Description: O-methyltransferase family 3 [Arabidopsis
  misc_feature (1)..(223): Homolog of NCBI NO: 21593560 NR Description: unknown [Arabidopsis thaliana]
  misc_feature (1)..(223): Homolog of NCBI NO: 15228651 NR Description: O-methyltransferase family 3 [Arabidopsis
MADDEKYGNKMVISLTPRLYDYVLNNVREHEILKQLREETAISQIQVSPDQAQLLAMLVEILGAKRCIEVGVYTGYSSLAVALVLPESGRLVACDKDANALEVAKRYYELAGVSHKVTVKHGLAAESLMSMIQNGEESSYDFAFLDADKAMYQEYFESLLRLVRVGGVIVIDNVLWHGWVADSTVNDERTISLRNFNKKLMDDQRVSISMVSIGDGMTICRKR

SEQ ID NO: 25217 - protein, 213 aa, Arabidopsis thaliana
  peptide (1)..(213): Ceres Seq. ID no. 13492936
  misc_feature (17)..(213): Pfam Name: O-methyltransferase Pfam Description: O-methyltransferase
  misc_feature (1)..(212): Homolog of NCBI NO: 30580370 NR Description: Putative caffeoyl-CoA O-methyltransferase
  misc_feature (1)..(213): Homolog of NCBI NO: 16331769 NR Description: O-methyltransferase [Synechocystis sp. PCC 6803]
  misc_feature (3)..(213): Homolog of NCBI NO: 7463011 NR Description: probable O-methyltransferase (EC 2.1.1.-) safC -
  misc_feature (1)..(213): Homolog of NCBI NO: 23129851 NR Description: hypothetical protein [Nostoc punctiforme]
  misc_feature (2)..(213): Homolog of NCBI NO: 23043526 NR Description: hypothetical protein [Trichodesmium erythraeum
  misc_feature (3)..(213): Homolog of NCBI NO: 23126866 NR Description: hypothetical protein [Nostoc punctiforme]
  misc_feature (3)..(212): Homolog of NCBI NO: 17232671 NR Description: O-methyltransferase [Nostoc sp. PCC 7120]
  misc_feature (1)..(213): Homolog of NCBI NO: 15228652 NR Description: O-methyltransferase family 3 [Arabidopsis
  misc_feature (1)..(213): Homolog of NCBI NO: 21593560 NR Description: unknown [Arabidopsis thaliana]
  misc_feature (1)..(213): Homolog of NCBI NO: 15228651 NR Description: O-methyltransferase family 3 [Arabidopsis
MVISLTPRLYDYVLNNVREHEILKQLREETAISQIQVSPDQAQLLAMLVEILGAKRCIEVGVYTGYSSLAVALVLPESGRLVACDKDANALEVAKRYYELAGVSHKVTVKHGLAAESLMSMIQNGEESSYDFAFLDADKAMYQEYFESLLRLVRVGGVIVIDNVLWHGWVADSTVNDERTISLRNFNKKLMDDQRVSISMVSIGDGMTICRKR

SEQ ID NO: 25218 - DNA, 1463 bp, Arabidopsis thaliana
  misc_feature (1)..(1463): Ceres Seq. ID no. 13487792
  misc_feature: MA Experiment ID: 108461 Result: Down-regulated in Transcription
  misc_feature: MA Experiment 108461 PARAMETER Experiment Name: At_Germinating_Seeds_cDNA_P Parameter: Age (day) Value: 1 vs. 0
  misc_feature: MA Experiment 108461 PARAMETER Experiment Name: At_Germinating_Seeds_cDNA_P Parameter: Tissue Value: Germinating Seeds
  misc_feature: MA Experiment ID: 108464 Result: Down-regulated in Transcription
  misc_feature: MA Experiment 108464 PARAMETER Experiment Name: At_Germinating_Seeds_cDNA_P Parameter: Age (day) Value: 4 vs. 0
  misc_feature: MA Experiment 108464 PARAMETER Experiment Name: At_Germinating_Seeds_cDNA_P Parameter: Tissue Value: Germinating Seeds
  misc_feature: MA Experiment ID: 108473 Result: Down-regulated in Transcription
  misc_feature: MA Experiment 108473 PARAMETER Experiment Name: At_Drought_Flowers_cDNA_P Parameter: Timepoint (hr) Value: 7 d
  misc_feature: MA Experiment 108473 PARAMETER Experiment Name: At_Drought_Flowers_cDNA_P Parameter: Tissue Value: Flower
  misc_feature: MA Experiment 108473 PARAMETER Experiment Name: At_Drought_Flowers_cDNA_P Parameter: Treatment Value: Drought vs. No Drought
  misc_feature: MA Experiment ID: 108501 Result: Down-regulated in Transcription
  misc_feature: MA Experiment 108501 PARAMETER Experiment Name: At_ap2_floral_buds_cDNA_P Parameter: Plant Line Value: ap2 (Ler.)
  misc_feature: MA Experiment 108501 PARAMETER Experiment Name: At_ap2_floral_buds_cDNA_P Parameter: Tissue Value: Closed Flower
  misc_feature: MA Experiment ID: 108576 Result: Up-regulated in Transcription
  misc_feature: MA Experiment 108576 PARAMETER Experiment Name: At_42deg_Heat_cDNA_P Parameter: Temperature (deg C) Value: 42 vs. 22
  misc_feature: MA Experiment 108576 PARAMETER Experiment Name: At_42deg_Heat_cDNA_P Parameter: Timepoint (hr) Value: 1
  misc_feature: MA Experiment 108576 PARAMETER Experiment Name: At_42deg_Heat_cDNA_P Parameter: Tissue Value: Aerial
  misc_feature: MA Experiment ID: 108577 Result: Up-regulated in Transcription
  misc_feature: MA Experiment 108577 PARAMETER Experiment Name: At_42deg_Heat_cDNA_P Parameter: Temperature (deg C) Value: 42 vs. 22
  misc_feature: MA Experiment 108577 PARAMETER Experiment Name: At_42deg_Heat_cDNA_P Parameter: Timepoint (hr) Value: 6
  misc_feature: MA Experiment 108577 PARAMETER Experiment Name: At_42deg_Heat_cDNA_P Parameter: Tissue Value: Aerial
  misc_feature: MA Experiment ID: 20000093 Result: Up-regulated in Transcription
  misc_feature: MA Experiment 20000093 PARAMETER Experiment Name: At_42deg_Heat_cDNA_P Parameter: Temperature (deg C) Value: 42 vs. 22
  misc_feature: MA Experiment 20000093 PARAMETER Experiment Name: At_42deg_Heat_cDNA_P Parameter: Timepoint (hr) Value: 0.5
  misc_feature: MA Experiment 20000093 PARAMETER Experiment Name: At_42deg_Heat_cDNA_P Parameter: Tissue Value: Aerial
  misc_feature: MA Experiment ID: 20000112 Result: Up-regulated in Transcription
  misc_feature: MA Experiment 20000112 PARAMETER Experiment Name: At_42deg_Heat_cDNA_P Parameter: Temperature (deg C) Value: 42 vs. 22
  misc_feature: MA Experiment 20000112 PARAMETER Experiment Name: At_42deg_Heat_cDNA_P Parameter: Timepoint (hr) Value: 2
  misc_feature: MA Experiment 20000112 PARAMETER Experiment Name: At_42deg_Heat_cDNA_P Parameter: Tissue Value: Aerial
  misc_feature: MA Experiment ID: 20000144 Result: Up-regulated in Transcription
  misc_feature: MA Experiment 20000144 PARAMETER Experiment Name: At_42deg_Heat_cDNA_P Parameter: Temperature (deg C) Value: 42 vs. 22
  misc_feature: MA Experiment 20000144 PARAMETER Experiment Name: At_42deg_Heat_cDNA_P Parameter: Timepoint (hr) Value: 1
  misc_feature: MA Experiment 20000144 PARAMETER Experiment Name: At_42deg_Heat_cDNA_P Parameter: Tissue Value: Aerial
atattatttgcactctttcaagttcacaaggtgaatctgatcttactttctggtccacctctaagcacttttaaatggagaagaaaggccagcatggtacatatgaatcaatgatgactcatcatccgatcctctgtatcattgctttatctgtacttttcatagcaatcgacccctttcacatgagtccaatcgggggtcgtgagttcaaacccgtgaagcatgaggttgctccatataaggaagtcatgggaagctggcctagagacaaccttagtcgactgggtaatcatgggaaactggagttcgtggaccaagtctttggtccagagtcattagagtttgatagtttaggtcgtggtccatacacagggttggctgatggaagagtggttagatggatgggtgaagcaatcggatgggagacattttcggtggtaacatcaaaatggtcagaggaagcttgtgtgagaggtgtggattcaacaacaaacaagcaatggaagcacgagaagctgtgtgggaggcctcttggactgagatttcataaagagacaggaaatttgtatattgcagacgcttactatggtctacttgtggttggtcctgaaggagggattgctacgcctttagctactcatgtggaaggaaagcctatactctttgccaatgaccttgacatccatagaaatggctccatcttcttcactgacaccagcaaaagatatgacagagcgaatcatttctttatattactggaaggagaatcaacaggaaggcttctaagatatgacccacctaccaaaacaacacacattgtgctggagggtttggcttttcccaatggaattcaactctctaaagaccaatctttcctcctcttcaccgaaacaaccaattgcagattggtgaagtactggctggagggtccaaagatgggtgaagtcgaggtggtggcagatctcccgggattcccagacaatgtaagaataaatgaagagggtcagttttgggttgcaattgattgttgcagaacaccggcacaagaggttcttacaaacaacccttggataagaagcatctactttcggttgccaataccgatgaagctgcttgcgaaaacgatggggatgagaatgtacactgtgatatcgagattcgacgaggaaggtaaagtcctggaggtgctcgaggatagacaagggaaggtaatgaagcttgtgagtgaagtgagggaagttcaagggaagctttggattggaacagtggctcataaccacattgccactctaccttatcctttgacaatgaatcaatgaaggactttgttgtgtagttcctgaactaaatcatctctctgtaacttaattatcttcgttttgattcaagttcctttggaccggtttgtcttttgttgatattatgtgtgaccttagattcctcatgaaattctctttctttct

SEQ ID NO: 25219 - protein, 414 aa, Arabidopsis thaliana
  peptide (1)..(414): Ceres Seq. ID no. 13487793
  misc_feature (78)..(403): Pfam Name: Strictosidine synthase Pfam Description: Strictosidine synthase
  misc_feature (84)..(398): Homolog of NCBI NO: 11280567 NR Description: hypothetical protein F24I3.110 - Arabidopsis
  misc_feature (277)..(409): Homolog of NCBI NO: 25335889 NR Description: protein T27G7.16 [imported] - Arabidopsis
  misc_feature (22)..(272): Homolog of NCBI NO: 25335889 NR Description: protein T27G7.16 [imported] - Arabidopsis
  misc_feature (23)..(408): Homolog of NCBI NO: 40538997 NR Description: putative  strictosidine synthase
  misc_feature (22)..(409): Homolog of NCBI NO: 18390900 NR Description: strictosidine synthase-related [Arabidopsis
  misc_feature (20)..(404): Homolog of NCBI NO: 22326950 NR Description: strictosidine synthase family [Arabidopsis
  misc_feature (1)..(410): Homolog of NCBI NO: 14028757 NR Description: male fertility protein [Zea mays]
  misc_feature (17)..(410): Homolog of NCBI NO: 34902140 NR Description: putative male fertility protein
  misc_feature (1)..(414): Homolog of NCBI NO: 15231703 NR Description: strictosidine synthase-related [Arabidopsis
  misc_feature (1)..(414): Homolog of NCBI NO: 28393615 NR Description: putative strictosidine synthase [Arabidopsis
MEKKGQHGTYESMMTHHPILCIIALSVLFIAIDPFHMSPIGGREFKPVKHEVAPYKEVMGSWPRDNLSRLGNHGKLEFVDQVFGPESLEFDSLGRGPYTGLADGRVVRWMGEAIGWETFSVVTSKWSEEACVRGVDSTTNKQWKHEKLCGRPLGLRFHKETGNLYIADAYYGLLVVGPEGGIATPLATHVEGKPILFANDLDIHRNGSIFFTDTSKRYDRANHFFILLEGESTGRLLRYDPPTKTTHIVLEGLAFPNGIQLSKDQSFLLFTETTNCRLVKYWLEGPKMGEVEVVADLPGFPDNVRINEEGQFWVAIDCCRTPAQEVLTNNPWIRSIYFRLPIPMKLLAKTMGMRMYTVISRFDEEGKVLEVLEDRQGKVMKLVSEVREVQGKLWIGTVAHNHIATLPYPLTMNQ

SEQ ID NO: 25220 - protein, 402 aa, Arabidopsis thaliana
  peptide (1)..(402): Ceres Seq. ID no. 13487794
  misc_feature (66)..(391): Pfam Name: Strictosidine synthase Pfam Description: Strictosidine synthase
  misc_feature (72)..(386): Homolog of NCBI NO: 11280567 NR Description: hypothetical protein F24I3.110 - Arabidopsis
  misc_feature (265)..(397): Homolog of NCBI NO: 25335889 NR Description: protein T27G7.16 [imported] - Arabidopsis
  misc_feature (10)..(260): Homolog of NCBI NO: 25335889 NR Description: protein T27G7.16 [imported] - Arabidopsis
  misc_feature (11)..(396): Homolog of NCBI NO: 40538997 NR Description: putative  strictosidine synthase
  misc_feature (10)..(397): Homolog of NCBI NO: 18390900 NR Description: strictosidine synthase-related [Arabidopsis
  misc_feature (8)..(392): Homolog of NCBI NO: 22326950 NR Description: strictosidine synthase family [Arabidopsis
  misc_feature (1)..(398): Homolog of NCBI NO: 14028757 NR Description: male fertility protein [Zea mays]
  misc_feature (5)..(398): Homolog of NCBI NO: 34902140 NR Description: putative male fertility protein
  misc_feature (1)..(402): Homolog of NCBI NO: 15231703 NR Description: strictosidine synthase-related [Arabidopsis
  misc_feature (1)..(402): Homolog of NCBI NO: 28393615 NR Description: putative strictosidine synthase [Arabidopsis
MMTHHPILCIIALSVLFIAIDPFHMSPIGGREFKPVKHEVAPYKEVMGSWPRDNLSRLGNHGKLEFVDQVFGPESLEFDSLGRGPYTGLADGRVVRWMGEAIGWETFSVVTSKWSEEACVRGVDSTTNKQWKHEKLCGRPLGLRFHKETGNLYIADAYYGLLVVGPEGGIATPLATHVEGKPILFANDLDIHRNGSIFFTDTSKRYDRANHFFILLEGESTGRLLRYDPPTKTTHIVLEGLAFPNGIQLSKDQSFLLFTETTNCRLVKYWLEGPKMGEVEVVADLPGFPDNVRINEEGQFWVAIDCCRTPAQEVLTNNPWIRSIYFRLPIPMKLLAKTMGMRMYTVISRFDEEGKVLEVLEDRQGKVMKLVSEVREVQGKLWIGTVAHNHIATLPYPLTMNQ

SEQ ID NO: 25221 - protein, 401 aa, Arabidopsis thaliana
  peptide (1)..(401): Ceres Seq. ID no. 13487795
  misc_feature (65)..(390): Pfam Name: Strictosidine synthase Pfam Description: Strictosidine synthase
  misc_feature (71)..(385): Homolog of NCBI NO: 11280567 NR Description: hypothetical protein F24I3.110 - Arabidopsis
  misc_feature (264)..(396): Homolog of NCBI NO: 25335889 NR Description: protein T27G7.16 [imported] - Arabidopsis
  misc_feature (9)..(259): Homolog of NCBI NO: 25335889 NR Description: protein T27G7.16 [imported] - Arabidopsis
  misc_feature (10)..(395): Homolog of NCBI NO: 40538997 NR Description: putative  strictosidine synthase
  misc_feature (9)..(396): Homolog of NCBI NO: 18390900 NR Description: strictosidine synthase-related [Arabidopsis
  misc_feature (7)..(391): Homolog of NCBI NO: 22326950 NR Description: strictosidine synthase family [Arabidopsis
  misc_feature (1)..(397): Homolog of NCBI NO: 14028757 NR Description: male fertility protein [Zea mays]
  misc_feature (4)..(397): Homolog of NCBI NO: 34902140 NR Description: putative male fertility protein
  misc_feature (1)..(401): Homolog of NCBI NO: 15231703 NR Description: strictosidine synthase-related [Arabidopsis
  misc_feature (1)..(401): Homolog of NCBI NO: 28393615 NR Description: putative strictosidine synthase [Arabidopsis
MTHHPILCIIALSVLFIAIDPFHMSPIGGREFKPVKHEVAPYKEVMGSWPRDNLSRLGNHGKLEFVDQVFGPESLEFDSLGRGPYTGLADGRVVRWMGEAIGWETFSVVTSKWSEEACVRGVDSTTNKQWKHEKLCGRPLGLRFHKETGNLYIADAYYGLLVVGPEGGIATPLATHVEGKPILFANDLDIHRNGSIFFTDTSKRYDRANHFFILLEGESTGRLLRYDPPTKTTHIVLEGLAFPNGIQLSKDQSFLLFTETTNCRLVKYWLEGPKMGEVEVVADLPGFPDNVRINEEGQFWVAIDCCRTPAQEVLTNNPWIRSIYFRLPIPMKLLAKTMGMRMYTVISRFDEEGKVLEVLEDRQGKVMKLVSEVREVQGKLWIGTVAHNHIATLPYPLTMNQ

SEQ ID NO: 25222 - DNA, 1610 bp, Arabidopsis thaliana
  misc_feature (1)..(1610): Ceres Seq. ID no. 13490866
  misc_feature: MA Experiment ID: 108488 Result: Down-regulated in Transcription
  misc_feature: MA Experiment ID: 20000069 Result: Up-regulated in Transcription
  misc_feature: MA Experiment 20000069 PARAMETER Experiment Name: At_100uM_ABA_Mutants_cDNA_P Parameter: Plant Line Value: CS23
  misc_feature: MA Experiment 20000069 PARAMETER Experiment Name: At_100uM_ABA_Mutants_cDNA_P Parameter: Timepoint (hr) Value: 6
  misc_feature: MA Experiment 20000069 PARAMETER Experiment Name: At_100uM_ABA_Mutants_cDNA_P Parameter: Tissue Value: Aerial
  misc_feature: MA Experiment 20000069 PARAMETER Experiment Name: At_100uM_ABA_Mutants_cDNA_P Parameter: Treatment Value: 100uM ABA vs. No Treatment
  misc_feature: MA Experiment ID: 20000184 Result: Down-regulated in Transcription
  misc_feature: MA Experiment 20000184 PARAMETER Experiment Name: At_Shoots__P Parameter: Age (day) Value: 7
  misc_feature: MA Experiment 20000184 PARAMETER Experiment Name: At_Shoots__P Parameter: Tissue Value: Shoots vs. Whole Plant
  misc_feature: MA Experiment ID: 20000234 Result: Down-regulated in Transcription
  misc_feature: MA Experiment 20000234 PARAMETER Experiment Name: At_Siliques_P Parameter: Age (day) Value: 21
  misc_feature: MA Experiment 20000234 PARAMETER Experiment Name: At_Siliques_P Parameter: Organism Value: A. thaliana
  misc_feature: MA Experiment 20000234 PARAMETER Experiment Name: At_Siliques_P Parameter: Plant Line Value: WS
  misc_feature: MA Experiment 20000234 PARAMETER Experiment Name: At_Siliques_P Parameter: Tissue Value: Less Than 5mm Siliques vs. Whole Plant
  misc_feature: MA Experiment ID: 20000235 Result: Down-regulated in Transcription
  misc_feature: MA Experiment 20000235 PARAMETER Experiment Name: At_Siliques_P Parameter: Age (day) Value: 21
  misc_feature: MA Experiment 20000235 PARAMETER Experiment Name: At_Siliques_P Parameter: Organism Value: A. thaliana
  misc_feature: MA Experiment 20000235 PARAMETER Experiment Name: At_Siliques_P Parameter: Plant Line Value: WS
  misc_feature: MA Experiment 20000235 PARAMETER Experiment Name: At_Siliques_P Parameter: Tissue Value: 5-10mm Siliques vs. Whole Plant
  misc_feature: MA Experiment ID: 20000265 Result: Down-regulated in Transcription
  misc_feature: MA Experiment 20000265 PARAMETER Experiment Name: At_Open_Flower_P Parameter: Age (day) Value: 21
  misc_feature: MA Experiment 20000265 PARAMETER Experiment Name: At_Open_Flower_P Parameter: Plant Line Value: WS
  misc_feature: MA Experiment 20000265 PARAMETER Experiment Name: At_Open_Flower_P Parameter: Tissue Value: Closed Flower vs. Whole Plant
  misc_feature: MA Experiment ID: 20000438 Result: Down-regulated in Transcription
  misc_feature: MA Experiment 20000438 PARAMETER Experiment Name: At_Shoots__P Parameter: Age (day) Value: 14
  misc_feature: MA Experiment 20000438 PARAMETER Experiment Name: At_Shoots__P Parameter: Tissue Value: Shoots vs. Whole Plant
  misc_feature: MA Experiment ID: 20000460 Result: Up-regulated in Transcription
  misc_feature: MA Experiment 20000460 PARAMETER Experiment Name: At_10percent_PEG_P Parameter: Age (day) Value: 12
  misc_feature: MA Experiment 20000460 PARAMETER Experiment Name: At_10percent_PEG_P Parameter: Organism Value: A. thaliana
  misc_feature: MA Experiment 20000460 PARAMETER Experiment Name: At_10percent_PEG_P Parameter: Plant Line Value: WS
  misc_feature: MA Experiment 20000460 PARAMETER Experiment Name: At_10percent_PEG_P Parameter: Timepoint (day) Value: 12
  misc_feature: MA Experiment 20000460 PARAMETER Experiment Name: At_10percent_PEG_P Parameter: Tissue Value: Whole Plant
  misc_feature: MA Experiment 20000460 PARAMETER Experiment Name: At_10percent_PEG_P Parameter: Treatment Value: 10percent PEG vs. No Treatment
  misc_feature: MA Experiment ID: 20000495 Result: Down-regulated in Transcription
  misc_feature: MA Experiment 20000495 PARAMETER Experiment Name: At_Guard_Cells_P Parameter: Harvest Date Value: 8/2/2002
  misc_feature: MA Experiment 20000495 PARAMETER Experiment Name: At_Guard_Cells_P Parameter: Organism Value: A. thaliana
  misc_feature: MA Experiment 20000495 PARAMETER Experiment Name: At_Guard_Cells_P Parameter: Tissue Value: Guard Cells vs. Leaves
  misc_feature: MA Experiment ID: 20000527 Result: Up-regulated in Transcription
  misc_feature: MA Experiment 20000527 PARAMETER Experiment Name: At_10percent_PEG_P Parameter: Age (day) Value: 20
  misc_feature: MA Experiment 20000527 PARAMETER Experiment Name: At_10percent_PEG_P Parameter: Organism Value: A. thaliana
  misc_feature: MA Experiment 20000527 PARAMETER Experiment Name: At_10percent_PEG_P Parameter: Plant Line Value: WS
  misc_feature: MA Experiment 20000527 PARAMETER Experiment Name: At_10percent_PEG_P Parameter: Timepoint (day) Value: 20
  misc_feature: MA Experiment 20000527 PARAMETER Experiment Name: At_10percent_PEG_P Parameter: Tissue Value: Whole Plant
  misc_feature: MA Experiment 20000527 PARAMETER Experiment Name: At_10percent_PEG_P Parameter: Treatment Value: 10percent PEG vs. No Treatment
  misc_feature: MA Experiment ID: 20001905 Result: Up-regulated in Transcription
  misc_feature: MA Experiment 20001905 PARAMETER Experiment Name: At_Drought_Reproduction_P Parameter: Age (day) Value: 40
  misc_feature: MA Experiment 20001905 PARAMETER Experiment Name: At_Drought_Reproduction_P Parameter: Organism Value: A. thaliana
  misc_feature: MA Experiment 20001905 PARAMETER Experiment Name: At_Drought_Reproduction_P Parameter: Plant Line Value: WS
  misc_feature: MA Experiment 20001905 PARAMETER Experiment Name: At_Drought_Reproduction_P Parameter: Timepoint (day) Value: 10
  misc_feature: MA Experiment 20001905 PARAMETER Experiment Name: At_Drought_Reproduction_P Parameter: Tissue Value: Rosettes
  misc_feature: MA Experiment 20001905 PARAMETER Experiment Name: At_Drought_Reproduction_P Parameter: Treatment Value: Drought vs. No Drought
accaccaactcaacacacacacgaatcccttaaaaccgatcagatcaaacaaaaacgaacgaatcaaaattcaataaaaaaaaacctttcgatttctctcatccaatcgaatcgaaaatcttgttatctctttctctctaactctactgcactcagaatctctctgtatagaaaaaccctaagtaggttgtgatgttgcgagctttagcacggcctctcgaacggtgtttgggaagcagagctagtggtgatggtttactctggcaatcggaattgagacctcacgctggcggtgattattcgatcgcggtggttcaagccaattccaggcttgaagatcagagtcaggttttcacatcttcttctgctacttacgtcggtgtatacgatggtcatggtggacctgaagcttctagattcgttaacagacatctctttccttatatgcacaaatttgcaagagaacatgggggattatctgtagatgttatcaaaaaggcattcaaagaaacagaagaagagttttgtggtatggttaaacgatcccttcccatgaaaccgcaaatggctactgtaggatcttgctgtcttgttggtgcaatctctaatgacacactgtatgttgctaatcttggggactcgagagccgttcttggaagcgttgtttcaggggttgatagtaataaaggtgccgtagctgaacggttatctactgatcataatgttgctgttgaagaagtgagaaaggaggttaaggcacttaaccctgatgactcacaaatcgtcttatacacacgtggagtttggcggattaaaggcattattcaggtatcgagatcaattggggatgtatacttgaaaaaaccggagtattacagggacccgattttccagcgacatggaaatcccattcctttgaggagacccgcgatgacagccgaaccctccattatagtaaggaagcttaagccacaggacttgtttctgatatttgcatcagatggtctctgggaacatcttagtgatgaaacagccgtagaaatcgtcctcaaacacccaagaactggtattgcccgaagacttgtaagagctgctctggaagaagcggcaaagaagagagaaatgagatatggagatataaagaaaatagccaaaggaattcgacgacatttccatgacgacataagcgttattgtagtttatctagatcaaaacaaaaccagttcatcgaatagtaaattggtgaagcaaggaggtatcaccgctccaccggatatctactcattacactctgatgaagcagagcaacgacggttactcaatgtgttatactgactgtttgattatggtaaaatggctgcttgggaaagatccgaatagggagaaaacttgtttacatatttgtttatttgtttttctacgaagaactggttttttttttttttcaatattggagttggatttgtatattcttttaccagcaaagaaggtcgaaaccctttagtttttgggcaaagcagttttgcttttgacacaaacaatacttttgtatgaaaatctagtgtgaaaccgttgaggacaactcttcatatatcagattgttttttttt

SEQ ID NO: 25223 - protein, 380 aa, Arabidopsis thaliana
  peptide (1)..(380): Ceres Seq. ID no. 13490867
  misc_feature (36)..(310): Pfam Name: Protein phosphatase 2C Pfam Description: Protein phosphatase 2C
  misc_feature (14)..(371): Homolog of NCBI NO: 7768153 NR Description: protein phosphatase 2C (PP2C) [Fagus sylvatica]
  misc_feature (12)..(370): Homolog of NCBI NO: 34915296 NR Description: protein phosphatase 2C-like
  misc_feature (12)..(370): Homolog of NCBI NO: 33147010 NR Description: protein phosphatase 2C-like
  misc_feature (14)..(339): Homolog of NCBI NO: 38346816 NR Description: OSJNBa0088A01.23 [Oryza sativa (japonica
  misc_feature (15)..(359): Homolog of NCBI NO: 15239244 NR Description: protein phosphatase 2C-related protein
  misc_feature (1)..(362): Homolog of NCBI NO: 11282001 NR Description: protein phosphatase 2C-like protein - Arabidopsis
  misc_feature (1)..(359): Homolog of NCBI NO: 20340237 NR Description: protein phosphatase 2c-like protein
  misc_feature (14)..(371): Homolog of NCBI NO: 26006493 NR Description: Putative protein phosphatase
  misc_feature (1)..(370): Homolog of NCBI NO: 14488375 NR Description: putative protein phosphatase
  misc_feature (1)..(380): Homolog of NCBI NO: 15235152 NR Description: expressed protein [Arabidopsis thaliana]
MLRALARPLERCLGSRASGDGLLWQSELRPHAGGDYSIAVVQANSRLEDQSQVFTSSSATYVGVYDGHGGPEASRFVNRHLFPYMHKFAREHGGLSVDVIKKAFKETEEEFCGMVKRSLPMKPQMATVGSCCLVGAISNDTLYVANLGDSRAVLGSVVSGVDSNKGAVAERLSTDHNVAVEEVRKEVKALNPDDSQIVLYTRGVWRIKGIIQVSRSIGDVYLKKPEYYRDPIFQRHGNPIPLRRPAMTAEPSIIVRKLKPQDLFLIFASDGLWEHLSDETAVEIVLKHPRTGIARRLVRAALEEAAKKREMRYGDIKKIAKGIRRHFHDDISVIVVYLDQNKTSSSNSKLVKQGGITAPPDIYSLHSDEAEQRRLLNVLY

SEQ ID NO: 25224 - protein, 296 aa, Arabidopsis thaliana
  peptide (1)..(296): Ceres Seq. ID no. 13490868
  misc_feature (1)..(226): Pfam Name: Protein phosphatase 2C Pfam Description: Protein phosphatase 2C
  misc_feature (1)..(275): Homolog of NCBI NO: 20340237 NR Description: protein phosphatase 2c-like protein
  misc_feature (1)..(287): Homolog of NCBI NO: 26006493 NR Description: Putative protein phosphatase
  misc_feature (1)..(287): Homolog of NCBI NO: 7768153 NR Description: protein phosphatase 2C (PP2C) [Fagus sylvatica]
  misc_feature (1)..(286): Homolog of NCBI NO: 33147010 NR Description: protein phosphatase 2C-like
  misc_feature (1)..(275): Homolog of NCBI NO: 15239244 NR Description: protein phosphatase 2C-related protein
  misc_feature (1)..(278): Homolog of NCBI NO: 11282001 NR Description: protein phosphatase 2C-like protein - Arabidopsis
  misc_feature (1)..(255): Homolog of NCBI NO: 38346816 NR Description: OSJNBa0088A01.23 [Oryza sativa (japonica
  misc_feature (1)..(286): Homolog of NCBI NO: 34915296 NR Description: protein phosphatase 2C-like
  misc_feature (1)..(286): Homolog of NCBI NO: 14488375 NR Description: putative protein phosphatase
  misc_feature (1)..(296): Homolog of NCBI NO: 15235152 NR Description: expressed protein [Arabidopsis thaliana]
MHKFAREHGGLSVDVIKKAFKETEEEFCGMVKRSLPMKPQMATVGSCCLVGAISNDTLYVANLGDSRAVLGSVVSGVDSNKGAVAERLSTDHNVAVEEVRKEVKALNPDDSQIVLYTRGVWRIKGIIQVSRSIGDVYLKKPEYYRDPIFQRHGNPIPLRRPAMTAEPSIIVRKLKPQDLFLIFASDGLWEHLSDETAVEIVLKHPRTGIARRLVRAALEEAAKKREMRYGDIKKIAKGIRRHFHDDISVIVVYLDQNKTSSSNSKLVKQGGITAPPDIYSLHSDEAEQRRLLNVLY

SEQ ID NO: 25225 - protein, 267 aa, Arabidopsis thaliana
  peptide (1)..(267): Ceres Seq. ID no. 13490869
  misc_feature (1)..(197): Pfam Name: Protein phosphatase 2C Pfam Description: Protein phosphatase 2C
  misc_feature (1)..(258): Homolog of NCBI NO: 7768153 NR Description: protein phosphatase 2C (PP2C) [Fagus sylvatica]
  misc_feature (1)..(257): Homolog of NCBI NO: 34915296 NR Description: protein phosphatase 2C-like
  misc_feature (1)..(257): Homolog of NCBI NO: 33147010 NR Description: protein phosphatase 2C-like
  misc_feature (1)..(226): Homolog of NCBI NO: 38346816 NR Description: OSJNBa0088A01.23 [Oryza sativa (japonica
  misc_feature (1)..(246): Homolog of NCBI NO: 15239244 NR Description: protein phosphatase 2C-related protein
  misc_feature (1)..(249): Homolog of NCBI NO: 11282001 NR Description: protein phosphatase 2C-like protein - Arabidopsis
  misc_feature (1)..(246): Homolog of NCBI NO: 20340237 NR Description: protein phosphatase 2c-like protein
  misc_feature (1)..(258): Homolog of NCBI NO: 26006493 NR Description: Putative protein phosphatase
  misc_feature (1)..(257): Homolog of NCBI NO: 14488375 NR Description: putative protein phosphatase
  misc_feature (1)..(267): Homolog of NCBI NO: 15235152 NR Description: expressed protein [Arabidopsis thaliana]
MVKRSLPMKPQMATVGSCCLVGAISNDTLYVANLGDSRAVLGSVVSGVDSNKGAVAERLSTDHNVAVEEVRKEVKALNPDDSQIVLYTRGVWRIKGIIQVSRSIGDVYLKKPEYYRDPIFQRHGNPIPLRRPAMTAEPSIIVRKLKPQDLFLIFASDGLWEHLSDETAVEIVLKHPRTGIARRLVRAALEEAAKKREMRYGDIKKIAKGIRRHFHDDISVIVVYLDQNKTSSSNSKLVKQGGITAPPDIYSLHSDEAEQRRLLNVLY

SEQ ID NO: 25226 - DNA, 1198 bp, Arabidopsis thaliana
  misc_feature (1)..(1198): Ceres Seq. ID no. 12327305
  misc_feature: MA Experiment ID: 108434 Result: Up-regulated in Transcription
  misc_feature: MA Experiment 108434 PARAMETER Experiment Name: At_Root_Tips_cDNA_P Parameter: Tissue Value: Root Tips
  misc_feature: MA Experiment ID: 108462 Result: Down-regulated in Transcription
  misc_feature: MA Experiment 108462 PARAMETER Experiment Name: At_Germinating_Seeds_cDNA_P Parameter: Age (day) Value: 2 vs. 0
  misc_feature: MA Experiment 108462 PARAMETER Experiment Name: At_Germinating_Seeds_cDNA_P Parameter: Tissue Value: Germinating Seeds
  misc_feature: MA Experiment ID: 108463 Result: Down-regulated in Transcription
  misc_feature: MA Experiment 108463 PARAMETER Experiment Name: At_Germinating_Seeds_cDNA_P Parameter: Age (day) Value: 3 vs. 0
  misc_feature: MA Experiment 108463 PARAMETER Experiment Name: At_Germinating_Seeds_cDNA_P Parameter: Tissue Value: Germinating Seeds
  misc_feature: MA Experiment ID: 108464 Result: Down-regulated in Transcription
  misc_feature: MA Experiment 108464 PARAMETER Experiment Name: At_Germinating_Seeds_cDNA_P Parameter: Age (day) Value: 4 vs. 0
  misc_feature: MA Experiment 108464 PARAMETER Experiment Name: At_Germinating_Seeds_cDNA_P Parameter: Tissue Value: Germinating Seeds
  misc_feature: MA Experiment ID: 108488 Result: Up-regulated in Transcription
  misc_feature: MA Experiment ID: 20000179 Result: Down-regulated in Transcription
  misc_feature: MA Experiment 20000179 PARAMETER Experiment Name: At_Germinating_Seeds_P Parameter: Age (hr) Value: 6 vs. 0
  misc_feature: MA Experiment 20000179 PARAMETER Experiment Name: At_Germinating_Seeds_P Parameter: Tissue Value: Germinating Seeds
  misc_feature: MA Experiment ID: 20000180 Result: Down-regulated in Transcription
  misc_feature: MA Experiment 20000180 PARAMETER Experiment Name: At_Germinating_Seeds_P Parameter: Age (hr) Value: 24 vs. 0
  misc_feature: MA Experiment 20000180 PARAMETER Experiment Name: At_Germinating_Seeds_P Parameter: Tissue Value: Germinating Seeds
  misc_feature: MA Experiment ID: 20000224 Result: Up-regulated in Transcription
  misc_feature: MA Experiment ID: 20001557 Result: Up-regulated in Transcription
  misc_feature: MA Experiment 20001557 PARAMETER Experiment Name: At_Drought_Soil_Dry_P Parameter: Age (day) Value: 27
  misc_feature: MA Experiment 20001557 PARAMETER Experiment Name: At_Drought_Soil_Dry_P Parameter: Organism Value: A. thaliana
  misc_feature: MA Experiment 20001557 PARAMETER Experiment Name: At_Drought_Soil_Dry_P Parameter: Plant Line Value: WS
  misc_feature: MA Experiment 20001557 PARAMETER Experiment Name: At_Drought_Soil_Dry_P Parameter: Post Timepoint (hr) Value: 3
  misc_feature: MA Experiment 20001557 PARAMETER Experiment Name: At_Drought_Soil_Dry_P Parameter: Post-Treatment Value: Re-Water vs. No Drought
  misc_feature: MA Experiment 20001557 PARAMETER Experiment Name: At_Drought_Soil_Dry_P Parameter: Timepoint (day) Value: 13
  misc_feature: MA Experiment 20001557 PARAMETER Experiment Name: At_Drought_Soil_Dry_P Parameter: Treatment Value: Drought vs. No Drought
  misc_feature: MA Experiment ID: 20001558 Result: Up-regulated in Transcription
  misc_feature: MA Experiment 20001558 PARAMETER Experiment Name: At_Drought_Soil_Dry_P Parameter: Age (day) Value: 27
  misc_feature: MA Experiment 20001558 PARAMETER Experiment Name: At_Drought_Soil_Dry_P Parameter: Organism Value: A. thaliana
  misc_feature: MA Experiment 20001558 PARAMETER Experiment Name: At_Drought_Soil_Dry_P Parameter: Plant Line Value: WS
  misc_feature: MA Experiment 20001558 PARAMETER Experiment Name: At_Drought_Soil_Dry_P Parameter: Post Timepoint (hr) Value: 6
  misc_feature: MA Experiment 20001558 PARAMETER Experiment Name: At_Drought_Soil_Dry_P Parameter: Post-Treatment Value: Re-Water vs. No Drought
  misc_feature: MA Experiment 20001558 PARAMETER Experiment Name: At_Drought_Soil_Dry_P Parameter: Timepoint (day) Value: 13
  misc_feature: MA Experiment 20001558 PARAMETER Experiment Name: At_Drought_Soil_Dry_P Parameter: Treatment Value: Drought vs. No Drought
acaaaaaataaaaaaacgcctacctttaacttcgaattagggtttatcaggattcagtcgcctgctcacttgaatttcttcgcaagctcaaaaagttcccaaatttttgaaggaagatggtgaggccgtatgggattaaagtgaacaagagaaaggagagagaagagaggtatgataaggaagaagatgaagtagaggagcaaccaaagtttgagcaaaaacaaaaggcaagagaaagttcgaagaaagctaaaaaagaaagcacttcaagagcagaggaagataatgacgaggaggaagtaactgaggaagcaactgcagcagcagaggatattgtgggagggatacctattgtccttaatgctcctaacaaggaaaagtctggcattgtattcgtgcttgagaaggcctctcttgaagttgccaaagttggaaagacttaccagctactgaactcggatgatcatgctaatttcttgaaaaagaataacagaaatccggctgattaccgaccagacattactcatcaggcgcttcttatgattttggatagtccggttaataaagctgggaggttgaaagctgtttatgttagaacagaaaaaggtgtcctttttgaagttaagccacatgttcgtataccaagaactttcaaacgatttgccggaatcatgttgcaactgctacaaaagctgagcattactgcagttaacagccgtgagaagcttctacggtgtgtcaagaaccctatcgaagaacatcatctaccggttaactcccacagaataggcttctcgcatagctctgagaaactcgtcaatatgcagaaacacctagctactgtatgtgatgatgatagagacacagtttttgtggtaggcgcaatggcacacgggaaaatagactgcaactatatcgatgaatttgtgtcggtttcagagtatccattgagcgcagcctactgtatctcaagaatctgcgaggcattagcaacaaattggaatattatataaaagaatgattataaggtcctttgttttcctctctactgctctaatggtaggaactactttaagctatgttgttgtgatacacattgtttatctactatcgaatttatataacttttcgtttgaaattttgactccactattttattcaaacgtaatataaagtaaaagaaagagatgttcctgtg

SEQ ID NO: 25227 - protein, 298 aa, Arabidopsis thaliana
  peptide (1)..(298): Ceres Seq. ID no. 12327306
  misc_feature (125)..(293): Pfam Name: Suppressor Mra1 Pfam Description: Suppressor Mra1
  misc_feature (86)..(298): Homolog of NCBI NO: 39591849 NR Description: Hypothetical protein CBG18338 [Caenorhabditis
  misc_feature (81)..(298): Homolog of NCBI NO: 24639698 NR Description: CG3527-PA [Drosophila melanogaster]
  misc_feature (68)..(298): Homolog of NCBI NO: 6323215 NR Description: Essential for Mitotic Growth; Emg1p
  misc_feature (91)..(298): Homolog of NCBI NO: 31206307 NR Description: ENSANGP00000016225 [Anopheles gambiae]
  misc_feature (81)..(298): Homolog of NCBI NO: 31652262 NR Description: C2f protein [Homo sapiens]
  misc_feature (81)..(298): Homolog of NCBI NO: 2276396 NR Description: C2f [Homo sapiens]
  misc_feature (91)..(298): Homolog of NCBI NO: 7305109 NR Description: gene rich cluster, C2f gene [Mus musculus]
  misc_feature (91)..(298): Homolog of NCBI NO: 27713326 NR Description: similar to gene rich cluster, C2f gene
  misc_feature (1)..(298): Homolog of NCBI NO: 15230180 NR Description: putative protein
  misc_feature (1)..(298): Homolog of NCBI NO: 21593563 NR Description: unknown [Arabidopsis thaliana]
MVRPYGIKVNKRKEREERYDKEEDEVEEQPKFEQKQKARESSKKAKKESTSRAEEDNDEEEVTEEATAAAEDIVGGIPIVLNAPNKEKSGIVFVLEKASLEVAKVGKTYQLLNSDDHANFLKKNNRNPADYRPDITHQALLMILDSPVNKAGRLKAVYVRTEKGVLFEVKPHVRIPRTFKRFAGIMLQLLQKLSITAVNSREKLLRCVKNPIEEHHLPVNSHRIGFSHSSEKLVNMQKHLATVCDDDRDTVFVVGAMAHGKIDCNYIDEFVSVSEYPLSAAYCISRICEALATNWNII

SEQ ID NO: 25228 - protein, 157 aa, Arabidopsis thaliana
  peptide (1)..(157): Ceres Seq. ID no. 12327307
  misc_feature (1)..(152): Pfam Name: Suppressor Mra1 Pfam Description: Suppressor Mra1
  misc_feature (1)..(157): Homolog of NCBI NO: 39591849 NR Description: Hypothetical protein CBG18338 [Caenorhabditis
  misc_feature (1)..(157): Homolog of NCBI NO: 24639698 NR Description: CG3527-PA [Drosophila melanogaster]
  misc_feature (1)..(157): Homolog of NCBI NO: 6323215 NR Description: Essential for Mitotic Growth; Emg1p
  misc_feature (1)..(157): Homolog of NCBI NO: 31206307 NR Description: ENSANGP00000016225 [Anopheles gambiae]
  misc_feature (1)..(157): Homolog of NCBI NO: 31652262 NR Description: C2f protein [Homo sapiens]
  misc_feature (1)..(157): Homolog of NCBI NO: 2276396 NR Description: C2f [Homo sapiens]
  misc_feature (1)..(157): Homolog of NCBI NO: 7305109 NR Description: gene rich cluster, C2f gene [Mus musculus]
  misc_feature (1)..(157): Homolog of NCBI NO: 27713326 NR Description: similar to gene rich cluster, C2f gene
  misc_feature (1)..(157): Homolog of NCBI NO: 15230180 NR Description: putative protein
  misc_feature (1)..(157): Homolog of NCBI NO: 21593563 NR Description: unknown [Arabidopsis thaliana]
MILDSPVNKAGRLKAVYVRTEKGVLFEVKPHVRIPRTFKRFAGIMLQLLQKLSITAVNSREKLLRCVKNPIEEHHLPVNSHRIGFSHSSEKLVNMQKHLATVCDDDRDTVFVVGAMAHGKIDCNYIDEFVSVSEYPLSAAYCISRICEALATNWNII

SEQ ID NO: 25229 - DNA, 1755 bp, Arabidopsis thaliana
  misc_feature (1)..(1755): Ceres Seq. ID no. 13490767
  misc_feature: MA Experiment ID: 108573 Result: Up-regulated in Transcription
  misc_feature: MA Experiment 108573 PARAMETER Experiment Name: At_Drought_cDNA_P Parameter: Timepoint (hr) Value: 6
  misc_feature: MA Experiment 108573 PARAMETER Experiment Name: At_Drought_cDNA_P Parameter: Tissue Value: Aerial
  misc_feature: MA Experiment 108573 PARAMETER Experiment Name: At_Drought_cDNA_P Parameter: Treatment Value: Drought vs. No Drought
  misc_feature: MA Experiment ID: 108579 Result: Down-regulated in Transcription
  misc_feature: MA Experiment 108579 PARAMETER Experiment Name: At_4deg_Cold_cDNA_P Parameter: Temperature (deg C) Value: 4 vs. 22
  misc_feature: MA Experiment 108579 PARAMETER Experiment Name: At_4deg_Cold_cDNA_P Parameter: Timepoint (hr) Value: 6
  misc_feature: MA Experiment 108579 PARAMETER Experiment Name: At_4deg_Cold_cDNA_P Parameter: Tissue Value: Aerial
  misc_feature: MA Experiment ID: 108585 Result: Up-regulated in Transcription
  misc_feature: MA Experiment 108585 PARAMETER Experiment Name: At_5mM_NaNP_cDNA_P Parameter: Timepoint (hr) Value: 6
  misc_feature: MA Experiment 108585 PARAMETER Experiment Name: At_5mM_NaNP_cDNA_P Parameter: Tissue Value: Aerial
  misc_feature: MA Experiment 108585 PARAMETER Experiment Name: At_5mM_NaNP_cDNA_P Parameter: Treatment Value: null
  misc_feature: MA Experiment ID: 20000224 Result: Down-regulated in Transcription
  misc_feature: MA Experiment ID: 20000234 Result: Down-regulated in Transcription
  misc_feature: MA Experiment 20000234 PARAMETER Experiment Name: At_Siliques_P Parameter: Age (day) Value: 21
  misc_feature: MA Experiment 20000234 PARAMETER Experiment Name: At_Siliques_P Parameter: Organism Value: A. thaliana
  misc_feature: MA Experiment 20000234 PARAMETER Experiment Name: At_Siliques_P Parameter: Plant Line Value: WS
  misc_feature: MA Experiment 20000234 PARAMETER Experiment Name: At_Siliques_P Parameter: Tissue Value: Less Than 5mm Siliques vs. Whole Plant
  misc_feature: MA Experiment ID: 20000235 Result: Down-regulated in Transcription
  misc_feature: MA Experiment 20000235 PARAMETER Experiment Name: At_Siliques_P Parameter: Age (day) Value: 21
  misc_feature: MA Experiment 20000235 PARAMETER Experiment Name: At_Siliques_P Parameter: Organism Value: A. thaliana
  misc_feature: MA Experiment 20000235 PARAMETER Experiment Name: At_Siliques_P Parameter: Plant Line Value: WS
  misc_feature: MA Experiment 20000235 PARAMETER Experiment Name: At_Siliques_P Parameter: Tissue Value: 5-10mm Siliques vs. Whole Plant
  misc_feature: MA Experiment ID: 20000265 Result: Down-regulated in Transcription
  misc_feature: MA Experiment 20000265 PARAMETER Experiment Name: At_Open_Flower_P Parameter: Age (day) Value: 21
  misc_feature: MA Experiment 20000265 PARAMETER Experiment Name: At_Open_Flower_P Parameter: Plant Line Value: WS
  misc_feature: MA Experiment 20000265 PARAMETER Experiment Name: At_Open_Flower_P Parameter: Tissue Value: Closed Flower vs. Whole Plant
  misc_feature: MA Experiment ID: 20000286 Result: Down-regulated in Transcription
  misc_feature: MA Experiment 20000286 PARAMETER Experiment Name: At_Open_Flower_P Parameter: Age (day) Value: 21
  misc_feature: MA Experiment 20000286 PARAMETER Experiment Name: At_Open_Flower_P Parameter: Plant Line Value: WS
  misc_feature: MA Experiment 20000286 PARAMETER Experiment Name: At_Open_Flower_P Parameter: Tissue Value: Half Open vs. Whole Plant
  misc_feature: MA Experiment ID: 20001248 Result: Up-regulated in Transcription
  misc_feature: MA Experiment 20001248 PARAMETER Experiment Name: At_Far-red-induction_P Parameter: Age (day) Value: 7
  misc_feature: MA Experiment 20001248 PARAMETER Experiment Name: At_Far-red-induction_P Parameter: Light Value: Far-red vs. White
  misc_feature: MA Experiment 20001248 PARAMETER Experiment Name: At_Far-red-induction_P Parameter: Organism Value: A. thaliana
  misc_feature: MA Experiment 20001248 PARAMETER Experiment Name: At_Far-red-induction_P Parameter: Plant Line Value: Columbia
  misc_feature: MA Experiment 20001248 PARAMETER Experiment Name: At_Far-red-induction_P Parameter: Timepoint (hr) Value: 4
  misc_feature: MA Experiment 20001248 PARAMETER Experiment Name: At_Far-red-induction_P Parameter: Tissue Value: Whole Plant
  misc_feature: MA Experiment ID: 20001450 Result: Up-regulated in Transcription
  misc_feature: MA Experiment 20001450 PARAMETER Experiment Name: At_Far-red-induction_P Parameter: Age (day) Value: 7
  misc_feature: MA Experiment 20001450 PARAMETER Experiment Name: At_Far-red-induction_P Parameter: Light Value: Far-red vs. White
  misc_feature: MA Experiment 20001450 PARAMETER Experiment Name: At_Far-red-induction_P Parameter: Organism Value: A. thaliana
  misc_feature: MA Experiment 20001450 PARAMETER Experiment Name: At_Far-red-induction_P Parameter: Plant Line Value: Columbia
  misc_feature: MA Experiment 20001450 PARAMETER Experiment Name: At_Far-red-induction_P Parameter: Timepoint (hr) Value: 8
  misc_feature: MA Experiment 20001450 PARAMETER Experiment Name: At_Far-red-induction_P Parameter: Tissue Value: Whole Plant
ctctctctctatcatcatcatcatcactttctctatctatctctcttcttaaagcggccattggtgctctccaagttccatctcaagcttttcttcttgttttgttgttctcttaattgaaaaacaagatcttgaactaaaaaatggaaactgaagacgatttgtgcaacaccaattggggaagctcttcttcgaaatcgcgagagccgggttcatcagactgtgggaattcgacattcgcaggttttacgtcccagcagaagtgggaagatgcttcaatcttggattatgagatgggtgtggagcctggattgcaagagagcattcaagcaaatgttgatttcttacaaggtgttagggctcaagcgtgggatccaaggacgatgttgagtaacctttcttttatggagcagaagattcaccagctgaggatcttgttcatcttcttgttggtcgtggtgggcagcttcaaggtcgtcaagacgagctcgcggctcagcagcagcagcttataacgacggatcttacttccattatcatacagcttatttcaactgcaggtagtcttcttccatctgttaagcataatatgtcaacagctccgggtccattcactgggcagcccggttcagccgtgttcccttatgtaagggaggctaataacgttgcttcacagagtcagaacaataacaactgtggtgctcgagagttcgatttgcctaagccggttcttgttgatgagagggaaggtcatgttgtggaggaacatgagatgaaagatgaagatgatgtggaagaaggagagaaccttcctcccggttcgtatgagatattgcagcttgagaaagaagagattctcgcaccgcatactcacttctgcacgatatgtggcaagggtttcaagagagacgcgaatttgaggatgcatatgagagggcatggagatgagtacaaaacagcagctgctctggcgaaaccgaacaaagaatccgtacccgggtctgagccgatgctgatcaagaggtactcgtgcccattccttggttgcaaacgtaacaaggagcacaaaaagttccagcctttgaaaacgattctatgcgtgaagaatcactataaacgcacccactgcgataaaagcttcacttgcagccggtgccataccaagaaattctctgtcattgcagatcttaaaacccacgagaagcactgcgggaaaaacaagtggctttgttcctgtggtacaacattttcaaggaaagacaagttgtttggtcacatagctctgttccagggacacacgcctgcaatccctcttgaagagacaaaaccatcagccagtacatctactcagagagggagctctgaaggcgggaacaacaaccaaggaatggttggcttcaatcttggttctgcatcaaatgctaaccaagaaaccacacagcctggaatgactgatgggaggatatgttttgaggagtcgttctcaccaatgaactttgatacatgtaattttggagggttccacgagtttccgcgactgatgtttgatgattcagagagttcttttcaaatgcttattgcgaatgcctgtggtttctcgcccaggaatgttggtgagtctgtttcagatactagtctctaaggcattgccatatatatgataagttatgtaagatgttctagtttttagccttttaagcagttcttttgtgtctgtaattttgttttcgccataataataatatcagaatagcg

SEQ ID NO: 25230 - protein, 350 aa, Arabidopsis thaliana
  peptide (1)..(350): Ceres Seq. ID no. 13490768
  misc_feature (184)..(207): Pfam Name: Zinc finger, C2H2 type Pfam Description: Zinc finger, C2H2 type
  misc_feature (66)..(252): Homolog of NCBI NO: 38346456 NR Description: OSJNBa0019G23.4 [Oryza sativa (japonica
  misc_feature (66)..(252): Homolog of NCBI NO: 10241636 NR Description: putative zinc finger protein
  misc_feature (77)..(239): Homolog of NCBI NO: 30688719 NR Description: expressed protein [Arabidopsis thaliana]
  misc_feature (77)..(239): Homolog of NCBI NO: 10177236 NR Description: contains similarity to C2H2-type zinc finger
  misc_feature (64)..(320): Homolog of NCBI NO: 28376689 NR Description: putative zinc finger protein
  misc_feature (57)..(344): Homolog of NCBI NO: 34908682 NR Description: putative zinc finger protein
  misc_feature (1)..(350): Homolog of NCBI NO: 21593564 NR Description: zinc finger protein, putative [Arabidopsis
  misc_feature (1)..(350): Homolog of NCBI NO: 15218606 NR Description: zinc finger protein -related [Arabidopsis
MSTAPGPFTGQPGSAVFPYVREANNVASQSQNNNNCGAREFDLPKPVLVDEREGHVVEEHEMKDEDDVEEGENLPPGSYEILQLEKEEILAPHTHFCTICGKGFKRDANLRMHMRGHGDEYKTAAALAKPNKESVPGSEPMLIKRYSCPFLGCKRNKEHKKFQPLKTILCVKNHYKRTHCDKSFTCSRCHTKKFSVIADLKTHEKHCGKNKWLCSCGTTFSRKDKLFGHIALFQGHTPAIPLEETKPSASTSTQRGSSEGGNNNQGMVGFNLGSASNANQETTQPGMTDGRICFEESFSPMNFDTCNFGGFHEFPRLMFDDSESSFQMLIANACGFSPRNVGESVSDTSL

SEQ ID NO: 25231 - protein, 289 aa, Arabidopsis thaliana
  peptide (1)..(289): Ceres Seq. ID no. 13490769
  misc_feature (123)..(146): Pfam Name: Zinc finger, C2H2 type Pfam Description: Zinc finger, C2H2 type
  misc_feature (5)..(191): Homolog of NCBI NO: 38346456 NR Description: OSJNBa0019G23.4 [Oryza sativa (japonica
  misc_feature (5)..(191): Homolog of NCBI NO: 10241636 NR Description: putative zinc finger protein
  misc_feature (16)..(178): Homolog of NCBI NO: 30688719 NR Description: expressed protein [Arabidopsis thaliana]
  misc_feature (16)..(178): Homolog of NCBI NO: 10177236 NR Description: contains similarity to C2H2-type zinc finger
  misc_feature (3)..(259): Homolog of NCBI NO: 28376689 NR Description: putative zinc finger protein
  misc_feature (1)..(283): Homolog of NCBI NO: 34908682 NR Description: putative zinc finger protein
  misc_feature (1)..(289): Homolog of NCBI NO: 21593564 NR Description: zinc finger protein, putative [Arabidopsis
  misc_feature (1)..(289): Homolog of NCBI NO: 15218606 NR Description: zinc finger protein -related [Arabidopsis
MKDEDDVEEGENLPPGSYEILQLEKEEILAPHTHFCTICGKGFKRDANLRMHMRGHGDEYKTAAALAKPNKESVPGSEPMLIKRYSCPFLGCKRNKEHKKFQPLKTILCVKNHYKRTHCDKSFTCSRCHTKKFSVIADLKTHEKHCGKNKWLCSCGTTFSRKDKLFGHIALFQGHTPAIPLEETKPSASTSTQRGSSEGGNNNQGMVGFNLGSASNANQETTQPGMTDGRICFEESFSPMNFDTCNFGGFHEFPRLMFDDSESSFQMLIANACGFSPRNVGESVSDTSL

SEQ ID NO: 25232 - protein, 239 aa, Arabidopsis thaliana
  peptide (1)..(239): Ceres Seq. ID no. 13490770
  misc_feature (73)..(96): Pfam Name: Zinc finger, C2H2 type Pfam Description: Zinc finger, C2H2 type
  misc_feature (1)..(141): Homolog of NCBI NO: 38346456 NR Description: OSJNBa0019G23.4 [Oryza sativa (japonica
  misc_feature (1)..(141): Homolog of NCBI NO: 10241636 NR Description: putative zinc finger protein
  misc_feature (1)..(128): Homolog of NCBI NO: 30688719 NR Description: expressed protein [Arabidopsis thaliana]
  misc_feature (1)..(128): Homolog of NCBI NO: 10177236 NR Description: contains similarity to C2H2-type zinc finger
  misc_feature (1)..(209): Homolog of NCBI NO: 28376689 NR Description: putative zinc finger protein
  misc_feature (1)..(233): Homolog of NCBI NO: 34908682 NR Description: putative zinc finger protein
  misc_feature (1)..(239): Homolog of NCBI NO: 21593564 NR Description: zinc finger protein, putative [Arabidopsis
  misc_feature (1)..(239): Homolog of NCBI NO: 15218606 NR Description: zinc finger protein -related [Arabidopsis
MHMRGHGDEYKTAAALAKPNKESVPGSEPMLIKRYSCPFLGCKRNKEHKKFQPLKTILCVKNHYKRTHCDKSFTCSRCHTKKFSVIADLKTHEKHCGKNKWLCSCGTTFSRKDKLFGHIALFQGHTPAIPLEETKPSASTSTQRGSSEGGNNNQGMVGFNLGSASNANQETTQPGMTDGRICFEESFSPMNFDTCNFGGFHEFPRLMFDDSESSFQMLIANACGFSPRNVGESVSDTSL

SEQ ID NO: 25233 - DNA, 1239 bp, Arabidopsis thaliana
  misc_feature (1)..(1239): Ceres Seq. ID no. 12396085
  misc_feature: MA Experiment ID: 20000171 Result: Up-regulated in Transcription
  misc_feature: MA Experiment 20000171 PARAMETER Experiment Name: At_42deg_Heat_P Parameter: Age (day) Value: 14
  misc_feature: MA Experiment 20000171 PARAMETER Experiment Name: At_42deg_Heat_P Parameter: Organism Value: A. thaliana
  misc_feature: MA Experiment 20000171 PARAMETER Experiment Name: At_42deg_Heat_P Parameter: Plant Line Value: WS
  misc_feature: MA Experiment 20000171 PARAMETER Experiment Name: At_42deg_Heat_P Parameter: Temperature (deg C) Value: 42 vs. 22
  misc_feature: MA Experiment 20000171 PARAMETER Experiment Name: At_42deg_Heat_P Parameter: Timepoint (hr) Value: 1
  misc_feature: MA Experiment 20000171 PARAMETER Experiment Name: At_42deg_Heat_P Parameter: Tissue Value: Aerial
  misc_feature: MA Experiment ID: 20000173 Result: Up-regulated in Transcription
  misc_feature: MA Experiment 20000173 PARAMETER Experiment Name: At_42deg_Heat_P Parameter: Age (day) Value: 14
  misc_feature: MA Experiment 20000173 PARAMETER Experiment Name: At_42deg_Heat_P Parameter: Organism Value: A. thaliana
  misc_feature: MA Experiment 20000173 PARAMETER Experiment Name: At_42deg_Heat_P Parameter: Plant Line Value: WS
  misc_feature: MA Experiment 20000173 PARAMETER Experiment Name: At_42deg_Heat_P Parameter: Temperature (deg C) Value: 42 vs. 22
  misc_feature: MA Experiment 20000173 PARAMETER Experiment Name: At_42deg_Heat_P Parameter: Timepoint (hr) Value: 6
  misc_feature: MA Experiment 20000173 PARAMETER Experiment Name: At_42deg_Heat_P Parameter: Tissue Value: Aerial
  misc_feature: MA Experiment ID: 20000179 Result: Down-regulated in Transcription
  misc_feature: MA Experiment 20000179 PARAMETER Experiment Name: At_Germinating_Seeds_P Parameter: Age (hr) Value: 6 vs. 0
  misc_feature: MA Experiment 20000179 PARAMETER Experiment Name: At_Germinating_Seeds_P Parameter: Tissue Value: Germinating Seeds
  misc_feature: MA Experiment ID: 20000184 Result: Up-regulated in Transcription
  misc_feature: MA Experiment 20000184 PARAMETER Experiment Name: At_Shoots__P Parameter: Age (day) Value: 7
  misc_feature: MA Experiment 20000184 PARAMETER Experiment Name: At_Shoots__P Parameter: Tissue Value: Shoots vs. Whole Plant
  misc_feature: MA Experiment ID: 20000234 Result: Up-regulated in Transcription
  misc_feature: MA Experiment 20000234 PARAMETER Experiment Name: At_Siliques_P Parameter: Age (day) Value: 21
  misc_feature: MA Experiment 20000234 PARAMETER Experiment Name: At_Siliques_P Parameter: Organism Value: A. thaliana
  misc_feature: MA Experiment 20000234 PARAMETER Experiment Name: At_Siliques_P Parameter: Plant Line Value: WS
  misc_feature: MA Experiment 20000234 PARAMETER Experiment Name: At_Siliques_P Parameter: Tissue Value: Less Than 5mm Siliques vs. Whole Plant
  misc_feature: MA Experiment ID: 20000235 Result: Up-regulated in Transcription
  misc_feature: MA Experiment 20000235 PARAMETER Experiment Name: At_Siliques_P Parameter: Age (day) Value: 21
  misc_feature: MA Experiment 20000235 PARAMETER Experiment Name: At_Siliques_P Parameter: Organism Value: A. thaliana
  misc_feature: MA Experiment 20000235 PARAMETER Experiment Name: At_Siliques_P Parameter: Plant Line Value: WS
  misc_feature: MA Experiment 20000235 PARAMETER Experiment Name: At_Siliques_P Parameter: Tissue Value: 5-10mm Siliques vs. Whole Plant
  misc_feature: MA Experiment ID: 20000264 Result: Up-regulated in Transcription
  misc_feature: MA Experiment 20000264 PARAMETER Experiment Name: At_Open_Flower_P Parameter: Age (day) Value: 21
  misc_feature: MA Experiment 20000264 PARAMETER Experiment Name: At_Open_Flower_P Parameter: Plant Line Value: WS
  misc_feature: MA Experiment 20000264 PARAMETER Experiment Name: At_Open_Flower_P Parameter: Tissue Value: Open Flower vs. Whole Plant
  misc_feature: MA Experiment ID: 20000265 Result: Up-regulated in Transcription
  misc_feature: MA Experiment 20000265 PARAMETER Experiment Name: At_Open_Flower_P Parameter: Age (day) Value: 21
  misc_feature: MA Experiment 20000265 PARAMETER Experiment Name: At_Open_Flower_P Parameter: Plant Line Value: WS
  misc_feature: MA Experiment 20000265 PARAMETER Experiment Name: At_Open_Flower_P Parameter: Tissue Value: Closed Flower vs. Whole Plant
  misc_feature: MA Experiment ID: 20000286 Result: Up-regulated in Transcription
  misc_feature: MA Experiment 20000286 PARAMETER Experiment Name: At_Open_Flower_P Parameter: Age (day) Value: 21
  misc_feature: MA Experiment 20000286 PARAMETER Experiment Name: At_Open_Flower_P Parameter: Plant Line Value: WS
  misc_feature: MA Experiment 20000286 PARAMETER Experiment Name: At_Open_Flower_P Parameter: Tissue Value: Half Open vs. Whole Plant
  misc_feature: MA Experiment ID: 20000794 Result: Up-regulated in Transcription
  misc_feature: MA Experiment 20000794 PARAMETER Experiment Name: At_Petals_P Parameter: Age (day) Value: 23-25 days
  misc_feature: MA Experiment 20000794 PARAMETER Experiment Name: At_Petals_P Parameter: Plant Line Value: WS
  misc_feature: MA Experiment 20000794 PARAMETER Experiment Name: At_Petals_P Parameter: Tissue Value: Petals vs. Whole plant
acgctctctcactgatcattcacaatctctctctttttttcaccggcgataattttccgatctcgattataagatggctaagaaaccagttcgtgttcttgttaccggagctgcaggacaaatcggatatgctcttgttcctatgattgcaagggggataatgcttggtgctgatcagcctgtgatcctccacatgcttgacatcccttttgcagcagaagctttgaacggtgtgaagatggaattggtcgatgctgctttccctcttctaaagggtgtggtggctacaactgatgctgttgaagcgtgtaccggtgttaatgttgctgtcatggttggtggtttcccgaggaaggaaggaatggagaggaaggatgttatgtccaagaacgtttccatttacaagtctcaagcttctgccttggagaagcatgctgcaccaaactgcaaggttctggttgttgcaaaccctgcaaacaccaatgcattgatcctgaaggaatttgcaccatcgatcccagagaagaacattacttgcttgaccaggcttgaccacaacagagcattgggacaagtgtctgagaggttaagcgtaccagtctctgatgtgaagaacgtgattatctggggaaaccactcttcaacccaatacccagatgtcaaccacgctaccgtcaagacttcttctggagagaagccagtgcgtgagctagtcaagaatgacgagtggttgaatggagagttcatctctaccgttcaacaacgtggtgctgccattatcaaggccaggaagctgtctagtgcactttctgcagctagctcagcttgtgaccatatccgtgattgggttgttggaacacccgagggcacatttgtttcaatgggagtatactcagatggatcctacaatgttccagctggacttatctactccttccccgtaacctgccgtaatggagagtggaccattgttcaaggtttaccgattgatgacgcatcgaggaagaagatggatttgacagcagaggagttgaaggaagagaaggacctcgcttactcatgcctctcttaaacccgtcttttctcagctggtttaatcagtgagagctttgtttcgaataaagaagttttgttataaaatgaacttttaataacctcatgagcttgaggtttagttttcctaatgttcccatgatgtgtcggtactgatttgctgaccatatataaacaatcattttg

SEQ ID NO: 25234 - protein, 332 aa, Arabidopsis thaliana
  peptide (1)..(332): Ceres Seq. ID no. 12396086
  misc_feature (157)..(331): Pfam Name: lactate/malate dehydrogenase, alpha/beta Pfam Description: lactate/malate dehydrogenase, alpha/beta
  misc_feature (4)..(332): Homolog of NCBI NO: 37589957 NR Description: Malate dehydrogenase, soluble [Mus musculus]
  misc_feature (1)..(332): Homolog of NCBI NO: 11133373 NR Description: Malate dehydrogenase, cytoplasmic
  misc_feature (1)..(332): Homolog of NCBI NO: 15982948 NR Description: NAD-dependent malate dehydrogenase [Prunus
  misc_feature (1)..(332): Homolog of NCBI NO: 12229778 NR Description: Malate dehydrogenase, cytoplasmic
  misc_feature (1)..(332): Homolog of NCBI NO: 10334493 NR Description: cytosolic malate dehydrogenase [Cicer arietinum]
  misc_feature (1)..(331): Homolog of NCBI NO: 18202485 NR Description: Malate dehydrogenase, cytoplasmic
  misc_feature (1)..(332): Homolog of NCBI NO: 10798652 NR Description: malate dehydrogenase [Nicotiana tabacum]
  misc_feature (1)..(332): Homolog of NCBI NO: 15219721 NR Description: putative malate dehydrogenase
  misc_feature (1)..(332): Homolog of NCBI NO: 15239843 NR Description: cytosolic malate dehydrogenase
  misc_feature (1)..(332): Homolog of NCBI NO: 21593565 NR Description: cytosolic malate dehydrogenase [Arabidopsis
MAKKPVRVLVTGAAGQIGYALVPMIARGIMLGADQPVILHMLDIPFAAEALNGVKMELVDAAFPLLKGVVATTDAVEACTGVNVAVMVGGFPRKEGMERKDVMSKNVSIYKSQASALEKHAAPNCKVLVVANPANTNALILKEFAPSIPEKNITCLTRLDHNRALGQVSERLSVPVSDVKNVIIWGNHSSTQYPDVNHATVKTSSGEKPVRELVKNDEWLNGEFISTVQQRGAAIIKARKLSSALSAASSACDHIRDWVVGTPEGTFVSMGVYSDGSYNVPAGLIYSFPVTCRNGEWTIVQGLPIDDASRKKMDLTAEELKEEKDLAYSCLS

SEQ ID NO: 25235 - protein, 309 aa, Arabidopsis thaliana
  peptide (1)..(309): Ceres Seq. ID no. 12396087
  misc_feature (134)..(308): Pfam Name: lactate/malate dehydrogenase, alpha/beta Pfam Description: lactate/malate dehydrogenase, alpha/beta
  misc_feature (1)..(309): Homolog of NCBI NO: 37589957 NR Description: Malate dehydrogenase, soluble [Mus musculus]
  misc_feature (1)..(309): Homolog of NCBI NO: 11133373 NR Description: Malate dehydrogenase, cytoplasmic
  misc_feature (1)..(309): Homolog of NCBI NO: 15982948 NR Description: NAD-dependent malate dehydrogenase [Prunus
  misc_feature (1)..(309): Homolog of NCBI NO: 12229778 NR Description: Malate dehydrogenase, cytoplasmic
  misc_feature (1)..(309): Homolog of NCBI NO: 10334493 NR Description: cytosolic malate dehydrogenase [Cicer arietinum]
  misc_feature (1)..(308): Homolog of NCBI NO: 18202485 NR Description: Malate dehydrogenase, cytoplasmic
  misc_feature (1)..(309): Homolog of NCBI NO: 10798652 NR Description: malate dehydrogenase [Nicotiana tabacum]
  misc_feature (1)..(309): Homolog of NCBI NO: 15219721 NR Description: putative malate dehydrogenase
  misc_feature (1)..(309): Homolog of NCBI NO: 15239843 NR Description: cytosolic malate dehydrogenase
  misc_feature (1)..(309): Homolog of NCBI NO: 21593565 NR Description: cytosolic malate dehydrogenase [Arabidopsis
MIARGIMLGADQPVILHMLDIPFAAEALNGVKMELVDAAFPLLKGVVATTDAVEACTGVNVAVMVGGFPRKEGMERKDVMSKNVSIYKSQASALEKHAAPNCKVLVVANPANTNALILKEFAPSIPEKNITCLTRLDHNRALGQVSERLSVPVSDVKNVIIWGNHSSTQYPDVNHATVKTSSGEKPVRELVKNDEWLNGEFISTVQQRGAAIIKARKLSSALSAASSACDHIRDWVVGTPEGTFVSMGVYSDGSYNVPAGLIYSFPVTCRNGEWTIVQGLPIDDASRKKMDLTAEELKEEKDLAYSCLS

SEQ ID NO: 25236 - protein, 303 aa, Arabidopsis thaliana
  peptide (1)..(303): Ceres Seq. ID no. 12396088
  misc_feature (128)..(302): Pfam Name: lactate/malate dehydrogenase, alpha/beta Pfam Description: lactate/malate dehydrogenase, alpha/beta
  misc_feature (1)..(303): Homolog of NCBI NO: 15982948 NR Description: NAD-dependent malate dehydrogenase [Prunus
  misc_feature (1)..(303): Homolog of NCBI NO: 12229778 NR Description: Malate dehydrogenase, cytoplasmic
  misc_feature (1)..(303): Homolog of NCBI NO: 10334493 NR Description: cytosolic malate dehydrogenase [Cicer arietinum]
  misc_feature (1)..(302): Homolog of NCBI NO: 18202485 NR Description: Malate dehydrogenase, cytoplasmic
  misc_feature (1)..(303): Homolog of NCBI NO: 37589957 NR Description: Malate dehydrogenase, soluble [Mus musculus]
  misc_feature (1)..(303): Homolog of NCBI NO: 11133373 NR Description: Malate dehydrogenase, cytoplasmic
  misc_feature (1)..(303): Homolog of NCBI NO: 10798652 NR Description: malate dehydrogenase [Nicotiana tabacum]
  misc_feature (1)..(303): Homolog of NCBI NO: 15219721 NR Description: putative malate dehydrogenase
  misc_feature (1)..(303): Homolog of NCBI NO: 15239843 NR Description: cytosolic malate dehydrogenase
  misc_feature (1)..(303): Homolog of NCBI NO: 21593565 NR Description: cytosolic malate dehydrogenase [Arabidopsis
MLGADQPVILHMLDIPFAAEALNGVKMELVDAAFPLLKGVVATTDAVEACTGVNVAVMVGGFPRKEGMERKDVMSKNVSIYKSQASALEKHAAPNCKVLVVANPANTNALILKEFAPSIPEKNITCLTRLDHNRALGQVSERLSVPVSDVKNVIIWGNHSSTQYPDVNHATVKTSSGEKPVRELVKNDEWLNGEFISTVQQRGAAIIKARKLSSALSAASSACDHIRDWVVGTPEGTFVSMGVYSDGSYNVPAGLIYSFPVTCRNGEWTIVQGLPIDDASRKKMDLTAEELKEEKDLAYSCLS

SEQ ID NO: 25237 - DNA, 1609 bp, Arabidopsis thaliana
  misc_feature (1)..(1609): Ceres Seq. ID no. 12385308
  misc_feature: MA Experiment ID: 108434 Result: Up-regulated in Transcription
  misc_feature: MA Experiment 108434 PARAMETER Experiment Name: At_Root_Tips_cDNA_P Parameter: Tissue Value: Root Tips
  misc_feature: MA Experiment ID: 108463 Result: Down-regulated in Transcription
  misc_feature: MA Experiment 108463 PARAMETER Experiment Name: At_Germinating_Seeds_cDNA_P Parameter: Age (day) Value: 3 vs. 0
  misc_feature: MA Experiment 108463 PARAMETER Experiment Name: At_Germinating_Seeds_cDNA_P Parameter: Tissue Value: Germinating Seeds
  misc_feature: MA Experiment ID: 108595 Result: Down-regulated in Transcription
  misc_feature: MA Experiment 108595 PARAMETER Experiment Name: At_Ler-pi_Ovule_cDNA_P Parameter: Plant Line Value: null
  misc_feature: MA Experiment ID: 20000087 Result: Down-regulated in Transcription
  misc_feature: MA Experiment 20000087 PARAMETER Experiment Name: At_100uM_ABA_Mutants_cDNA_P Parameter: Plant Line Value: WS
  misc_feature: MA Experiment 20000087 PARAMETER Experiment Name: At_100uM_ABA_Mutants_cDNA_P Parameter: Timepoint (hr) Value: 6
  misc_feature: MA Experiment 20000087 PARAMETER Experiment Name: At_100uM_ABA_Mutants_cDNA_P Parameter: Tissue Value: Aerial
  misc_feature: MA Experiment 20000087 PARAMETER Experiment Name: At_100uM_ABA_Mutants_cDNA_P Parameter: Treatment Value: 100uM ABA vs. No Treatment
  misc_feature: MA Experiment ID: 20000234 Result: Up-regulated in Transcription
  misc_feature: MA Experiment 20000234 PARAMETER Experiment Name: At_Siliques_P Parameter: Age (day) Value: 21
  misc_feature: MA Experiment 20000234 PARAMETER Experiment Name: At_Siliques_P Parameter: Organism Value: A. thaliana
  misc_feature: MA Experiment 20000234 PARAMETER Experiment Name: At_Siliques_P Parameter: Plant Line Value: WS
  misc_feature: MA Experiment 20000234 PARAMETER Experiment Name: At_Siliques_P Parameter: Tissue Value: Less Than 5mm Siliques vs. Whole Plant
tctcttttctttcactctctgttttgttctttatcgcctgagaattgatgtggatttttcatatttcagttaatcttagctaattgacttgaaattcaatgaaaagattcaatttttggtttaattaagcaagttgtgagatagatgaacgaatttgttgaccaattgcgttttacaggatacgtttgttgctctatgaagtcttatagattatctgaacttagttcttcccaagttgatagtttgaagtcacgccctcgcattgacttctcttctattttcgccactgtgaacccgattatcgatgctgttcgtagcaatggggataatgctgtcaaagaatacactgaaagatttgacaaagtccagctgaataaagttgtggaagatatgtctgagctttctgttcctgagctcgattccaatgtcaaagaagcgtttgatgttgcgtatgacaacatatatgcgtttcacttagcccaaaagtcaactgagaaaagcgttgagaatatgaaaggtgtcagatgtaaaagggtgtcaagatctattggctctgtaggtctttatgtgcctggtggaacagctgttttgccatcaacggctttgatgcttgctattcctgctcaaattgctggatgtaaaacagttgttcttgcaactccaccaagtaaggatggaagcatttgtaaggaggttctgtattgcgccaagagggctggtgtaactcacatactcaaagctggtggagcgcaggctatagctgccatggcctgggggacagattcttgtccaaaggttgagaagatttttggtcctgggaaccagtatgtcacagctgctaagatgattcttcaaaacagcgaggcaatggtctcaatcgatatgcctgctggtccttcagaagtcctagttattgctgacgaacatgctagtccagtttacattgcagcagacttactttctcaggcggagcatggtccagatagtcaagttgttcttgtagttgtgggcgatagtgtagatctcaacgccatcgaagaagaaattgccaagcagtgcaaaagccttcctagaggagagtttgcttcaaaagcactaagtcacagtttcacagtgtttgctcgagatatgattgaggcaatatctttctcaaatctatatgcacccgaacatttgatcatcaatgtcaaagacgctgagaaatgggagggactgattgagaacgcaggctcggttttcataggaccatggactccagagagtgttggggattatgcgagcgggacaaaccacgttcttccaacatatggatatgcaagaatgtacagtggcgtctctctcgactctttcctaaagttcatgactgtacaatctttgacagaggaaggtctgagaaacctcggcccttatgtagcaactatggctgaaatcgaaggtttagatgcacacaagagagccgttactctcagactcaaggatatcgaagccaaacagcttgcataatccaattgagatttatattcagacaaaagaggcgaaaattctttttgtattgtatgaacatatttggtttcctgagattggataacaataaaataagagatgttgg

SEQ ID NO: 25238 - protein, 452 aa, Arabidopsis thaliana
  peptide (1)..(452): Ceres Seq. ID no. 12385309
  misc_feature (31)..(444): Pfam Name: Histidinol dehydrogenase Pfam Description: Histidinol dehydrogenase
  misc_feature (17)..(444): Homolog of NCBI NO: 6166202 NR Description: Histidine biosynthesis trifunctional protein
  misc_feature (17)..(444): Homolog of NCBI NO: 2853025 NR Description: histidine-3 protein [Neurospora crassa]
  misc_feature (18)..(443): Homolog of NCBI NO: 31095443 NR Description: HIS4 [Hebeloma cylindrosporum]
  misc_feature (7)..(448): Homolog of NCBI NO: 34904356 NR Description: unnamed protein product [Oryza sativa (japonica
  misc_feature (4)..(452): Homolog of NCBI NO: 3982577 NR Description: histidinol dehydrogenase [Thlaspi goesingense]
  misc_feature (12)..(450): Homolog of NCBI NO: 123178 NR Description: Histidinol dehydrogenase, chloroplast precursor
  misc_feature (18)..(452): Homolog of NCBI NO: 21593566 NR Description: histidinol dehydrogenase [Arabidopsis thaliana]
  misc_feature (12)..(452): Homolog of NCBI NO: 30697915 NR Description: histidinol dehydrogenase [Arabidopsis thaliana]
  misc_feature (9)..(452): Homolog of NCBI NO: 10177677 NR Description: histidinol dehydrogenase [Arabidopsis thaliana]
  misc_feature (1)..(452): Homolog of NCBI NO: 30697913 NR Description: histidinol dehydrogenase [Arabidopsis thaliana]
MNEFVDQLRFTGYVCCSMKSYRLSELSSSQVDSLKSRPRIDFSSIFATVNPIIDAVRSNGDNAVKEYTERFDKVQLNKVVEDMSELSVPELDSNVKEAFDVAYDNIYAFHLAQKSTEKSVENMKGVRCKRVSRSIGSVGLYVPGGTAVLPSTALMLAIPAQIAGCKTVVLATPPSKDGSICKEVLYCAKRAGVTHILKAGGAQAIAAMAWGTDSCPKVEKIFGPGNQYVTAAKMILQNSEAMVSIDMPAGPSEVLVIADEHASPVYIAADLLSQAEHGPDSQVVLVVVGDSVDLNAIEEEIAKQCKSLPRGEFASKALSHSFTVFARDMIEAISFSNLYAPEHLIINVKDAEKWEGLIENAGSVFIGPWTPESVGDYASGTNHVLPTYGYARMYSGVSLDSFLKFMTVQSLTEEGLRNLGPYVATMAEIEGLDAHKRAVTLRLKDIEAKQLA

SEQ ID NO: 25239 - protein, 435 aa, Arabidopsis thaliana
  peptide (1)..(435): Ceres Seq. ID no. 12385310
  misc_feature (14)..(427): Pfam Name: Histidinol dehydrogenase Pfam Description: Histidinol dehydrogenase
  misc_feature (1)..(427): Homolog of NCBI NO: 6166202 NR Description: Histidine biosynthesis trifunctional protein
  misc_feature (1)..(427): Homolog of NCBI NO: 2853025 NR Description: histidine-3 protein [Neurospora crassa]
  misc_feature (1)..(426): Homolog of NCBI NO: 31095443 NR Description: HIS4 [Hebeloma cylindrosporum]
  misc_feature (1)..(431): Homolog of NCBI NO: 34904356 NR Description: unnamed protein product [Oryza sativa (japonica
  misc_feature (1)..(435): Homolog of NCBI NO: 3982577 NR Description: histidinol dehydrogenase [Thlaspi goesingense]
  misc_feature (1)..(433): Homolog of NCBI NO: 123178 NR Description: Histidinol dehydrogenase, chloroplast precursor
  misc_feature (1)..(435): Homolog of NCBI NO: 21593566 NR Description: histidinol dehydrogenase [Arabidopsis thaliana]
  misc_feature (1)..(435): Homolog of NCBI NO: 30697915 NR Description: histidinol dehydrogenase [Arabidopsis thaliana]
  misc_feature (1)..(435): Homolog of NCBI NO: 10177677 NR Description: histidinol dehydrogenase [Arabidopsis thaliana]
  misc_feature (1)..(435): Homolog of NCBI NO: 30697913 NR Description: histidinol dehydrogenase [Arabidopsis thaliana]
MKSYRLSELSSSQVDSLKSRPRIDFSSIFATVNPIIDAVRSNGDNAVKEYTERFDKVQLNKVVEDMSELSVPELDSNVKEAFDVAYDNIYAFHLAQKSTEKSVENMKGVRCKRVSRSIGSVGLYVPGGTAVLPSTALMLAIPAQIAGCKTVVLATPPSKDGSICKEVLYCAKRAGVTHILKAGGAQAIAAMAWGTDSCPKVEKIFGPGNQYVTAAKMILQNSEAMVSIDMPAGPSEVLVIADEHASPVYIAADLLSQAEHGPDSQVVLVVVGDSVDLNAIEEEIAKQCKSLPRGEFASKALSHSFTVFARDMIEAISFSNLYAPEHLIINVKDAEKWEGLIENAGSVFIGPWTPESVGDYASGTNHVLPTYGYARMYSGVSLDSFLKFMTVQSLTEEGLRNLGPYVATMAEIEGLDAHKRAVTLRLKDIEAKQLA

SEQ ID NO: 25240 - protein, 370 aa, Arabidopsis thaliana
  peptide (1)..(370): Ceres Seq. ID no. 12385311
  misc_feature (1)..(362): Pfam Name: Histidinol dehydrogenase Pfam Description: Histidinol dehydrogenase
  misc_feature (1)..(362): Homolog of NCBI NO: 6166202 NR Description: Histidine biosynthesis trifunctional protein
  misc_feature (1)..(362): Homolog of NCBI NO: 2853025 NR Description: histidine-3 protein [Neurospora crassa]
  misc_feature (1)..(361): Homolog of NCBI NO: 31095443 NR Description: HIS4 [Hebeloma cylindrosporum]
  misc_feature (1)..(366): Homolog of NCBI NO: 34904356 NR Description: unnamed protein product [Oryza sativa (japonica
  misc_feature (1)..(370): Homolog of NCBI NO: 3982577 NR Description: histidinol dehydrogenase [Thlaspi goesingense]
  misc_feature (1)..(368): Homolog of NCBI NO: 123178 NR Description: Histidinol dehydrogenase, chloroplast precursor
  misc_feature (1)..(370): Homolog of NCBI NO: 21593566 NR Description: histidinol dehydrogenase [Arabidopsis thaliana]
  misc_feature (1)..(370): Homolog of NCBI NO: 30697915 NR Description: histidinol dehydrogenase [Arabidopsis thaliana]
  misc_feature (1)..(370): Homolog of NCBI NO: 10177677 NR Description: histidinol dehydrogenase [Arabidopsis thaliana]
  misc_feature (1)..(370): Homolog of NCBI NO: 30697913 NR Description: histidinol dehydrogenase [Arabidopsis thaliana]
MSELSVPELDSNVKEAFDVAYDNIYAFHLAQKSTEKSVENMKGVRCKRVSRSIGSVGLYVPGGTAVLPSTALMLAIPAQIAGCKTVVLATPPSKDGSICKEVLYCAKRAGVTHILKAGGAQAIAAMAWGTDSCPKVEKIFGPGNQYVTAAKMILQNSEAMVSIDMPAGPSEVLVIADEHASPVYIAADLLSQAEHGPDSQVVLVVVGDSVDLNAIEEEIAKQCKSLPRGEFASKALSHSFTVFARDMIEAISFSNLYAPEHLIINVKDAEKWEGLIENAGSVFIGPWTPESVGDYASGTNHVLPTYGYARMYSGVSLDSFLKFMTVQSLTEEGLRNLGPYVATMAEIEGLDAHKRAVTLRLKDIEAKQLA

SEQ ID NO: 25241 - DNA, 1493 bp, Arabidopsis thaliana
  misc_feature (1)..(1493): Ceres Seq. ID no. 13490763
  misc_feature: MA Experiment ID: 108434 Result: Up-regulated in Transcription
  misc_feature: MA Experiment 108434 PARAMETER Experiment Name: At_Root_Tips_cDNA_P Parameter: Tissue Value: Root Tips
  misc_feature: MA Experiment ID: 108462 Result: Down-regulated in Transcription
  misc_feature: MA Experiment 108462 PARAMETER Experiment Name: At_Germinating_Seeds_cDNA_P Parameter: Age (day) Value: 2 vs. 0
  misc_feature: MA Experiment 108462 PARAMETER Experiment Name: At_Germinating_Seeds_cDNA_P Parameter: Tissue Value: Germinating Seeds
  misc_feature: MA Experiment ID: 108464 Result: Down-regulated in Transcription
  misc_feature: MA Experiment 108464 PARAMETER Experiment Name: At_Germinating_Seeds_cDNA_P Parameter: Age (day) Value: 4 vs. 0
  misc_feature: MA Experiment 108464 PARAMETER Experiment Name: At_Germinating_Seeds_cDNA_P Parameter: Tissue Value: Germinating Seeds
  misc_feature: MA Experiment ID: 108488 Result: Up-regulated in Transcription
  misc_feature: MA Experiment ID: 108569 Result: Up-regulated in Transcription
  misc_feature: MA Experiment 108569 PARAMETER Experiment Name: At_0.001%_MeJA__cDNA_P Parameter: Timepoint (hr) Value: 6
  misc_feature: MA Experiment 108569 PARAMETER Experiment Name: At_0.001%_MeJA__cDNA_P Parameter: Tissue Value: Aerial
  misc_feature: MA Experiment 108569 PARAMETER Experiment Name: At_0.001%_MeJA__cDNA_P Parameter: Treatment Value: 0.001% MeJA vs. No Treatment
  misc_feature: MA Experiment ID: 108595 Result: Down-regulated in Transcription
  misc_feature: MA Experiment 108595 PARAMETER Experiment Name: At_Ler-pi_Ovule_cDNA_P Parameter: Plant Line Value: null
  misc_feature: MA Experiment ID: 20000093 Result: Up-regulated in Transcription
  misc_feature: MA Experiment 20000093 PARAMETER Experiment Name: At_42deg_Heat_cDNA_P Parameter: Temperature (deg C) Value: 42 vs. 22
  misc_feature: MA Experiment 20000093 PARAMETER Experiment Name: At_42deg_Heat_cDNA_P Parameter: Timepoint (hr) Value: 0.5
  misc_feature: MA Experiment 20000093 PARAMETER Experiment Name: At_42deg_Heat_cDNA_P Parameter: Tissue Value: Aerial
gacccacgcgtccgtacaggcgtgctctctctcctctctccatctatctccctctcttcgccggagatcgcccttcaccaattccactatagtagcaaaaacaagtgaagcacaatggggatcatcgaaaggattaaagaaatcgaggccgagatggctcggactcagaagaataaagctacagagtatcatcttggtcagctcaaggcaaagattgcaaaactcaggacacaactgttggagcctccaaaaggtgctagtggaggcggggaaggttttgaagttaccaagtatggtcatggacgtgttgcacttataggatttcctagtgtcggaaagtccacgcttttgactatgttaactggaacacattctgaagcagcctcatatgaatttacaacacttacatgcatccctggtgtaattcactacaacgacacaaagattcagcttctcgatcttcctgggattattgaaggtgcttcggaaggaaaggggcgaggaaggcaggttattgctgttgcaaagtcttccgaccttgtattgatggttcttgatgcctcaaaaagcgaaggccacaggcaaatattgactaaggaacttgaggcagtgggcttgcgactaaacaaaactcctccgcagatatactttaaaaagaaaaagactggtggaatctctttcaacactacagcacccttgactcacattgatgagaagctctgttatcaaatcctgcatgaatacaagattcacaatgctgaggtgctatttcgtgagaatgccacagtggatgactttattgatgtcattgaaggcaaccgcaagtatattaagtgtgtttatgtctacatcaaaatagatgttgttggaattgatgatgtggatagactatcccggcagccaaattccattgttattagctgcaatcttaagcttaacttagacagactacttgctaggatgtgggacgaaatgggccttgtgagagtttactcgaagccgcaaggccagcaaccagatttcgatgagccttttgtcctctcatctgatcgaggtggctgcacagtggaagacttctgtaaccacgtccacaggactctggtgaaggatatgaagtatgcactcgtttggggcacaagcacaaggcacaatccacagaattgtggtctttctcaacatcttgaagacgaagatgttgttcagatcgtcaagaaaaaggagagagacgaaggaggaagaggccggttcaagtcacactcaaacgcccctgctagaattgcagacagagagaaaaaagctcctcttaagcaataagcttttagctgataagtcatctccatacatccatctccaccatcatagtcgtggatggtttcacctgagtaagatttactatgttgtatctgaatccgttttgttgttttctctcacaatataagttttggaacaattttacttttttgagatacaaatggaagtacgagttcctattt

SEQ ID NO: 25242 - protein, 399 aa, Arabidopsis thaliana
  peptide (1)..(399): Ceres Seq. ID no. 13490764
  misc_feature (1)..(267): Pfam Name: GTP1/OBG family Pfam Description: GTP1/OBG family
  misc_feature (1)..(367): Homolog of NCBI NO: 30584259 NR Description: Homo sapiens developmentally regulated GTP
  misc_feature (1)..(367): Homolog of NCBI NO: 12653443 NR Description: developmentally regulated GTP-binding protein 2
  misc_feature (1)..(367): Homolog of NCBI NO: 4557537 NR Description: developmentally regulated GTP binding protein 2
  misc_feature (1)..(367): Homolog of NCBI NO: 34221970 NR Description: developmentally regulated GTP-binding protein
  misc_feature (1)..(399): Homolog of NCBI NO: 7441590 NR Description: GTP binding protein - garden pea
  misc_feature (1)..(399): Homolog of NCBI NO: 15218561 NR Description: GTP-binding protein -related [Arabidopsis
  misc_feature (1)..(399): Homolog of NCBI NO: 8778457 NR Description: F1L3.17 [Arabidopsis thaliana]
  misc_feature (1)..(399): Homolog of NCBI NO: 13877991 NR Description: putative developmentally regulated GTP-binding
  misc_feature (1)..(399): Homolog of NCBI NO: 15220113 NR Description: developmentally regulated GTP-binding protein
  misc_feature (1)..(399): Homolog of NCBI NO: 2058456 NR Description: GTP-binding protein [Arabidopsis thaliana]
MGIIERIKEIEAEMARTQKNKATEYHLGQLKAKIAKLRTQLLEPPKGASGGGEGFEVTKYGHGRVALIGFPSVGKSTLLTMLTGTHSEAASYEFTTLTCIPGVIHYNDTKIQLLDLPGIIEGASEGKGRGRQVIAVAKSSDLVLMVLDASKSEGHRQILTKELEAVGLRLNKTPPQIYFKKKKTGGISFNTTAPLTHIDEKLCYQILHEYKIHNAEVLFRENATVDDFIDVIEGNRKYIKCVYVYIKIDVVGIDDVDRLSRQPNSIVISCNLKLNLDRLLARMWDEMGLVRVYSKPQGQQPDFDEPFVLSSDRGGCTVEDFCNHVHRTLVKDMKYALVWGTSTRHNPQNCGLSQHLEDEDVVQIVKKKERDEGGRGRFKSHSNAPARIADREKKAPLKQ

SEQ ID NO: 25243 - protein, 386 aa, Arabidopsis thaliana
  peptide (1)..(386): Ceres Seq. ID no. 13490765
  misc_feature (1)..(254): Pfam Name: GTP1/OBG family Pfam Description: GTP1/OBG family
  misc_feature (1)..(354): Homolog of NCBI NO: 30584259 NR Description: Homo sapiens developmentally regulated GTP
  misc_feature (1)..(354): Homolog of NCBI NO: 12653443 NR Description: developmentally regulated GTP-binding protein 2
  misc_feature (1)..(354): Homolog of NCBI NO: 4557537 NR Description: developmentally regulated GTP binding protein 2
  misc_feature (1)..(354): Homolog of NCBI NO: 34221970 NR Description: developmentally regulated GTP-binding protein
  misc_feature (1)..(386): Homolog of NCBI NO: 7441590 NR Description: GTP binding protein - garden pea
  misc_feature (1)..(386): Homolog of NCBI NO: 15218561 NR Description: GTP-binding protein -related [Arabidopsis
  misc_feature (1)..(386): Homolog of NCBI NO: 8778457 NR Description: F1L3.17 [Arabidopsis thaliana]
  misc_feature (1)..(386): Homolog of NCBI NO: 13877991 NR Description: putative developmentally regulated GTP-binding
  misc_feature (1)..(386): Homolog of NCBI NO: 15220113 NR Description: developmentally regulated GTP-binding protein
  misc_feature (1)..(386): Homolog of NCBI NO: 2058456 NR Description: GTP-binding protein [Arabidopsis thaliana]
MARTQKNKATEYHLGQLKAKIAKLRTQLLEPPKGASGGGEGFEVTKYGHGRVALIGFPSVGKSTLLTMLTGTHSEAASYEFTTLTCIPGVIHYNDTKIQLLDLPGIIEGASEGKGRGRQVIAVAKSSDLVLMVLDASKSEGHRQILTKELEAVGLRLNKTPPQIYFKKKKTGGISFNTTAPLTHIDEKLCYQILHEYKIHNAEVLFRENATVDDFIDVIEGNRKYIKCVYVYIKIDVVGIDDVDRLSRQPNSIVISCNLKLNLDRLLARMWDEMGLVRVYSKPQGQQPDFDEPFVLSSDRGGCTVEDFCNHVHRTLVKDMKYALVWGTSTRHNPQNCGLSQHLEDEDVVQIVKKKERDEGGRGRFKSHSNAPARIADREKKAPLKQ

SEQ ID NO: 25244 - protein, 319 aa, Arabidopsis thaliana
  peptide (1)..(319): Ceres Seq. ID no. 13490766
  misc_feature (1)..(187): Pfam Name: GTP1/OBG family Pfam Description: GTP1/OBG family
  misc_feature (1)..(287): Homolog of NCBI NO: 30584259 NR Description: Homo sapiens developmentally regulated GTP
  misc_feature (1)..(287): Homolog of NCBI NO: 12653443 NR Description: developmentally regulated GTP-binding protein 2
  misc_feature (1)..(287): Homolog of NCBI NO: 4557537 NR Description: developmentally regulated GTP binding protein 2
  misc_feature (1)..(287): Homolog of NCBI NO: 34221970 NR Description: developmentally regulated GTP-binding protein
  misc_feature (1)..(319): Homolog of NCBI NO: 7441590 NR Description: GTP binding protein - garden pea
  misc_feature (1)..(319): Homolog of NCBI NO: 15218561 NR Description: GTP-binding protein -related [Arabidopsis
  misc_feature (1)..(319): Homolog of NCBI NO: 8778457 NR Description: F1L3.17 [Arabidopsis thaliana]
  misc_feature (1)..(319): Homolog of NCBI NO: 13877991 NR Description: putative developmentally regulated GTP-binding
  misc_feature (1)..(319): Homolog of NCBI NO: 15220113 NR Description: developmentally regulated GTP-binding protein
  misc_feature (1)..(319): Homolog of NCBI NO: 2058456 NR Description: GTP-binding protein [Arabidopsis thaliana]
MLTGTHSEAASYEFTTLTCIPGVIHYNDTKIQLLDLPGIIEGASEGKGRGRQVIAVAKSSDLVLMVLDASKSEGHRQILTKELEAVGLRLNKTPPQIYFKKKKTGGISFNTTAPLTHIDEKLCYQILHEYKIHNAEVLFRENATVDDFIDVIEGNRKYIKCVYVYIKIDVVGIDDVDRLSRQPNSIVISCNLKLNLDRLLARMWDEMGLVRVYSKPQGQQPDFDEPFVLSSDRGGCTVEDFCNHVHRTLVKDMKYALVWGTSTRHNPQNCGLSQHLEDEDVVQIVKKKERDEGGRGRFKSHSNAPARIADREKKAPLKQ

SEQ ID NO: 25245 - DNA, 1356 bp, Arabidopsis thaliana
  misc_feature (1)..(1356): Ceres Seq. ID no. 12322340
  misc_feature: MA Experiment ID: 108464 Result: Down-regulated in Transcription
  misc_feature: MA Experiment 108464 PARAMETER Experiment Name: At_Germinating_Seeds_cDNA_P Parameter: Age (day) Value: 4 vs. 0
  misc_feature: MA Experiment 108464 PARAMETER Experiment Name: At_Germinating_Seeds_cDNA_P Parameter: Tissue Value: Germinating Seeds
  misc_feature: MA Experiment ID: 108577 Result: Down-regulated in Transcription
  misc_feature: MA Experiment 108577 PARAMETER Experiment Name: At_42deg_Heat_cDNA_P Parameter: Temperature (deg C) Value: 42 vs. 22
  misc_feature: MA Experiment 108577 PARAMETER Experiment Name: At_42deg_Heat_cDNA_P Parameter: Timepoint (hr) Value: 6
  misc_feature: MA Experiment 108577 PARAMETER Experiment Name: At_42deg_Heat_cDNA_P Parameter: Tissue Value: Aerial
  misc_feature: MA Experiment ID: 20000794 Result: Up-regulated in Transcription
  misc_feature: MA Experiment 20000794 PARAMETER Experiment Name: At_Petals_P Parameter: Age (day) Value: 23-25 days
  misc_feature: MA Experiment 20000794 PARAMETER Experiment Name: At_Petals_P Parameter: Plant Line Value: WS
  misc_feature: MA Experiment 20000794 PARAMETER Experiment Name: At_Petals_P Parameter: Tissue Value: Petals vs. Whole plant
  misc_feature: MA Experiment ID: 20001557 Result: Up-regulated in Transcription
  misc_feature: MA Experiment 20001557 PARAMETER Experiment Name: At_Drought_Soil_Dry_P Parameter: Age (day) Value: 27
  misc_feature: MA Experiment 20001557 PARAMETER Experiment Name: At_Drought_Soil_Dry_P Parameter: Organism Value: A. thaliana
  misc_feature: MA Experiment 20001557 PARAMETER Experiment Name: At_Drought_Soil_Dry_P Parameter: Plant Line Value: WS
  misc_feature: MA Experiment 20001557 PARAMETER Experiment Name: At_Drought_Soil_Dry_P Parameter: Post Timepoint (hr) Value: 3
  misc_feature: MA Experiment 20001557 PARAMETER Experiment Name: At_Drought_Soil_Dry_P Parameter: Post-Treatment Value: Re-Water vs. No Drought
  misc_feature: MA Experiment 20001557 PARAMETER Experiment Name: At_Drought_Soil_Dry_P Parameter: Timepoint (day) Value: 13
  misc_feature: MA Experiment 20001557 PARAMETER Experiment Name: At_Drought_Soil_Dry_P Parameter: Treatment Value: Drought vs. No Drought
  misc_feature: MA Experiment ID: 20001911 Result: Up-regulated in Transcription
  misc_feature: MA Experiment 20001911 PARAMETER Experiment Name: At_Drought_Reproduction_P Parameter: Age (day) Value: 40
  misc_feature: MA Experiment 20001911 PARAMETER Experiment Name: At_Drought_Reproduction_P Parameter: Organism Value: A. thaliana
  misc_feature: MA Experiment 20001911 PARAMETER Experiment Name: At_Drought_Reproduction_P Parameter: Plant Line Value: WS
  misc_feature: MA Experiment 20001911 PARAMETER Experiment Name: At_Drought_Reproduction_P Parameter: Timepoint (day) Value: 10
  misc_feature: MA Experiment 20001911 PARAMETER Experiment Name: At_Drought_Reproduction_P Parameter: Tissue Value: Flowers
  misc_feature: MA Experiment 20001911 PARAMETER Experiment Name: At_Drought_Reproduction_P Parameter: Treatment Value: Drought vs. No Drought
aaattttcgattgattcgcttcttcaactctctctcttcttcttcttctatttgcttctgtgaaaccctagattttggtgtgaggaagaagacttcaatggcggaagaagtagcagagaacgttaacgcagtcccggtttcggaagacgagctttacggatttaaacgatcggagatgtacagtggtactctcgccggttccgttggtccgtacggtcgtcatgttttcctttgttacaagagtcatgagacttggcttcctcgtgttgaaactgaaggacttcctcagcgtttcgcgaagttgtttaaggatcgtaaagctgatttcgctgttgagacgaagcttacggtgtgtggtggtggtggtgaatctgatggagatgtgttgattttcccggagatggttagatacaaggcgattcaggacacagatgtggatgcttttgtggaagatgtgcttgtgaaaggaaaaacatggacttctgggattcaggaagagttgactggttcctttgtgtttgtgtgcgctcatggtagccgagacaagagatgtggtgtttgtggaccagttcttatggagaagttcgagcaggagataagttcacgtggactttcagacaaaatctttgttttgccgtgttctcatatcggtgggcacaagtatgctggaaatttgattgtcttcagccctgattcagctggaaatgtttctggccattggtatggctatgtgactcctgatgacgtgcctgcaatgcttgatcagcatattgcaaaaggagaaatcattcaaaacctttccagaggccagatgagactaagacccgagggtgaggaagctgagaaagaggatgagcataaaatcccaaacggaaacagtgtaatggtggaagaacgcgaacctgtggagcagaaagggttcacaggaggttgttgccaaggtgcaaacggagtttcatgttgccaagaacaagctgcagagccagtcaagaaagaaggatgcatgaagctaaactggttgaaatcgatggggaaagaagaggttctcttgggagcagcagtagtttcagctgtcgcaaccgttgccgtggcttacagcatttacagaaggtcaggttaagaacctgaaccaccctcctctttttacacttttaagaagaaactttatttttggtagccatattatagaagtaaaggaagaaaagaaaacatggagaggtaataatcttttggaactatataaccatcatttggtttcggtatgggcaatgcaggaatgggatgtaatcttgcttttgactcggtttagtttggtttatcttattatgttgtcattggaatatatcaatcttctcc

SEQ ID NO: 25246 - protein, 372 aa, Arabidopsis thaliana
  peptide (1)..(372): Ceres Seq. ID no. 12322341
  misc_feature (9)..(338): Homolog of NCBI NO: 18416788 NR Description: sucrase-like protein
  misc_feature (339)..(370): Homolog of NCBI NO: 16604384 NR Description: AT4g26620/T15N24_70 [Arabidopsis thaliana]
  misc_feature (9)..(338): Homolog of NCBI NO: 16604384 NR Description: AT4g26620/T15N24_70 [Arabidopsis thaliana]
  misc_feature (59)..(371): Homolog of NCBI NO: 1086252 NR Description: sucrose cleavage protein - potato
  misc_feature (59)..(372): Homolog of NCBI NO: 9758077 NR Description: sucrose cleavage protein-like [Arabidopsis
  misc_feature (39)..(372): Homolog of NCBI NO: 15237439 NR Description: sucrose cleavage protein -like
  misc_feature (39)..(372): Homolog of NCBI NO: 21553503 NR Description: sucrose cleavage protein-like [Arabidopsis
  misc_feature (59)..(372): Homolog of NCBI NO: 11994184 NR Description: sucrose cleavage protein-like [Arabidopsis
  misc_feature (33)..(372): Homolog of NCBI NO: 16604338 NR Description: AT3g27570/MMJ24_12 [Arabidopsis thaliana]
  misc_feature (2)..(372): Homolog of NCBI NO: 30688845 NR Description: sucrose cleavage protein -related [Arabidopsis
NFRLIRFFNSLSSSSSICFCETLDFGVRKKTSMAEEVAENVNAVPVSEDELYGFKRSEMYSGTLAGSVGPYGRHVFLCYKSHETWLPRVETEGLPQRFAKLFKDRKADFAVETKLTVCGGGGESDGDVLIFPEMVRYKAIQDTDVDAFVEDVLVKGKTWTSGIQEELTGSFVFVCAHGSRDKRCGVCGPVLMEKFEQEISSRGLSDKIFVLPCSHIGGHKYAGNLIVFSPDSAGNVSGHWYGYVTPDDVPAMLDQHIAKGEIIQNLSRGQMRLRPEGEEAEKEDEHKIPNGNSVMVEEREPVEQKGFTGGCCQGANGVSCCQEQAAEPVKKEGCMKLNWLKSMGKEEVLLGAAVVSAVATVAVAYSIYRRSG

SEQ ID NO: 25247 - protein, 340 aa, Arabidopsis thaliana
  peptide (1)..(340): Ceres Seq. ID no. 12322342
  misc_feature (1)..(306): Homolog of NCBI NO: 18416788 NR Description: sucrase-like protein
  misc_feature (307)..(338): Homolog of NCBI NO: 16604384 NR Description: AT4g26620/T15N24_70 [Arabidopsis thaliana]
  misc_feature (1)..(306): Homolog of NCBI NO: 16604384 NR Description: AT4g26620/T15N24_70 [Arabidopsis thaliana]
  misc_feature (27)..(339): Homolog of NCBI NO: 1086252 NR Description: sucrose cleavage protein - potato
  misc_feature (27)..(340): Homolog of NCBI NO: 9758077 NR Description: sucrose cleavage protein-like [Arabidopsis
  misc_feature (7)..(340): Homolog of NCBI NO: 15237439 NR Description: sucrose cleavage protein -like
  misc_feature (7)..(340): Homolog of NCBI NO: 21553503 NR Description: sucrose cleavage protein-like [Arabidopsis
  misc_feature (27)..(340): Homolog of NCBI NO: 11994184 NR Description: sucrose cleavage protein-like [Arabidopsis
  misc_feature (1)..(340): Homolog of NCBI NO: 16604338 NR Description: AT3g27570/MMJ24_12 [Arabidopsis thaliana]
  misc_feature (1)..(340): Homolog of NCBI NO: 30688845 NR Description: sucrose cleavage protein -related [Arabidopsis
MAEEVAENVNAVPVSEDELYGFKRSEMYSGTLAGSVGPYGRHVFLCYKSHETWLPRVETEGLPQRFAKLFKDRKADFAVETKLTVCGGGGESDGDVLIFPEMVRYKAIQDTDVDAFVEDVLVKGKTWTSGIQEELTGSFVFVCAHGSRDKRCGVCGPVLMEKFEQEISSRGLSDKIFVLPCSHIGGHKYAGNLIVFSPDSAGNVSGHWYGYVTPDDVPAMLDQHIAKGEIIQNLSRGQMRLRPEGEEAEKEDEHKIPNGNSVMVEEREPVEQKGFTGGCCQGANGVSCCQEQAAEPVKKEGCMKLNWLKSMGKEEVLLGAAVVSAVATVAVAYSIYRRSG

SEQ ID NO: 25248 - protein, 314 aa, Arabidopsis thaliana
  peptide (1)..(314): Ceres Seq. ID no. 12322343
  misc_feature (1)..(280): Homolog of NCBI NO: 18416788 NR Description: sucrase-like protein
  misc_feature (281)..(312): Homolog of NCBI NO: 16604384 NR Description: AT4g26620/T15N24_70 [Arabidopsis thaliana]
  misc_feature (1)..(280): Homolog of NCBI NO: 16604384 NR Description: AT4g26620/T15N24_70 [Arabidopsis thaliana]
  misc_feature (1)..(313): Homolog of NCBI NO: 1086252 NR Description: sucrose cleavage protein - potato
  misc_feature (1)..(314): Homolog of NCBI NO: 9758077 NR Description: sucrose cleavage protein-like [Arabidopsis
  misc_feature (1)..(314): Homolog of NCBI NO: 15237439 NR Description: sucrose cleavage protein -like
  misc_feature (1)..(314): Homolog of NCBI NO: 21553503 NR Description: sucrose cleavage protein-like [Arabidopsis
  misc_feature (1)..(314): Homolog of NCBI NO: 11994184 NR Description: sucrose cleavage protein-like [Arabidopsis
  misc_feature (1)..(314): Homolog of NCBI NO: 16604338 NR Description: AT3g27570/MMJ24_12 [Arabidopsis thaliana]
  misc_feature (1)..(314): Homolog of NCBI NO: 30688845 NR Description: sucrose cleavage protein -related [Arabidopsis
MYSGTLAGSVGPYGRHVFLCYKSHETWLPRVETEGLPQRFAKLFKDRKADFAVETKLTVCGGGGESDGDVLIFPEMVRYKAIQDTDVDAFVEDVLVKGKTWTSGIQEELTGSFVFVCAHGSRDKRCGVCGPVLMEKFEQEISSRGLSDKIFVLPCSHIGGHKYAGNLIVFSPDSAGNVSGHWYGYVTPDDVPAMLDQHIAKGEIIQNLSRGQMRLRPEGEEAEKEDEHKIPNGNSVMVEEREPVEQKGFTGGCCQGANGVSCCQEQAAEPVKKEGCMKLNWLKSMGKEEVLLGAAVVSAVATVAVAYSIYRRSG

SEQ ID NO: 25249 - DNA, 1426 bp, Arabidopsis thaliana
  misc_feature (1)..(1426): Ceres Seq. ID no. 12330660
  misc_feature: MA Experiment ID: 108434 Result: Down-regulated in Transcription
  misc_feature: MA Experiment 108434 PARAMETER Experiment Name: At_Root_Tips_cDNA_P Parameter: Tissue Value: Root Tips
  misc_feature: MA Experiment ID: 108461 Result: Up-regulated in Transcription
  misc_feature: MA Experiment 108461 PARAMETER Experiment Name: At_Germinating_Seeds_cDNA_P Parameter: Age (day) Value: 1 vs. 0
  misc_feature: MA Experiment 108461 PARAMETER Experiment Name: At_Germinating_Seeds_cDNA_P Parameter: Tissue Value: Germinating Seeds
  misc_feature: MA Experiment ID: 108501 Result: Up-regulated in Transcription
  misc_feature: MA Experiment 108501 PARAMETER Experiment Name: At_ap2_floral_buds_cDNA_P Parameter: Plant Line Value: ap2 (Ler.)
  misc_feature: MA Experiment 108501 PARAMETER Experiment Name: At_ap2_floral_buds_cDNA_P Parameter: Tissue Value: Closed Flower
  misc_feature: MA Experiment ID: 108569 Result: Up-regulated in Transcription
  misc_feature: MA Experiment 108569 PARAMETER Experiment Name: At_0.001%_MeJA__cDNA_P Parameter: Timepoint (hr) Value: 6
  misc_feature: MA Experiment 108569 PARAMETER Experiment Name: At_0.001%_MeJA__cDNA_P Parameter: Tissue Value: Aerial
  misc_feature: MA Experiment 108569 PARAMETER Experiment Name: At_0.001%_MeJA__cDNA_P Parameter: Treatment Value: 0.001% MeJA vs. No Treatment
  misc_feature: MA Experiment ID: 108594 Result: Down-regulated in Transcription
  misc_feature: MA Experiment 108594 PARAMETER Experiment Name: At_Ler-rhl_Root_cDNA_P Parameter: Plant Line Value: null
  misc_feature: MA Experiment ID: 20000068 Result: Up-regulated in Transcription
  misc_feature: MA Experiment ID: 20000112 Result: Down-regulated in Transcription
  misc_feature: MA Experiment 20000112 PARAMETER Experiment Name: At_42deg_Heat_cDNA_P Parameter: Temperature (deg C) Value: 42 vs. 22
  misc_feature: MA Experiment 20000112 PARAMETER Experiment Name: At_42deg_Heat_cDNA_P Parameter: Timepoint (hr) Value: 2
  misc_feature: MA Experiment 20000112 PARAMETER Experiment Name: At_42deg_Heat_cDNA_P Parameter: Tissue Value: Aerial
  misc_feature: MA Experiment ID: 20000171 Result: Down-regulated in Transcription
  misc_feature: MA Experiment 20000171 PARAMETER Experiment Name: At_42deg_Heat_P Parameter: Age (day) Value: 14
  misc_feature: MA Experiment 20000171 PARAMETER Experiment Name: At_42deg_Heat_P Parameter: Organism Value: A. thaliana
  misc_feature: MA Experiment 20000171 PARAMETER Experiment Name: At_42deg_Heat_P Parameter: Plant Line Value: WS
  misc_feature: MA Experiment 20000171 PARAMETER Experiment Name: At_42deg_Heat_P Parameter: Temperature (deg C) Value: 42 vs. 22
  misc_feature: MA Experiment 20000171 PARAMETER Experiment Name: At_42deg_Heat_P Parameter: Timepoint (hr) Value: 1
  misc_feature: MA Experiment 20000171 PARAMETER Experiment Name: At_42deg_Heat_P Parameter: Tissue Value: Aerial
  misc_feature: MA Experiment ID: 20000173 Result: Down-regulated in Transcription
  misc_feature: MA Experiment 20000173 PARAMETER Experiment Name: At_42deg_Heat_P Parameter: Age (day) Value: 14
  misc_feature: MA Experiment 20000173 PARAMETER Experiment Name: At_42deg_Heat_P Parameter: Organism Value: A. thaliana
  misc_feature: MA Experiment 20000173 PARAMETER Experiment Name: At_42deg_Heat_P Parameter: Plant Line Value: WS
  misc_feature: MA Experiment 20000173 PARAMETER Experiment Name: At_42deg_Heat_P Parameter: Temperature (deg C) Value: 42 vs. 22
  misc_feature: MA Experiment 20000173 PARAMETER Experiment Name: At_42deg_Heat_P Parameter: Timepoint (hr) Value: 6
  misc_feature: MA Experiment 20000173 PARAMETER Experiment Name: At_42deg_Heat_P Parameter: Tissue Value: Aerial
  misc_feature: MA Experiment ID: 20000185 Result: Up-regulated in Transcription
  misc_feature: MA Experiment 20000185 PARAMETER Experiment Name: At_Roots__P Parameter: Age (day) Value: 7 vs. 21
  misc_feature: MA Experiment 20000185 PARAMETER Experiment Name: At_Roots__P Parameter: Organism Value: A. thaliana
  misc_feature: MA Experiment 20000185 PARAMETER Experiment Name: At_Roots__P Parameter: Tissue Value: Roots vs. Whole Plant
  misc_feature: MA Experiment ID: 20000224 Result: Up-regulated in Transcription
  misc_feature: MA Experiment ID: 20000234 Result: Up-regulated in Transcription
  misc_feature: MA Experiment 20000234 PARAMETER Experiment Name: At_Siliques_P Parameter: Age (day) Value: 21
  misc_feature: MA Experiment 20000234 PARAMETER Experiment Name: At_Siliques_P Parameter: Organism Value: A. thaliana
  misc_feature: MA Experiment 20000234 PARAMETER Experiment Name: At_Siliques_P Parameter: Plant Line Value: WS
  misc_feature: MA Experiment 20000234 PARAMETER Experiment Name: At_Siliques_P Parameter: Tissue Value: Less Than 5mm Siliques vs. Whole Plant
  misc_feature: MA Experiment ID: 20000439 Result: Up-regulated in Transcription
  misc_feature: MA Experiment 20000439 PARAMETER Experiment Name: At_Roots__P Parameter: Age (day) Value: 14 vs. 21
  misc_feature: MA Experiment 20000439 PARAMETER Experiment Name: At_Roots__P Parameter: Organism Value: A. thaliana
  misc_feature: MA Experiment 20000439 PARAMETER Experiment Name: At_Roots__P Parameter: Tissue Value: Roots vs. Whole Plant
taataatattcttttaaaaaaatagaaacgttggtcacgaggcctcatcaatgcttttgataccttccttcaccgcaaattctaacgaaccaccaccgtcgaagctttctctttccgatctttcaatggcgattctcaaatctcacttcttcttactcttccctcttcttcttctccactttcacactgtctcctttgctcagacgctctttgtgttcggagatggtctttacgacgccggaaacaaacagtttctctctcagaaccgagttgacgcaagctttcctccttatggagtcactgtaggacaagccaccggacggtggtccgatggttctatcgttcctgattatcttgctaaattcatgggaattcctaaaatctctccgattctcctaaccacggcggatttttctcacggagctaatttcgccatcgccgacgctaccgttcttggctctcctccggagacgatgactttgtcacaacaagtgaagaaattctcggaaaacaagaataagtggacaaatcaaacacgttctgaagctatctacttgatctacattggttctgatgattacttgagctatgctaagagtaatccaagtccatcagatactcagaaacaagcttttgttgatcaagtcatcactaccataaaagcagaaataaaggtggtttacgggtctggcggaaggaaattcgcattccagaacttggcaccgttaggttgcttaccggccgtgaaacaagcaagcggaaatgttcaagaatgtgtgaaattgccttcggaaatggctgctttgcataacaagaaacttttgcagctcttggttgaactatcaagagaactaaatggtttccagtactcgttttacgacttctttagctcgatccaaaacagagttatcaagtctaagacttatacattcgagacaggaaacgctgcttgttgtggaactggctctatcaacgggagtaattgctcagctaaaaatgtatgcgccaagcctgaagagtatatcttctttgatggtaagcatttgacgcaagaagccaaccttcaggtcgggcatttgatgtggggagcagatccggaagtgattggaccgaacaatatcagggagcttatggtccttcctctagacattacagtcatcttagctggtatacaagaagctatggctgccatgagaccgagacagagcaacattgagagtctctatgatatcaagaagatggagtcagagatggataatcattggctttatcaagttgacaaagctatctcctttatgatataagattgtggttacagtttgatttaagcgagagagtttaagagctagtgtaacaaagaactagcaagaaaactgaaacatccatttttcttgtttagtaataaaacaatcaaccttattaagtc

SEQ ID NO: 25250 - protein, 417 aa, Arabidopsis thaliana
  peptide (1)..(417): Ceres Seq. ID no. 12330661
  misc_feature (53)..(344): Pfam Name: GDSL-like Lipase/Acylhydrolase Pfam Description: GDSL-like Lipase/Acylhydrolase
  misc_feature (53)..(366): Homolog of NCBI NO: 15221019 NR Description: myrosinase-associated protein, putative
  misc_feature (53)..(389): Homolog of NCBI NO: 25336315 NR Description: hypothetical protein F15I1.9 [imported] -
  misc_feature (53)..(366): Homolog of NCBI NO: 21592973 NR Description: myrosinase-associated protein, putative
  misc_feature (53)..(386): Homolog of NCBI NO: 21618218 NR Description: myrosinase-associated protein, putative
  misc_feature (53)..(386): Homolog of NCBI NO: 18404748 NR Description: myrosinase-associated protein, putative
  misc_feature (53)..(369): Homolog of NCBI NO: 15450435 NR Description: AT3g14210/MAG2_18 [Arabidopsis thaliana]
  misc_feature (53)..(369): Homolog of NCBI NO: 15231805 NR Description: myrosinase-associated protein, putative
  misc_feature (26)..(417): Homolog of NCBI NO: 21593567 NR Description: myrosinase-associated protein, putative
  misc_feature (1)..(417): Homolog of NCBI NO: 15221023 NR Description: myrosinase-associated protein, putative
  misc_feature (1)..(417): Homolog of NCBI NO: 25405684 NR Description: hypothetical protein F15I1.11 [imported] -
MLLIPSFTANSNEPPPSKLSLSDLSMAILKSHFFLLFPLLLLHFHTVSFAQTLFVFGDGLYDAGNKQFLSQNRVDASFPPYGVTVGQATGRWSDGSIVPDYLAKFMGIPKISPILLTTADFSHGANFAIADATVLGSPPETMTLSQQVKKFSENKNKWTNQTRSEAIYLIYIGSDDYLSYAKSNPSPSDTQKQAFVDQVITTIKAEIKVVYGSGGRKFAFQNLAPLGCLPAVKQASGNVQECVKLPSEMAALHNKKLLQLLVELSRELNGFQYSFYDFFSSIQNRVIKSKTYTFETGNAACCGTGSINGSNCSAKNVCAKPEEYIFFDGKHLTQEANLQVGHLMWGADPEVIGPNNIRELMVLPLDITVILAGIQEAMAAMRPRQSNIESLYDIKKMESEMDNHWLYQVDKAISFMI

SEQ ID NO: 25251 - protein, 392 aa, Arabidopsis thaliana
  peptide (1)..(392): Ceres Seq. ID no. 12330662
  misc_feature (28)..(319): Pfam Name: GDSL-like Lipase/Acylhydrolase Pfam Description: GDSL-like Lipase/Acylhydrolase
  misc_feature (28)..(341): Homolog of NCBI NO: 15221019 NR Description: myrosinase-associated protein, putative
  misc_feature (28)..(364): Homolog of NCBI NO: 25336315 NR Description: hypothetical protein F15I1.9 [imported] -
  misc_feature (28)..(341): Homolog of NCBI NO: 21592973 NR Description: myrosinase-associated protein, putative
  misc_feature (28)..(361): Homolog of NCBI NO: 21618218 NR Description: myrosinase-associated protein, putative
  misc_feature (28)..(361): Homolog of NCBI NO: 18404748 NR Description: myrosinase-associated protein, putative
  misc_feature (28)..(344): Homolog of NCBI NO: 15450435 NR Description: AT3g14210/MAG2_18 [Arabidopsis thaliana]
  misc_feature (28)..(344): Homolog of NCBI NO: 15231805 NR Description: myrosinase-associated protein, putative
  misc_feature (1)..(392): Homolog of NCBI NO: 21593567 NR Description: myrosinase-associated protein, putative
  misc_feature (1)..(392): Homolog of NCBI NO: 15221023 NR Description: myrosinase-associated protein, putative
  misc_feature (1)..(392): Homolog of NCBI NO: 25405684 NR Description: hypothetical protein F15I1.11 [imported] -
MAILKSHFFLLFPLLLLHFHTVSFAQTLFVFGDGLYDAGNKQFLSQNRVDASFPPYGVTVGQATGRWSDGSIVPDYLAKFMGIPKISPILLTTADFSHGANFAIADATVLGSPPETMTLSQQVKKFSENKNKWTNQTRSEAIYLIYIGSDDYLSYAKSNPSPSDTQKQAFVDQVITTIKAEIKVVYGSGGRKFAFQNLAPLGCLPAVKQASGNVQECVKLPSEMAALHNKKLLQLLVELSRELNGFQYSFYDFFSSIQNRVIKSKTYTFETGNAACCGTGSINGSNCSAKNVCAKPEEYIFFDGKHLTQEANLQVGHLMWGADPEVIGPNNIRELMVLPLDITVILAGIQEAMAAMRPRQSNIESLYDIKKMESEMDNHWLYQVDKAISFMI

SEQ ID NO: 25252 - protein, 312 aa, Arabidopsis thaliana
  peptide (1)..(312): Ceres Seq. ID no. 12330663
  misc_feature (1)..(239): Pfam Name: GDSL-like Lipase/Acylhydrolase Pfam Description: GDSL-like Lipase/Acylhydrolase
  misc_feature (1)..(261): Homolog of NCBI NO: 15221019 NR Description: myrosinase-associated protein, putative
  misc_feature (1)..(284): Homolog of NCBI NO: 25336315 NR Description: hypothetical protein F15I1.9 [imported] -
  misc_feature (1)..(261): Homolog of NCBI NO: 21592973 NR Description: myrosinase-associated protein, putative
  misc_feature (1)..(281): Homolog of NCBI NO: 21618218 NR Description: myrosinase-associated protein, putative
  misc_feature (1)..(281): Homolog of NCBI NO: 18404748 NR Description: myrosinase-associated protein, putative
  misc_feature (1)..(264): Homolog of NCBI NO: 15450435 NR Description: AT3g14210/MAG2_18 [Arabidopsis thaliana]
  misc_feature (1)..(264): Homolog of NCBI NO: 15231805 NR Description: myrosinase-associated protein, putative
  misc_feature (1)..(312): Homolog of NCBI NO: 21593567 NR Description: myrosinase-associated protein, putative
  misc_feature (1)..(312): Homolog of NCBI NO: 15221023 NR Description: myrosinase-associated protein, putative
  misc_feature (1)..(312): Homolog of NCBI NO: 25405684 NR Description: hypothetical protein F15I1.11 [imported] -
MGIPKISPILLTTADFSHGANFAIADATVLGSPPETMTLSQQVKKFSENKNKWTNQTRSEAIYLIYIGSDDYLSYAKSNPSPSDTQKQAFVDQVITTIKAEIKVVYGSGGRKFAFQNLAPLGCLPAVKQASGNVQECVKLPSEMAALHNKKLLQLLVELSRELNGFQYSFYDFFSSIQNRVIKSKTYTFETGNAACCGTGSINGSNCSAKNVCAKPEEYIFFDGKHLTQEANLQVGHLMWGADPEVIGPNNIRELMVLPLDITVILAGIQEAMAAMRPRQSNIESLYDIKKMESEMDNHWLYQVDKAISFMI

SEQ ID NO: 25253 - DNA, 1230 bp, Arabidopsis thaliana
  misc_feature (1)..(1230): Ceres Seq. ID no. 12335445
  misc_feature: MA Experiment ID: 108595 Result: Down-regulated in Transcription
  misc_feature: MA Experiment 108595 PARAMETER Experiment Name: At_Ler-pi_Ovule_cDNA_P Parameter: Plant Line Value: null
  misc_feature: MA Experiment ID: 20000071 Result: Up-regulated in Transcription
  misc_feature: MA Experiment 20000071 PARAMETER Experiment Name: At_100uM_ABA_Mutants_cDNA_P Parameter: Plant Line Value: CS8104
  misc_feature: MA Experiment 20000071 PARAMETER Experiment Name: At_100uM_ABA_Mutants_cDNA_P Parameter: Timepoint (hr) Value: 6
  misc_feature: MA Experiment 20000071 PARAMETER Experiment Name: At_100uM_ABA_Mutants_cDNA_P Parameter: Tissue Value: Aerial
  misc_feature: MA Experiment 20000071 PARAMETER Experiment Name: At_100uM_ABA_Mutants_cDNA_P Parameter: Treatment Value: 100uM ABA vs. No Treatment
  misc_feature: MA Experiment ID: 20000113 Result: Down-regulated in Transcription
  misc_feature: MA Experiment 20000113 PARAMETER Experiment Name: At_42deg_Heat_cDNA_P Parameter: Temperature (deg C) Value: 42 vs. 22
  misc_feature: MA Experiment 20000113 PARAMETER Experiment Name: At_42deg_Heat_cDNA_P Parameter: Timepoint (hr) Value: 8
  misc_feature: MA Experiment 20000113 PARAMETER Experiment Name: At_42deg_Heat_cDNA_P Parameter: Tissue Value: Aerial
ttttggtgaatcgattgttctcctttcttcgatatcgaattagggtttctgtagaatccagtttttgataggaacaatgtcaatttcggtggttgatagcagtctctgccatccgactgcgtcgtttccgtcatccatggttcattctaatcgattctcgaagagaatatcagggaacgggaattgggttcgcgaaaggagaagactttatgtgaaatcgagtaactcagaaggtaaaaaggaggaagcagcacagaaatcgagcagtaataatacatctagcttcttgtcttttctctgtccattgcttaaagctttctctggaggtgatccttctcaacagcggaatcatgctctcgaggttgcaacttcttcattggcatctgttgcaagacttccatggggatctcgagtatcaactgggagtatagataaccaggatgtctcttctaatccgcctttgcgattgcagctttttgaatttgaggcatgtcccttttgtcggagagtgcgggaagccatgactgagctagacctttcagtagaagtttatccttgtcctaaaggatctataagacacagagaactggttagaagatctggcggaaaagagatgtttccatttctcgtcgacccgaatactgaaactttaatgtatgagagtggtgacatcgtaaagtacctatttaaacaatatggaaatggaagaggcccttccacaggacttctggaaagcaccttgttcactggatggatgccaactcttctccgagcaggtagaggcatgtcattgtgggataaggcttcaacagatctgccacctaaaatgctcgagctcttctcttacgaaaacaacccgtattcacggttggtgcgtgaagcactgtgtgagctggagcttccctatgtattacacaacattggagaagggtccacacggatgaaatcacttctaaatgcttcaggatccaataaggttccattcttggttgatccaaacaccggtgtccaattaggtgattacgagaagattctggcttacctcttcaagacatattcttcagcagcatctgcatagtccatagaacctatacatcattattcccaaggtacaagcttttgagtccacatgttttaacaatactgagaaactggttgacatggaagttacatacatggtcaaaatctgaacttttgaatatatgatgagtcggtaggtatcgcaagttg

SEQ ID NO: 25254 - protein, 333 aa, Arabidopsis thaliana
  peptide (1)..(333): Ceres Seq. ID no. 12335446
  misc_feature (131)..(210): Homolog of NCBI NO: 15791116 NR Description: Vng2310h [Halobacterium sp. NRC-1]
  misc_feature (133)..(207): Homolog of NCBI NO: 28900404 NR Description: hypothetical protein [Vibrio parahaemolyticus
  misc_feature (133)..(207): Homolog of NCBI NO: 27366955 NR Description: Glutaredoxin [Vibrio vulnificus CMCP6]
  misc_feature (92)..(245): Homolog of NCBI NO: 15488040 NR Description: unknown [Photobacterium profundum]
  misc_feature (123)..(329): Homolog of NCBI NO: 11282317 NR Description: hypothetical protein F8F6.90 - Arabidopsis
  misc_feature (123)..(329): Homolog of NCBI NO: 21593275 NR Description: unknown [Arabidopsis thaliana]
  misc_feature (123)..(329): Homolog of NCBI NO: 18414386 NR Description: auxin-regulated protein
  misc_feature (1)..(333): Homolog of NCBI NO: 7487730 NR Description: hypothetical protein T5L19.130 - Arabidopsis
  misc_feature (1)..(333): Homolog of NCBI NO: 18413285 NR Description: putative protein
  misc_feature (1)..(333): Homolog of NCBI NO: 21593568 NR Description: unknown [Arabidopsis thaliana]
MSISVVDSSLCHPTASFPSSMVHSNRFSKRISGNGNWVRERRRLYVKSSNSEGKKEEAAQKSSSNNTSSFLSFLCPLLKAFSGGDPSQQRNHALEVATSSLASVARLPWGSRVSTGSIDNQDVSSNPPLRLQLFEFEACPFCRRVREAMTELDLSVEVYPCPKGSIRHRELVRRSGGKEMFPFLVDPNTETLMYESGDIVKYLFKQYGNGRGPSTGLLESTLFTGWMPTLLRAGRGMSLWDKASTDLPPKMLELFSYENNPYSRLVREALCELELPYVLHNIGEGSTRMKSLLNASGSNKVPFLVDPNTGVQLGDYEKILAYLFKTYSSAASA

SEQ ID NO: 25255 - protein, 313 aa, Arabidopsis thaliana
  peptide (1)..(313): Ceres Seq. ID no. 12335447
  misc_feature (111)..(190): Homolog of NCBI NO: 15791116 NR Description: Vng2310h [Halobacterium sp. NRC-1]
  misc_feature (113)..(187): Homolog of NCBI NO: 28900404 NR Description: hypothetical protein [Vibrio parahaemolyticus
  misc_feature (113)..(187): Homolog of NCBI NO: 27366955 NR Description: Glutaredoxin [Vibrio vulnificus CMCP6]
  misc_feature (72)..(225): Homolog of NCBI NO: 15488040 NR Description: unknown [Photobacterium profundum]
  misc_feature (103)..(309): Homolog of NCBI NO: 11282317 NR Description: hypothetical protein F8F6.90 - Arabidopsis
  misc_feature (103)..(309): Homolog of NCBI NO: 21593275 NR Description: unknown [Arabidopsis thaliana]
  misc_feature (103)..(309): Homolog of NCBI NO: 18414386 NR Description: auxin-regulated protein
  misc_feature (1)..(313): Homolog of NCBI NO: 7487730 NR Description: hypothetical protein T5L19.130 - Arabidopsis
  misc_feature (1)..(313): Homolog of NCBI NO: 18413285 NR Description: putative protein
  misc_feature (1)..(313): Homolog of NCBI NO: 21593568 NR Description: unknown [Arabidopsis thaliana]
MVHSNRFSKRISGNGNWVRERRRLYVKSSNSEGKKEEAAQKSSSNNTSSFLSFLCPLLKAFSGGDPSQQRNHALEVATSSLASVARLPWGSRVSTGSIDNQDVSSNPPLRLQLFEFEACPFCRRVREAMTELDLSVEVYPCPKGSIRHRELVRRSGGKEMFPFLVDPNTETLMYESGDIVKYLFKQYGNGRGPSTGLLESTLFTGWMPTLLRAGRGMSLWDKASTDLPPKMLELFSYENNPYSRLVREALCELELPYVLHNIGEGSTRMKSLLNASGSNKVPFLVDPNTGVQLGDYEKILAYLFKTYSSAASA

SEQ ID NO: 25256 - protein, 185 aa, Arabidopsis thaliana
  peptide (1)..(185): Ceres Seq. ID no. 12335448
  misc_feature (1)..(62): Homolog of NCBI NO: 15791116 NR Description: Vng2310h [Halobacterium sp. NRC-1]
  misc_feature (1)..(59): Homolog of NCBI NO: 28900404 NR Description: hypothetical protein [Vibrio parahaemolyticus
  misc_feature (1)..(59): Homolog of NCBI NO: 27366955 NR Description: Glutaredoxin [Vibrio vulnificus CMCP6]
  misc_feature (1)..(97): Homolog of NCBI NO: 15488040 NR Description: unknown [Photobacterium profundum]
  misc_feature (1)..(181): Homolog of NCBI NO: 11282317 NR Description: hypothetical protein F8F6.90 - Arabidopsis
  misc_feature (1)..(181): Homolog of NCBI NO: 21593275 NR Description: unknown [Arabidopsis thaliana]
  misc_feature (1)..(181): Homolog of NCBI NO: 18414386 NR Description: auxin-regulated protein
  misc_feature (1)..(185): Homolog of NCBI NO: 7487730 NR Description: hypothetical protein T5L19.130 - Arabidopsis
  misc_feature (1)..(185): Homolog of NCBI NO: 18413285 NR Description: putative protein
  misc_feature (1)..(185): Homolog of NCBI NO: 21593568 NR Description: unknown [Arabidopsis thaliana]
MTELDLSVEVYPCPKGSIRHRELVRRSGGKEMFPFLVDPNTETLMYESGDIVKYLFKQYGNGRGPSTGLLESTLFTGWMPTLLRAGRGMSLWDKASTDLPPKMLELFSYENNPYSRLVREALCELELPYVLHNIGEGSTRMKSLLNASGSNKVPFLVDPNTGVQLGDYEKILAYLFKTYSSAASA

SEQ ID NO: 25257 - DNA, 1150 bp, Arabidopsis thaliana
  misc_feature (1)..(1150): Ceres Seq. ID no. 12371236
  misc_feature: MA Experiment ID: 108434 Result: Down-regulated in Transcription
  misc_feature: MA Experiment 108434 PARAMETER Experiment Name: At_Root_Tips_cDNA_P Parameter: Tissue Value: Root Tips
  misc_feature: MA Experiment ID: 108473 Result: Down-regulated in Transcription
  misc_feature: MA Experiment 108473 PARAMETER Experiment Name: At_Drought_Flowers_cDNA_P Parameter: Timepoint (hr) Value: 7 d
  misc_feature: MA Experiment 108473 PARAMETER Experiment Name: At_Drought_Flowers_cDNA_P Parameter: Tissue Value: Flower
  misc_feature: MA Experiment 108473 PARAMETER Experiment Name: At_Drought_Flowers_cDNA_P Parameter: Treatment Value: Drought vs. No Drought
  misc_feature: MA Experiment ID: 108572 Result: Up-regulated in Transcription
  misc_feature: MA Experiment 108572 PARAMETER Experiment Name: At_Drought_cDNA_P Parameter: Timepoint (hr) Value: 1
  misc_feature: MA Experiment 108572 PARAMETER Experiment Name: At_Drought_cDNA_P Parameter: Tissue Value: Aerial
  misc_feature: MA Experiment 108572 PARAMETER Experiment Name: At_Drought_cDNA_P Parameter: Treatment Value: Drought vs. No Drought
  misc_feature: MA Experiment ID: 108594 Result: Down-regulated in Transcription
  misc_feature: MA Experiment 108594 PARAMETER Experiment Name: At_Ler-rhl_Root_cDNA_P Parameter: Plant Line Value: null
  misc_feature: MA Experiment ID: 108607 Result: Up-regulated in Transcription
  misc_feature: MA Experiment 108607 PARAMETER Experiment Name: At_100uM_ABA_cDNA_P Parameter: Timepoint (hr) Value: 4
  misc_feature: MA Experiment 108607 PARAMETER Experiment Name: At_100uM_ABA_cDNA_P Parameter: Tissue Value: Aerial
  misc_feature: MA Experiment 108607 PARAMETER Experiment Name: At_100uM_ABA_cDNA_P Parameter: Treatment Value: 100uM ABA vs. No Treatment
  misc_feature: MA Experiment ID: 20000090 Result: Down-regulated in Transcription
  misc_feature: MA Experiment ID: 20000111 Result: Down-regulated in Transcription
  misc_feature: MA Experiment 20000111 PARAMETER Experiment Name: At_42deg_Heat_cDNA_P Parameter: Temperature (deg C) Value: 42 vs. 22
  misc_feature: MA Experiment 20000111 PARAMETER Experiment Name: At_42deg_Heat_cDNA_P Parameter: Timepoint (hr) Value: 6
  misc_feature: MA Experiment 20000111 PARAMETER Experiment Name: At_42deg_Heat_cDNA_P Parameter: Tissue Value: Aerial
  misc_feature: MA Experiment ID: 20000112 Result: Down-regulated in Transcription
  misc_feature: MA Experiment 20000112 PARAMETER Experiment Name: At_42deg_Heat_cDNA_P Parameter: Temperature (deg C) Value: 42 vs. 22
  misc_feature: MA Experiment 20000112 PARAMETER Experiment Name: At_42deg_Heat_cDNA_P Parameter: Timepoint (hr) Value: 2
  misc_feature: MA Experiment 20000112 PARAMETER Experiment Name: At_42deg_Heat_cDNA_P Parameter: Tissue Value: Aerial
  misc_feature: MA Experiment ID: 20000113 Result: Down-regulated in Transcription
  misc_feature: MA Experiment 20000113 PARAMETER Experiment Name: At_42deg_Heat_cDNA_P Parameter: Temperature (deg C) Value: 42 vs. 22
  misc_feature: MA Experiment 20000113 PARAMETER Experiment Name: At_42deg_Heat_cDNA_P Parameter: Timepoint (hr) Value: 8
  misc_feature: MA Experiment 20000113 PARAMETER Experiment Name: At_42deg_Heat_cDNA_P Parameter: Tissue Value: Aerial
  misc_feature: MA Experiment ID: 20000117 Result: Down-regulated in Transcription
  misc_feature: MA Experiment 20000117 PARAMETER Experiment Name: At_100uM_ABA_Mutants_cDNA_P Parameter: Plant Line Value: Columbia
  misc_feature: MA Experiment 20000117 PARAMETER Experiment Name: At_100uM_ABA_Mutants_cDNA_P Parameter: Timepoint (hr) Value: 6
  misc_feature: MA Experiment 20000117 PARAMETER Experiment Name: At_100uM_ABA_Mutants_cDNA_P Parameter: Tissue Value: Aerial
  misc_feature: MA Experiment 20000117 PARAMETER Experiment Name: At_100uM_ABA_Mutants_cDNA_P Parameter: Treatment Value: 100uM ABA vs. No Treatment
  misc_feature: MA Experiment ID: 20000234 Result: Up-regulated in Transcription
  misc_feature: MA Experiment 20000234 PARAMETER Experiment Name: At_Siliques_P Parameter: Age (day) Value: 21
  misc_feature: MA Experiment 20000234 PARAMETER Experiment Name: At_Siliques_P Parameter: Organism Value: A. thaliana
  misc_feature: MA Experiment 20000234 PARAMETER Experiment Name: At_Siliques_P Parameter: Plant Line Value: WS
  misc_feature: MA Experiment 20000234 PARAMETER Experiment Name: At_Siliques_P Parameter: Tissue Value: Less Than 5mm Siliques vs. Whole Plant
  misc_feature: MA Experiment ID: 20000235 Result: Up-regulated in Transcription
  misc_feature: MA Experiment 20000235 PARAMETER Experiment Name: At_Siliques_P Parameter: Age (day) Value: 21
  misc_feature: MA Experiment 20000235 PARAMETER Experiment Name: At_Siliques_P Parameter: Organism Value: A. thaliana
  misc_feature: MA Experiment 20000235 PARAMETER Experiment Name: At_Siliques_P Parameter: Plant Line Value: WS
  misc_feature: MA Experiment 20000235 PARAMETER Experiment Name: At_Siliques_P Parameter: Tissue Value: 5-10mm Siliques vs. Whole Plant
  misc_feature: MA Experiment ID: 20000265 Result: Up-regulated in Transcription
  misc_feature: MA Experiment 20000265 PARAMETER Experiment Name: At_Open_Flower_P Parameter: Age (day) Value: 21
  misc_feature: MA Experiment 20000265 PARAMETER Experiment Name: At_Open_Flower_P Parameter: Plant Line Value: WS
  misc_feature: MA Experiment 20000265 PARAMETER Experiment Name: At_Open_Flower_P Parameter: Tissue Value: Closed Flower vs. Whole Plant
  misc_feature: MA Experiment ID: 20000286 Result: Up-regulated in Transcription
  misc_feature: MA Experiment 20000286 PARAMETER Experiment Name: At_Open_Flower_P Parameter: Age (day) Value: 21
  misc_feature: MA Experiment 20000286 PARAMETER Experiment Name: At_Open_Flower_P Parameter: Plant Line Value: WS
  misc_feature: MA Experiment 20000286 PARAMETER Experiment Name: At_Open_Flower_P Parameter: Tissue Value: Half Open vs. Whole Plant
  misc_feature: MA Experiment ID: 20000495 Result: Down-regulated in Transcription
  misc_feature: MA Experiment 20000495 PARAMETER Experiment Name: At_Guard_Cells_P Parameter: Harvest Date Value: 8/2/2002
  misc_feature: MA Experiment 20000495 PARAMETER Experiment Name: At_Guard_Cells_P Parameter: Organism Value: A. thaliana
  misc_feature: MA Experiment 20000495 PARAMETER Experiment Name: At_Guard_Cells_P Parameter: Tissue Value: Guard Cells vs. Leaves
  misc_feature: MA Experiment ID: 20000794 Result: Down-regulated in Transcription
  misc_feature: MA Experiment 20000794 PARAMETER Experiment Name: At_Petals_P Parameter: Age (day) Value: 23-25 days
  misc_feature: MA Experiment 20000794 PARAMETER Experiment Name: At_Petals_P Parameter: Plant Line Value: WS
  misc_feature: MA Experiment 20000794 PARAMETER Experiment Name: At_Petals_P Parameter: Tissue Value: Petals vs. Whole plant
  misc_feature: MA Experiment ID: 20001248 Result: Down-regulated in Transcription
  misc_feature: MA Experiment 20001248 PARAMETER Experiment Name: At_Far-red-induction_P Parameter: Age (day) Value: 7
  misc_feature: MA Experiment 20001248 PARAMETER Experiment Name: At_Far-red-induction_P Parameter: Light Value: Far-red vs. White
  misc_feature: MA Experiment 20001248 PARAMETER Experiment Name: At_Far-red-induction_P Parameter: Organism Value: A. thaliana
  misc_feature: MA Experiment 20001248 PARAMETER Experiment Name: At_Far-red-induction_P Parameter: Plant Line Value: Columbia
  misc_feature: MA Experiment 20001248 PARAMETER Experiment Name: At_Far-red-induction_P Parameter: Timepoint (hr) Value: 4
  misc_feature: MA Experiment 20001248 PARAMETER Experiment Name: At_Far-red-induction_P Parameter: Tissue Value: Whole Plant
  misc_feature: MA Experiment ID: 20001450 Result: Down-regulated in Transcription
  misc_feature: MA Experiment 20001450 PARAMETER Experiment Name: At_Far-red-induction_P Parameter: Age (day) Value: 7
  misc_feature: MA Experiment 20001450 PARAMETER Experiment Name: At_Far-red-induction_P Parameter: Light Value: Far-red vs. White
  misc_feature: MA Experiment 20001450 PARAMETER Experiment Name: At_Far-red-induction_P Parameter: Organism Value: A. thaliana
  misc_feature: MA Experiment 20001450 PARAMETER Experiment Name: At_Far-red-induction_P Parameter: Plant Line Value: Columbia
  misc_feature: MA Experiment 20001450 PARAMETER Experiment Name: At_Far-red-induction_P Parameter: Timepoint (hr) Value: 8
  misc_feature: MA Experiment 20001450 PARAMETER Experiment Name: At_Far-red-induction_P Parameter: Tissue Value: Whole Plant
  misc_feature: MA Experiment ID: 20001451 Result: Down-regulated in Transcription
  misc_feature: MA Experiment 20001451 PARAMETER Experiment Name: At_Far-red-induction_P Parameter: Age (day) Value: 7
  misc_feature: MA Experiment 20001451 PARAMETER Experiment Name: At_Far-red-induction_P Parameter: Light Value: Far-red vs. White
  misc_feature: MA Experiment 20001451 PARAMETER Experiment Name: At_Far-red-induction_P Parameter: Organism Value: A. thaliana
  misc_feature: MA Experiment 20001451 PARAMETER Experiment Name: At_Far-red-induction_P Parameter: Plant Line Value: Columbia
  misc_feature: MA Experiment 20001451 PARAMETER Experiment Name: At_Far-red-induction_P Parameter: Timepoint (hr) Value: 24
  misc_feature: MA Experiment 20001451 PARAMETER Experiment Name: At_Far-red-induction_P Parameter: Tissue Value: Whole Plant
  misc_feature: MA Experiment ID: 20001557 Result: Up-regulated in Transcription
  misc_feature: MA Experiment 20001557 PARAMETER Experiment Name: At_Drought_Soil_Dry_P Parameter: Age (day) Value: 27
  misc_feature: MA Experiment 20001557 PARAMETER Experiment Name: At_Drought_Soil_Dry_P Parameter: Organism Value: A. thaliana
  misc_feature: MA Experiment 20001557 PARAMETER Experiment Name: At_Drought_Soil_Dry_P Parameter: Plant Line Value: WS
  misc_feature: MA Experiment 20001557 PARAMETER Experiment Name: At_Drought_Soil_Dry_P Parameter: Post Timepoint (hr) Value: 3
  misc_feature: MA Experiment 20001557 PARAMETER Experiment Name: At_Drought_Soil_Dry_P Parameter: Post-Treatment Value: Re-Water vs. No Drought
  misc_feature: MA Experiment 20001557 PARAMETER Experiment Name: At_Drought_Soil_Dry_P Parameter: Timepoint (day) Value: 13
  misc_feature: MA Experiment 20001557 PARAMETER Experiment Name: At_Drought_Soil_Dry_P Parameter: Treatment Value: Drought vs. No Drought
  misc_feature: MA Experiment ID: 20001560 Result: Up-regulated in Transcription
  misc_feature: MA Experiment 20001560 PARAMETER Experiment Name: At_Drought_Soil_Dry_P Parameter: Age (day) Value: 28
  misc_feature: MA Experiment 20001560 PARAMETER Experiment Name: At_Drought_Soil_Dry_P Parameter: Organism Value: A. thaliana
  misc_feature: MA Experiment 20001560 PARAMETER Experiment Name: At_Drought_Soil_Dry_P Parameter: Plant Line Value: WS
  misc_feature: MA Experiment 20001560 PARAMETER Experiment Name: At_Drought_Soil_Dry_P Parameter: Post Timepoint (hr) Value: None
  misc_feature: MA Experiment 20001560 PARAMETER Experiment Name: At_Drought_Soil_Dry_P Parameter: Post-Treatment Value: None
  misc_feature: MA Experiment 20001560 PARAMETER Experiment Name: At_Drought_Soil_Dry_P Parameter: Timepoint (day) Value: 14
  misc_feature: MA Experiment 20001560 PARAMETER Experiment Name: At_Drought_Soil_Dry_P Parameter: Treatment Value: Drought vs. No Drought
  misc_feature: MA Experiment ID: 20001911 Result: Down-regulated in Transcription
  misc_feature: MA Experiment 20001911 PARAMETER Experiment Name: At_Drought_Reproduction_P Parameter: Age (day) Value: 40
  misc_feature: MA Experiment 20001911 PARAMETER Experiment Name: At_Drought_Reproduction_P Parameter: Organism Value: A. thaliana
  misc_feature: MA Experiment 20001911 PARAMETER Experiment Name: At_Drought_Reproduction_P Parameter: Plant Line Value: WS
  misc_feature: MA Experiment 20001911 PARAMETER Experiment Name: At_Drought_Reproduction_P Parameter: Timepoint (day) Value: 10
  misc_feature: MA Experiment 20001911 PARAMETER Experiment Name: At_Drought_Reproduction_P Parameter: Tissue Value: Flowers
  misc_feature: MA Experiment 20001911 PARAMETER Experiment Name: At_Drought_Reproduction_P Parameter: Treatment Value: Drought vs. No Drought
ttataaagaaaaacacggatcttggaattatctttaaaatcatcttgtgaatacagcaaattgggaaatatgagaaaaggattctctcaagaagaagcttctcctcgtctagacagacttatgttcgataagataaaagaagcattaggaggaagagctcatatgttgttatcaggagcagcgcctctacctcgtcatgtagaggagttcttgagaatcattcctgcctctaatctctctcaaggttatggattgactgagagttgtgggggaagcttcacgaccttagccggagtattttctatggtggggacagtgggtgtgccaatgcccacggtggaggcaaggctagtgtccgtaccagagatgggttacgacgccttttccgctgacgtgccgagaggagagatttgtcttagaggaaattcaatgttttctggttaccataaaagacaagatctaactgatcaagtcctaatcgatggatggttccacacaggagatattggagaatggcaagaagatggatcaatgaagatcatcgataggaagaagaacatcttcaagttgtctcaaggtgaatatgttgctgttgaaaacctcgaaaacacttactcaagatgtcccctcattgctcagatatgggtctatggcaacagcttcgagtcatttttggtaggtgtggttgtacctgatagaaaagctattgaagattgggctaaactcaattaccaatctcccaatgatttcgaatctctatgtcaaaatctcaaagctcaaaaatacttcttggatgagcttaactctaccgcaaagcaatatcaacttaaaggatttgaaatgttaaaagctattcatttagaaccaaacccttttgatattgaaagagatcttattactccaactttcaagctgaaaaggccacagctcctccaacattacaagggcatagttgatcaactttattcagaagcaaagaggtccatggcatagataattagatacctatcggctattcattttctgatgctatttgggtttgtatgatagtatgttacaaaattgtgttcggatcctctcatcatgtgattcttgttacactaaatttatagtttggaaactatatatatactattaagcaacgtttact

SEQ ID NO: 25258 - protein, 307 aa, Arabidopsis thaliana
  peptide (1)..(307): Ceres Seq. ID no. 12371237
  misc_feature (1)..(193): Pfam Name: AMP-binding enzyme Pfam Description: AMP-binding enzyme
  misc_feature (1)..(303): Homolog of NCBI NO: 34898260 NR Description: similar to long-chain-fatty-acid--CoA ligase 1
  misc_feature (1)..(298): Homolog of NCBI NO: 7437841 NR Description: probable long-chain-fatty-acid-CoA ligase (EC
  misc_feature (1)..(307): Homolog of NCBI NO: 15236634 NR Description: acyl-CoA synthetase - like protein
  misc_feature (1)..(307): Homolog of NCBI NO: 7437845 NR Description: probable long-chain-fatty-acid-CoA ligase (EC
  misc_feature (1)..(307): Homolog of NCBI NO: 20805871 NR Description: long chain acyl-CoA synthetase 5 [Arabidopsis
  misc_feature (1)..(301): Homolog of NCBI NO: 15217631 NR Description: acyl-CoA synthetase, putative
  misc_feature (1)..(307): Homolog of NCBI NO: 15237023 NR Description: putative acyl-CoA synthetase
  misc_feature (1)..(303): Homolog of NCBI NO: 34911190 NR Description: putative acyl-CoA synthetase
  misc_feature (1)..(307): Homolog of NCBI NO: 7437844 NR Description: probable long-chain-fatty-acid-CoA ligase (EC
  misc_feature (1)..(307): Homolog of NCBI NO: 22330132 NR Description: acyl CoA synthetase, putative
MRKGFSQEEASPRLDRLMFDKIKEALGGRAHMLLSGAAPLPRHVEEFLRIIPASNLSQGYGLTESCGGSFTTLAGVFSMVGTVGVPMPTVEARLVSVPEMGYDAFSADVPRGEICLRGNSMFSGYHKRQDLTDQVLIDGWFHTGDIGEWQEDGSMKIIDRKKNIFKLSQGEYVAVENLENTYSRCPLIAQIWVYGNSFESFLVGVVVPDRKAIEDWAKLNYQSPNDFESLCQNLKAQKYFLDELNSTAKQYQLKGFEMLKAIHLEPNPFDIERDLITPTFKLKRPQLLQHYKGIVDQLYSEAKRSMA

SEQ ID NO: 25259 - protein, 290 aa, Arabidopsis thaliana
  peptide (1)..(290): Ceres Seq. ID no. 12371238
  misc_feature (1)..(176): Pfam Name: AMP-binding enzyme Pfam Description: AMP-binding enzyme
  misc_feature (1)..(290): Homolog of NCBI NO: 15236634 NR Description: acyl-CoA synthetase - like protein
  misc_feature (1)..(290): Homolog of NCBI NO: 7437845 NR Description: probable long-chain-fatty-acid-CoA ligase (EC
  misc_feature (1)..(290): Homolog of NCBI NO: 20805871 NR Description: long chain acyl-CoA synthetase 5 [Arabidopsis
  misc_feature (1)..(284): Homolog of NCBI NO: 15217631 NR Description: acyl-CoA synthetase, putative
  misc_feature (1)..(286): Homolog of NCBI NO: 34898260 NR Description: similar to long-chain-fatty-acid--CoA ligase 1
  misc_feature (1)..(281): Homolog of NCBI NO: 7437841 NR Description: probable long-chain-fatty-acid-CoA ligase (EC
  misc_feature (1)..(290): Homolog of NCBI NO: 15237023 NR Description: putative acyl-CoA synthetase
  misc_feature (1)..(286): Homolog of NCBI NO: 34911190 NR Description: putative acyl-CoA synthetase
  misc_feature (1)..(290): Homolog of NCBI NO: 7437844 NR Description: probable long-chain-fatty-acid-CoA ligase (EC
  misc_feature (1)..(290): Homolog of NCBI NO: 22330132 NR Description: acyl CoA synthetase, putative
MFDKIKEALGGRAHMLLSGAAPLPRHVEEFLRIIPASNLSQGYGLTESCGGSFTTLAGVFSMVGTVGVPMPTVEARLVSVPEMGYDAFSADVPRGEICLRGNSMFSGYHKRQDLTDQVLIDGWFHTGDIGEWQEDGSMKIIDRKKNIFKLSQGEYVAVENLENTYSRCPLIAQIWVYGNSFESFLVGVVVPDRKAIEDWAKLNYQSPNDFESLCQNLKAQKYFLDELNSTAKQYQLKGFEMLKAIHLEPNPFDIERDLITPTFKLKRPQLLQHYKGIVDQLYSEAKRSMA

SEQ ID NO: 25260 - protein, 276 aa, Arabidopsis thaliana
  peptide (1)..(276): Ceres Seq. ID no. 12371239
  misc_feature (1)..(162): Pfam Name: AMP-binding enzyme Pfam Description: AMP-binding enzyme
  misc_feature (1)..(272): Homolog of NCBI NO: 34898260 NR Description: similar to long-chain-fatty-acid--CoA ligase 1
  misc_feature (1)..(267): Homolog of NCBI NO: 7437841 NR Description: probable long-chain-fatty-acid-CoA ligase (EC
  misc_feature (1)..(276): Homolog of NCBI NO: 15236634 NR Description: acyl-CoA synthetase - like protein
  misc_feature (1)..(276): Homolog of NCBI NO: 7437845 NR Description: probable long-chain-fatty-acid-CoA ligase (EC
  misc_feature (1)..(276): Homolog of NCBI NO: 20805871 NR Description: long chain acyl-CoA synthetase 5 [Arabidopsis
  misc_feature (1)..(270): Homolog of NCBI NO: 15217631 NR Description: acyl-CoA synthetase, putative
  misc_feature (1)..(276): Homolog of NCBI NO: 15237023 NR Description: putative acyl-CoA synthetase
  misc_feature (1)..(272): Homolog of NCBI NO: 34911190 NR Description: putative acyl-CoA synthetase
  misc_feature (1)..(276): Homolog of NCBI NO: 7437844 NR Description: probable long-chain-fatty-acid-CoA ligase (EC
  misc_feature (1)..(276): Homolog of NCBI NO: 22330132 NR Description: acyl CoA synthetase, putative
MLLSGAAPLPRHVEEFLRIIPASNLSQGYGLTESCGGSFTTLAGVFSMVGTVGVPMPTVEARLVSVPEMGYDAFSADVPRGEICLRGNSMFSGYHKRQDLTDQVLIDGWFHTGDIGEWQEDGSMKIIDRKKNIFKLSQGEYVAVENLENTYSRCPLIAQIWVYGNSFESFLVGVVVPDRKAIEDWAKLNYQSPNDFESLCQNLKAQKYFLDELNSTAKQYQLKGFEMLKAIHLEPNPFDIERDLITPTFKLKRPQLLQHYKGIVDQLYSEAKRSMA

SEQ ID NO: 25261 - DNA, 1297 bp, Arabidopsis thaliana
  misc_feature (1)..(1297): Ceres Seq. ID no. 12324847
  misc_feature: MA Experiment ID: 108434 Result: Down-regulated in Transcription
  misc_feature: MA Experiment 108434 PARAMETER Experiment Name: At_Root_Tips_cDNA_P Parameter: Tissue Value: Root Tips
  misc_feature: MA Experiment ID: 108461 Result: Up-regulated in Transcription
  misc_feature: MA Experiment 108461 PARAMETER Experiment Name: At_Germinating_Seeds_cDNA_P Parameter: Age (day) Value: 1 vs. 0
  misc_feature: MA Experiment 108461 PARAMETER Experiment Name: At_Germinating_Seeds_cDNA_P Parameter: Tissue Value: Germinating Seeds
  misc_feature: MA Experiment ID: 108462 Result: Up-regulated in Transcription
  misc_feature: MA Experiment 108462 PARAMETER Experiment Name: At_Germinating_Seeds_cDNA_P Parameter: Age (day) Value: 2 vs. 0
  misc_feature: MA Experiment 108462 PARAMETER Experiment Name: At_Germinating_Seeds_cDNA_P Parameter: Tissue Value: Germinating Seeds
  misc_feature: MA Experiment ID: 108463 Result: Up-regulated in Transcription
  misc_feature: MA Experiment 108463 PARAMETER Experiment Name: At_Germinating_Seeds_cDNA_P Parameter: Age (day) Value: 3 vs. 0
  misc_feature: MA Experiment 108463 PARAMETER Experiment Name: At_Germinating_Seeds_cDNA_P Parameter: Tissue Value: Germinating Seeds
  misc_feature: MA Experiment ID: 108464 Result: Up-regulated in Transcription
  misc_feature: MA Experiment 108464 PARAMETER Experiment Name: At_Germinating_Seeds_cDNA_P Parameter: Age (day) Value: 4 vs. 0
  misc_feature: MA Experiment 108464 PARAMETER Experiment Name: At_Germinating_Seeds_cDNA_P Parameter: Tissue Value: Germinating Seeds
  misc_feature: MA Experiment ID: 108488 Result: Down-regulated in Transcription
  misc_feature: MA Experiment ID: 108489 Result: Up-regulated in Transcription
  misc_feature: MA Experiment ID: 108573 Result: Up-regulated in Transcription
  misc_feature: MA Experiment 108573 PARAMETER Experiment Name: At_Drought_cDNA_P Parameter: Timepoint (hr) Value: 6
  misc_feature: MA Experiment 108573 PARAMETER Experiment Name: At_Drought_cDNA_P Parameter: Tissue Value: Aerial
  misc_feature: MA Experiment 108573 PARAMETER Experiment Name: At_Drought_cDNA_P Parameter: Treatment Value: Drought vs. No Drought
  misc_feature: MA Experiment ID: 108579 Result: Up-regulated in Transcription
  misc_feature: MA Experiment 108579 PARAMETER Experiment Name: At_4deg_Cold_cDNA_P Parameter: Temperature (deg C) Value: 4 vs. 22
  misc_feature: MA Experiment 108579 PARAMETER Experiment Name: At_4deg_Cold_cDNA_P Parameter: Timepoint (hr) Value: 6
  misc_feature: MA Experiment 108579 PARAMETER Experiment Name: At_4deg_Cold_cDNA_P Parameter: Tissue Value: Aerial
  misc_feature: MA Experiment ID: 108585 Result: Up-regulated in Transcription
  misc_feature: MA Experiment 108585 PARAMETER Experiment Name: At_5mM_NaNP_cDNA_P Parameter: Timepoint (hr) Value: 6
  misc_feature: MA Experiment 108585 PARAMETER Experiment Name: At_5mM_NaNP_cDNA_P Parameter: Tissue Value: Aerial
  misc_feature: MA Experiment 108585 PARAMETER Experiment Name: At_5mM_NaNP_cDNA_P Parameter: Treatment Value: null
  misc_feature: MA Experiment ID: 20000179 Result: Up-regulated in Transcription
  misc_feature: MA Experiment 20000179 PARAMETER Experiment Name: At_Germinating_Seeds_P Parameter: Age (hr) Value: 6 vs. 0
  misc_feature: MA Experiment 20000179 PARAMETER Experiment Name: At_Germinating_Seeds_P Parameter: Tissue Value: Germinating Seeds
  misc_feature: MA Experiment ID: 20000180 Result: Up-regulated in Transcription
  misc_feature: MA Experiment 20000180 PARAMETER Experiment Name: At_Germinating_Seeds_P Parameter: Age (hr) Value: 24 vs. 0
  misc_feature: MA Experiment 20000180 PARAMETER Experiment Name: At_Germinating_Seeds_P Parameter: Tissue Value: Germinating Seeds
  misc_feature: MA Experiment ID: 20000213 Result: Up-regulated in Transcription
  misc_feature: MA Experiment 20000213 PARAMETER Experiment Name: At_4deg_Cold_P Parameter: Timepoint (hr) Value: 2
  misc_feature: MA Experiment ID: 20000235 Result: Up-regulated in Transcription
  misc_feature: MA Experiment 20000235 PARAMETER Experiment Name: At_Siliques_P Parameter: Age (day) Value: 21
  misc_feature: MA Experiment 20000235 PARAMETER Experiment Name: At_Siliques_P Parameter: Organism Value: A. thaliana
  misc_feature: MA Experiment 20000235 PARAMETER Experiment Name: At_Siliques_P Parameter: Plant Line Value: WS
  misc_feature: MA Experiment 20000235 PARAMETER Experiment Name: At_Siliques_P Parameter: Tissue Value: 5-10mm Siliques vs. Whole Plant
  misc_feature: MA Experiment ID: 20000438 Result: Down-regulated in Transcription
  misc_feature: MA Experiment 20000438 PARAMETER Experiment Name: At_Shoots__P Parameter: Age (day) Value: 14
  misc_feature: MA Experiment 20000438 PARAMETER Experiment Name: At_Shoots__P Parameter: Tissue Value: Shoots vs. Whole Plant
  misc_feature: MA Experiment ID: 20000451 Result: Down-regulated in Transcription
  misc_feature: MA Experiment 20000451 PARAMETER Experiment Name: At_CS6879_Shoots-Roots_P Parameter: Age (day) Value: 14
  misc_feature: MA Experiment 20000451 PARAMETER Experiment Name: At_CS6879_Shoots-Roots_P Parameter: Organism Value: A. thaliana
  misc_feature: MA Experiment 20000451 PARAMETER Experiment Name: At_CS6879_Shoots-Roots_P Parameter: Plant Line Value: CS6879 vs. WS
  misc_feature: MA Experiment 20000451 PARAMETER Experiment Name: At_CS6879_Shoots-Roots_P Parameter: Tissue Value: Roots
  misc_feature: MA Experiment ID: 20000452 Result: Down-regulated in Transcription
  misc_feature: MA Experiment 20000452 PARAMETER Experiment Name: At_CS6879_Shoots-Roots_P Parameter: Age (day) Value: 14
  misc_feature: MA Experiment 20000452 PARAMETER Experiment Name: At_CS6879_Shoots-Roots_P Parameter: Organism Value: A. thaliana
  misc_feature: MA Experiment 20000452 PARAMETER Experiment Name: At_CS6879_Shoots-Roots_P Parameter: Plant Line Value: CS6879 vs. WS
  misc_feature: MA Experiment 20000452 PARAMETER Experiment Name: At_CS6879_Shoots-Roots_P Parameter: Tissue Value: Shoots
  misc_feature: MA Experiment ID: 20000495 Result: Up-regulated in Transcription
  misc_feature: MA Experiment 20000495 PARAMETER Experiment Name: At_Guard_Cells_P Parameter: Harvest Date Value: 8/2/2002
  misc_feature: MA Experiment 20000495 PARAMETER Experiment Name: At_Guard_Cells_P Parameter: Organism Value: A. thaliana
  misc_feature: MA Experiment 20000495 PARAMETER Experiment Name: At_Guard_Cells_P Parameter: Tissue Value: Guard Cells vs. Leaves
  misc_feature: MA Experiment ID: 20000527 Result: Down-regulated in Transcription
  misc_feature: MA Experiment 20000527 PARAMETER Experiment Name: At_10percent_PEG_P Parameter: Age (day) Value: 20
  misc_feature: MA Experiment 20000527 PARAMETER Experiment Name: At_10percent_PEG_P Parameter: Organism Value: A. thaliana
  misc_feature: MA Experiment 20000527 PARAMETER Experiment Name: At_10percent_PEG_P Parameter: Plant Line Value: WS
  misc_feature: MA Experiment 20000527 PARAMETER Experiment Name: At_10percent_PEG_P Parameter: Timepoint (day) Value: 20
  misc_feature: MA Experiment 20000527 PARAMETER Experiment Name: At_10percent_PEG_P Parameter: Tissue Value: Whole Plant
  misc_feature: MA Experiment 20000527 PARAMETER Experiment Name: At_10percent_PEG_P Parameter: Treatment Value: 10percent PEG vs. No Treatment
  misc_feature: MA Experiment ID: 20001557 Result: Up-regulated in Transcription
  misc_feature: MA Experiment 20001557 PARAMETER Experiment Name: At_Drought_Soil_Dry_P Parameter: Age (day) Value: 27
  misc_feature: MA Experiment 20001557 PARAMETER Experiment Name: At_Drought_Soil_Dry_P Parameter: Organism Value: A. thaliana
  misc_feature: MA Experiment 20001557 PARAMETER Experiment Name: At_Drought_Soil_Dry_P Parameter: Plant Line Value: WS
  misc_feature: MA Experiment 20001557 PARAMETER Experiment Name: At_Drought_Soil_Dry_P Parameter: Post Timepoint (hr) Value: 3
  misc_feature: MA Experiment 20001557 PARAMETER Experiment Name: At_Drought_Soil_Dry_P Parameter: Post-Treatment Value: Re-Water vs. No Drought
  misc_feature: MA Experiment 20001557 PARAMETER Experiment Name: At_Drought_Soil_Dry_P Parameter: Timepoint (day) Value: 13
  misc_feature: MA Experiment 20001557 PARAMETER Experiment Name: At_Drought_Soil_Dry_P Parameter: Treatment Value: Drought vs. No Drought
  misc_feature: MA Experiment ID: 20001904 Result: Up-regulated in Transcription
  misc_feature: MA Experiment 20001904 PARAMETER Experiment Name: At_Drought_Reproduction_P Parameter: Age (day) Value: 37
  misc_feature: MA Experiment 20001904 PARAMETER Experiment Name: At_Drought_Reproduction_P Parameter: Organism Value: A. thaliana
  misc_feature: MA Experiment 20001904 PARAMETER Experiment Name: At_Drought_Reproduction_P Parameter: Plant Line Value: WS
  misc_feature: MA Experiment 20001904 PARAMETER Experiment Name: At_Drought_Reproduction_P Parameter: Timepoint (day) Value: 7
  misc_feature: MA Experiment 20001904 PARAMETER Experiment Name: At_Drought_Reproduction_P Parameter: Tissue Value: Rosettes
  misc_feature: MA Experiment 20001904 PARAMETER Experiment Name: At_Drought_Reproduction_P Parameter: Treatment Value: Drought vs. No Drought
  misc_feature: MA Experiment ID: 20001905 Result: Up-regulated in Transcription
  misc_feature: MA Experiment 20001905 PARAMETER Experiment Name: At_Drought_Reproduction_P Parameter: Age (day) Value: 40
  misc_feature: MA Experiment 20001905 PARAMETER Experiment Name: At_Drought_Reproduction_P Parameter: Organism Value: A. thaliana
  misc_feature: MA Experiment 20001905 PARAMETER Experiment Name: At_Drought_Reproduction_P Parameter: Plant Line Value: WS
  misc_feature: MA Experiment 20001905 PARAMETER Experiment Name: At_Drought_Reproduction_P Parameter: Timepoint (day) Value: 10
  misc_feature: MA Experiment 20001905 PARAMETER Experiment Name: At_Drought_Reproduction_P Parameter: Tissue Value: Rosettes
  misc_feature: MA Experiment 20001905 PARAMETER Experiment Name: At_Drought_Reproduction_P Parameter: Treatment Value: Drought vs. No Drought
  misc_feature: MA Experiment ID: 20001911 Result: Down-regulated in Transcription
  misc_feature: MA Experiment 20001911 PARAMETER Experiment Name: At_Drought_Reproduction_P Parameter: Age (day) Value: 40
  misc_feature: MA Experiment 20001911 PARAMETER Experiment Name: At_Drought_Reproduction_P Parameter: Organism Value: A. thaliana
  misc_feature: MA Experiment 20001911 PARAMETER Experiment Name: At_Drought_Reproduction_P Parameter: Plant Line Value: WS
  misc_feature: MA Experiment 20001911 PARAMETER Experiment Name: At_Drought_Reproduction_P Parameter: Timepoint (day) Value: 10
  misc_feature: MA Experiment 20001911 PARAMETER Experiment Name: At_Drought_Reproduction_P Parameter: Tissue Value: Flowers
  misc_feature: MA Experiment 20001911 PARAMETER Experiment Name: At_Drought_Reproduction_P Parameter: Treatment Value: Drought vs. No Drought
atattccaaaattaaagagaatttaatttattgttttccttccagaaaaatattaatattctttctaaactaaaaaatggagtcttcaaatagcacagaagcagagacatagagcgggaacgcgtttagtcacagctttcttctcctttagcttttctctctacacttgcttctctctctctctctcctttgggttatccttcttgagatctgtgcttgcgtttcttcttcattcgacgacactttatctcgggagatttcagatttgtcgatttgttcagcaatggcgccaccgattgaggtttctaccaaaagctacgttgagaaacatgtttcacttcctactcttaatgagaggatactttcgtccatgagtcacagatcagtagctgcacacccatggcatgatctcgagataggacctgaagccccaattatcttcaattgtgtggttgagataggaaaagggagcaaggtgaaatatgaactcgacaaaactacgggtctcattaaggtcgaccgtattctttactcatctgtcgtatacccacacaactatgggttcattccgcgtaccctttgtgaggacagtgaccctattgatgttcttgtcattatgcaggaaccggtgatcccagcatgctttcttcgggccaaagctattggtctgatgccaatgattgatcagggtgagaaagacgacaagatcattgctgtctgcgctgacgatccagagtatcgccattacaacgacatcagtgagcttccgcctcatcgtatggctgagatccgccgtttctttgaagactataagaaaaacgagaacaaggaagtagccgttaacgacttccttccggcaactgcagcctacgacgcagttcagcattccatggatctctatgcagactacgtcgtggagaacctaagacgttgaatcatcacctcaagcaatggaatgaaagctcacaactgcattattcacaaatataaatatacatataaatgtcaggcttctcaaaggatatatttgttgtgtatgtcctctgatgaatccggtagatgatgccgataattctttttttttttttgtcgtatgaaaccgataatcaaagactaaaacagggattttcctcatttgtggtcatcactttttaaattttggtgtcatttctcatcttaatcaatttgtttttgagttttattcttctattagatcttttatacatcaaagaatagatgaagattccaccctaaaaccttatagtatgtcatttattcacaatatgttatacgtgtt

SEQ ID NO: 25262 - protein, 216 aa, Arabidopsis thaliana
  peptide (1)..(216): Ceres Seq. ID no. 12324848
  misc_feature (54)..(208): Pfam Name: Inorganic pyrophosphatase Pfam Description: Inorganic pyrophosphatase
  misc_feature (20)..(216): Homolog of NCBI NO: 2500047 NR Description: Soluble inorganic pyrophosphatase (Pyrophosphate
  misc_feature (6)..(216): Homolog of NCBI NO: 4033424 NR Description: Soluble inorganic pyrophosphatase (Pyrophosphate
  misc_feature (19)..(216): Homolog of NCBI NO: 15226453 NR Description: putative inorganic pyrophosphatase; protein id:
  misc_feature (15)..(216): Homolog of NCBI NO: 5669924 NR Description: soluble inorganic pyrophosphatase
  misc_feature (1)..(216): Homolog of NCBI NO: 40642617 NR Description: soluble pyrophosphatase [Beta vulgaris]
  misc_feature (20)..(216): Homolog of NCBI NO: 15223288 NR Description: soluble inorganic pyrophosphatase, putative
  misc_feature (1)..(216): Homolog of NCBI NO: 7436031 NR Description: probable inorganic diphosphatase (EC 3.6.1.1),
  misc_feature (1)..(216): Homolog of NCBI NO: 6752884 NR Description: soluble inorganic pyrophosphatase [Malus x
  misc_feature (1)..(216): Homolog of NCBI NO: 15231849 NR Description: inorganic pyrophosphatase -like protein
  misc_feature (1)..(216): Homolog of NCBI NO: 21593570 NR Description: inorganic pyrophosphatase-like protein
MAPPIEVSTKSYVEKHVSLPTLNERILSSMSHRSVAAHPWHDLEIGPEAPIIFNCVVEIGKGSKVKYELDKTTGLIKVDRILYSSVVYPHNYGFIPRTLCEDSDPIDVLVIMQEPVIPACFLRAKAIGLMPMIDQGEKDDKIIAVCADDPEYRHYNDISELPPHRMAEIRRFFEDYKKNENKEVAVNDFLPATAAYDAVQHSMDLYADYVVENLRR

SEQ ID NO: 25263 - protein, 187 aa, Arabidopsis thaliana
  peptide (1)..(187): Ceres Seq. ID no. 12324849
  misc_feature (25)..(179): Pfam Name: Inorganic pyrophosphatase Pfam Description: Inorganic pyrophosphatase
  misc_feature (1)..(187): Homolog of NCBI NO: 2500047 NR Description: Soluble inorganic pyrophosphatase (Pyrophosphate
  misc_feature (1)..(187): Homolog of NCBI NO: 4033424 NR Description: Soluble inorganic pyrophosphatase (Pyrophosphate
  misc_feature (1)..(187): Homolog of NCBI NO: 15226453 NR Description: putative inorganic pyrophosphatase; protein id:
  misc_feature (1)..(187): Homolog of NCBI NO: 5669924 NR Description: soluble inorganic pyrophosphatase
  misc_feature (1)..(187): Homolog of NCBI NO: 40642617 NR Description: soluble pyrophosphatase [Beta vulgaris]
  misc_feature (1)..(187): Homolog of NCBI NO: 15223288 NR Description: soluble inorganic pyrophosphatase, putative
  misc_feature (1)..(187): Homolog of NCBI NO: 7436031 NR Description: probable inorganic diphosphatase (EC 3.6.1.1),
  misc_feature (1)..(187): Homolog of NCBI NO: 6752884 NR Description: soluble inorganic pyrophosphatase [Malus x
  misc_feature (1)..(187): Homolog of NCBI NO: 15231849 NR Description: inorganic pyrophosphatase -like protein
  misc_feature (1)..(187): Homolog of NCBI NO: 21593570 NR Description: inorganic pyrophosphatase-like protein
MSHRSVAAHPWHDLEIGPEAPIIFNCVVEIGKGSKVKYELDKTTGLIKVDRILYSSVVYPHNYGFIPRTLCEDSDPIDVLVIMQEPVIPACFLRAKAIGLMPMIDQGEKDDKIIAVCADDPEYRHYNDISELPPHRMAEIRRFFEDYKKNENKEVAVNDFLPATAAYDAVQHSMDLYADYVVENLRR

SEQ ID NO: 25264 - DNA, 1155 bp, Arabidopsis thaliana
  misc_feature (1)..(1155): Ceres Seq. ID no. 12335441
  misc_feature: MA Experiment ID: 108488 Result: Down-regulated in Transcription
  misc_feature: MA Experiment ID: 108576 Result: Up-regulated in Transcription
  misc_feature: MA Experiment 108576 PARAMETER Experiment Name: At_42deg_Heat_cDNA_P Parameter: Temperature (deg C) Value: 42 vs. 22
  misc_feature: MA Experiment 108576 PARAMETER Experiment Name: At_42deg_Heat_cDNA_P Parameter: Timepoint (hr) Value: 1
  misc_feature: MA Experiment 108576 PARAMETER Experiment Name: At_42deg_Heat_cDNA_P Parameter: Tissue Value: Aerial
  misc_feature: MA Experiment ID: 20000224 Result: Up-regulated in Transcription
  misc_feature: MA Experiment ID: 20000227 Result: Up-regulated in Transcription
  misc_feature: MA Experiment 20000227 PARAMETER Experiment Name: At_Root-Tips-vs-Tops_P Parameter: Tissue Value: Root Tips vs. Root Tops
  misc_feature: MA Experiment ID: 20000439 Result: Up-regulated in Transcription
  misc_feature: MA Experiment 20000439 PARAMETER Experiment Name: At_Roots__P Parameter: Age (day) Value: 14 vs. 21
  misc_feature: MA Experiment 20000439 PARAMETER Experiment Name: At_Roots__P Parameter: Organism Value: A. thaliana
  misc_feature: MA Experiment 20000439 PARAMETER Experiment Name: At_Roots__P Parameter: Tissue Value: Roots vs. Whole Plant
  misc_feature: MA Experiment ID: 20000794 Result: Up-regulated in Transcription
  misc_feature: MA Experiment 20000794 PARAMETER Experiment Name: At_Petals_P Parameter: Age (day) Value: 23-25 days
  misc_feature: MA Experiment 20000794 PARAMETER Experiment Name: At_Petals_P Parameter: Plant Line Value: WS
  misc_feature: MA Experiment 20000794 PARAMETER Experiment Name: At_Petals_P Parameter: Tissue Value: Petals vs. Whole plant
  misc_feature: MA Experiment ID: 20001757 Result: Down-regulated in Transcription
  misc_feature: MA Experiment 20001757 PARAMETER Experiment Name: At_50mM_NH4NO3_L-to-H_P Parameter: Timepoint (hr) Value: 6
  misc_feature: MA Experiment 20001757 PARAMETER Experiment Name: At_50mM_NH4NO3_L-to-H_P Parameter: Tissue Value: Leaf
  misc_feature: MA Experiment 20001757 PARAMETER Experiment Name: At_50mM_NH4NO3_L-to-H_P Parameter: Treatment Value: 50mM NH4NO3 vs 100mM Mannitol
  misc_feature: MA Experiment ID: 20001905 Result: Up-regulated in Transcription
  misc_feature: MA Experiment 20001905 PARAMETER Experiment Name: At_Drought_Reproduction_P Parameter: Age (day) Value: 40
  misc_feature: MA Experiment 20001905 PARAMETER Experiment Name: At_Drought_Reproduction_P Parameter: Organism Value: A. thaliana
  misc_feature: MA Experiment 20001905 PARAMETER Experiment Name: At_Drought_Reproduction_P Parameter: Plant Line Value: WS
  misc_feature: MA Experiment 20001905 PARAMETER Experiment Name: At_Drought_Reproduction_P Parameter: Timepoint (day) Value: 10
  misc_feature: MA Experiment 20001905 PARAMETER Experiment Name: At_Drought_Reproduction_P Parameter: Tissue Value: Rosettes
  misc_feature: MA Experiment 20001905 PARAMETER Experiment Name: At_Drought_Reproduction_P Parameter: Treatment Value: Drought vs. No Drought
aatttcgtaaacttctaggggagaaacaagggagatagagaagtgagagagggggaaaccctagattcgatctccattcgatttgattcgtttctcgaatcgaagcgatggttttctacttcaaggcccgtcctgatgctggcgactacaccatcttcatggggcttgataagttcgagaacgaggagctcatcaagtacggcttccctgaagatgtctggtttcacgtggataaaatgtcgtcagctcatgtttacttgaggcttcatagaggccaaagttttgatgacattagtgaaggtgtgctggaggactgtgctcagcttgtgaaagctaactccattcaaggcaacaaggtgaacaacgttgatgttgtgtacactccgtggtccaacttgaagaaaactgcctccatggatgttggtcaagttggtttccacaattcaaagatggtccggactatcagagtggagaagcgagtcaatgaaatagttaacagactgaacaaaacaaaagttgaaagaacccctgatctgagagccgagagagaagcagtgaatgccgcagaaagggcagagaggaaacaacatctgagggagaagaagaaacgtgaagagatagataggcttgagaaggagaggcaatcagagatgaggagttacaagggactaatggtaactgataaaatgacatccaacaaagacattgcttcaagcaacaaatcgcttcaagaacttgaagacgatttcatgtaaaagctctgaagaaatgagaaacaaaacaaaccaagtcggtaacattctgccagagatgatctggtaccgtccttcaaagaaggcttatgatgttctactcgccttaactatgatgttgatggttgtccggttctatgttttctttaaaaaaatcttgaatacctaaaaccctaatctggttcttggactccttggtccattgaaatgtttcaaaaggattgaatctgatctgtgggaaaaaggagagcattatattctatatataacacaggtgaaccagtgatctggtgcaattatggtttactctgcattgctgtgtaacctgaaatttgtttactaccccataaagcttcatgtgttactctgcattgggttggattttggaatcactttattcttg

SEQ ID NO: 25265 - protein, 215 aa, Arabidopsis thaliana
  peptide (1)..(215): Ceres Seq. ID no. 12335442
  misc_feature (7)..(99): Pfam Name: Domain of unknown function (DUF814) Pfam Description: Domain of unknown function (DUF814)
  misc_feature (1)..(215): Homolog of NCBI NO: 24640291 NR Description: CG4593-PA [Drosophila melanogaster]
  misc_feature (1)..(215): Homolog of NCBI NO: 33416640 NR Description: Unknown (protein for MGC:68866) [Xenopus laevis]
  misc_feature (1)..(199): Homolog of NCBI NO: 22164768 NR Description: RIKEN cDNA 2610528H13 [Mus musculus]
  misc_feature (1)..(199): Homolog of NCBI NO: 34874343 NR Description: similar to RIKEN cDNA 2610528H13 [Rattus
  misc_feature (1)..(199): Homolog of NCBI NO: 29165654 NR Description: Similar to RIKEN cDNA 2610528H13 gene [Homo
  misc_feature (1)..(199): Homolog of NCBI NO: 14042911 NR Description: unnamed protein product [Homo sapiens]
  misc_feature (1)..(215): Homolog of NCBI NO: 34909556 NR Description: P0046E05.9 [Oryza sativa (japonica
  misc_feature (1)..(215): Homolog of NCBI NO: 13878175 NR Description: unknown protein [Arabidopsis thaliana]
  misc_feature (1)..(215): Homolog of NCBI NO: 21593571 NR Description: unknown [Arabidopsis thaliana]
  misc_feature (1)..(215): Homolog of NCBI NO: 15239074 NR Description: putative protein
MVFYFKARPDAGDYTIFMGLDKFENEELIKYGFPEDVWFHVDKMSSAHVYLRLHRGQSFDDISEGVLEDCAQLVKANSIQGNKVNNVDVVYTPWSNLKKTASMDVGQVGFHNSKMVRTIRVEKRVNEIVNRLNKTKVERTPDLRAEREAVNAAERAERKQHLREKKKREEIDRLEKERQSEMRSYKGLMVTDKMTSNKDIASSNKSLQELEDDFM

SEQ ID NO: 25266 - protein, 198 aa, Arabidopsis thaliana
  peptide (1)..(198): Ceres Seq. ID no. 12335443
  misc_feature (1)..(82): Pfam Name: Domain of unknown function (DUF814) Pfam Description: Domain of unknown function (DUF814)
  misc_feature (1)..(198): Homolog of NCBI NO: 24640291 NR Description: CG4593-PA [Drosophila melanogaster]
  misc_feature (1)..(198): Homolog of NCBI NO: 33416640 NR Description: Unknown (protein for MGC:68866) [Xenopus laevis]
  misc_feature (1)..(182): Homolog of NCBI NO: 22164768 NR Description: RIKEN cDNA 2610528H13 [Mus musculus]
  misc_feature (1)..(182): Homolog of NCBI NO: 34874343 NR Description: similar to RIKEN cDNA 2610528H13 [Rattus
  misc_feature (1)..(182): Homolog of NCBI NO: 29165654 NR Description: Similar to RIKEN cDNA 2610528H13 gene [Homo
  misc_feature (1)..(182): Homolog of NCBI NO: 14042911 NR Description: unnamed protein product [Homo sapiens]
  misc_feature (1)..(198): Homolog of NCBI NO: 34909556 NR Description: P0046E05.9 [Oryza sativa (japonica
  misc_feature (1)..(198): Homolog of NCBI NO: 13878175 NR Description: unknown protein [Arabidopsis thaliana]
  misc_feature (1)..(198): Homolog of NCBI NO: 21593571 NR Description: unknown [Arabidopsis thaliana]
  misc_feature (1)..(198): Homolog of NCBI NO: 15239074 NR Description: putative protein
MGLDKFENEELIKYGFPEDVWFHVDKMSSAHVYLRLHRGQSFDDISEGVLEDCAQLVKANSIQGNKVNNVDVVYTPWSNLKKTASMDVGQVGFHNSKMVRTIRVEKRVNEIVNRLNKTKVERTPDLRAEREAVNAAERAERKQHLREKKKREEIDRLEKERQSEMRSYKGLMVTDKMTSNKDIASSNKSLQELEDDFM

SEQ ID NO: 25267 - protein, 172 aa, Arabidopsis thaliana
  peptide (1)..(172): Ceres Seq. ID no. 12335444
  misc_feature (1)..(56): Pfam Name: Domain of unknown function (DUF814) Pfam Description: Domain of unknown function (DUF814)
  misc_feature (1)..(172): Homolog of NCBI NO: 24640291 NR Description: CG4593-PA [Drosophila melanogaster]
  misc_feature (1)..(172): Homolog of NCBI NO: 33416640 NR Description: Unknown (protein for MGC:68866) [Xenopus laevis]
  misc_feature (1)..(156): Homolog of NCBI NO: 22164768 NR Description: RIKEN cDNA 2610528H13 [Mus musculus]
  misc_feature (1)..(156): Homolog of NCBI NO: 34874343 NR Description: similar to RIKEN cDNA 2610528H13 [Rattus
  misc_feature (1)..(156): Homolog of NCBI NO: 29165654 NR Description: Similar to RIKEN cDNA 2610528H13 gene [Homo
  misc_feature (1)..(156): Homolog of NCBI NO: 14042911 NR Description: unnamed protein product [Homo sapiens]
  misc_feature (1)..(172): Homolog of NCBI NO: 34909556 NR Description: P0046E05.9 [Oryza sativa (japonica
  misc_feature (1)..(172): Homolog of NCBI NO: 13878175 NR Description: unknown protein [Arabidopsis thaliana]
  misc_feature (1)..(172): Homolog of NCBI NO: 21593571 NR Description: unknown [Arabidopsis thaliana]
  misc_feature (1)..(172): Homolog of NCBI NO: 15239074 NR Description: putative protein
MSSAHVYLRLHRGQSFDDISEGVLEDCAQLVKANSIQGNKVNNVDVVYTPWSNLKKTASMDVGQVGFHNSKMVRTIRVEKRVNEIVNRLNKTKVERTPDLRAEREAVNAAERAERKQHLREKKKREEIDRLEKERQSEMRSYKGLMVTDKMTSNKDIASSNKSLQELEDDFM

SEQ ID NO: 25268 - DNA, 1497 bp, Arabidopsis thaliana
  misc_feature (1)..(1497): Ceres Seq. ID no. 12738561
  misc_feature: MA Experiment ID: 108433 Result: Down-regulated in Transcription
  misc_feature: MA Experiment 108433 PARAMETER Experiment Name: At_rhl_Mutant2_cDNA_P Parameter: Age (day) Value: 7
  misc_feature: MA Experiment 108433 PARAMETER Experiment Name: At_rhl_Mutant2_cDNA_P Parameter: Organism Value: A. thaliana
  misc_feature: MA Experiment 108433 PARAMETER Experiment Name: At_rhl_Mutant2_cDNA_P Parameter: Plant Line Value: rhl Mutant vs. wt landsburg
  misc_feature: MA Experiment 108433 PARAMETER Experiment Name: At_rhl_Mutant2_cDNA_P Parameter: Tissue Value: Roots
  misc_feature: MA Experiment ID: 108461 Result: Down-regulated in Transcription
  misc_feature: MA Experiment 108461 PARAMETER Experiment Name: At_Germinating_Seeds_cDNA_P Parameter: Age (day) Value: 1 vs. 0
  misc_feature: MA Experiment 108461 PARAMETER Experiment Name: At_Germinating_Seeds_cDNA_P Parameter: Tissue Value: Germinating Seeds
  misc_feature: MA Experiment ID: 108474 Result: Up-regulated in Transcription
  misc_feature: MA Experiment 108474 PARAMETER Experiment Name: At_Drought_Flowers_cDNA_P Parameter: Timepoint (hr) Value: null
  misc_feature: MA Experiment 108474 PARAMETER Experiment Name: At_Drought_Flowers_cDNA_P Parameter: Treatment Value: Drought vs. No Drought
  misc_feature: MA Experiment ID: 108489 Result: Up-regulated in Transcription
  misc_feature: MA Experiment ID: 20000179 Result: Down-regulated in Transcription
  misc_feature: MA Experiment 20000179 PARAMETER Experiment Name: At_Germinating_Seeds_P Parameter: Age (hr) Value: 6 vs. 0
  misc_feature: MA Experiment 20000179 PARAMETER Experiment Name: At_Germinating_Seeds_P Parameter: Tissue Value: Germinating Seeds
  misc_feature: MA Experiment ID: 20000224 Result: Down-regulated in Transcription
  misc_feature: MA Experiment ID: 20000234 Result: Down-regulated in Transcription
  misc_feature: MA Experiment 20000234 PARAMETER Experiment Name: At_Siliques_P Parameter: Age (day) Value: 21
  misc_feature: MA Experiment 20000234 PARAMETER Experiment Name: At_Siliques_P Parameter: Organism Value: A. thaliana
  misc_feature: MA Experiment 20000234 PARAMETER Experiment Name: At_Siliques_P Parameter: Plant Line Value: WS
  misc_feature: MA Experiment 20000234 PARAMETER Experiment Name: At_Siliques_P Parameter: Tissue Value: Less Than 5mm Siliques vs. Whole Plant
  misc_feature: MA Experiment ID: 20000264 Result: Down-regulated in Transcription
  misc_feature: MA Experiment 20000264 PARAMETER Experiment Name: At_Open_Flower_P Parameter: Age (day) Value: 21
  misc_feature: MA Experiment 20000264 PARAMETER Experiment Name: At_Open_Flower_P Parameter: Plant Line Value: WS
  misc_feature: MA Experiment 20000264 PARAMETER Experiment Name: At_Open_Flower_P Parameter: Tissue Value: Open Flower vs. Whole Plant
  misc_feature: MA Experiment ID: 20000265 Result: Down-regulated in Transcription
  misc_feature: MA Experiment 20000265 PARAMETER Experiment Name: At_Open_Flower_P Parameter: Age (day) Value: 21
  misc_feature: MA Experiment 20000265 PARAMETER Experiment Name: At_Open_Flower_P Parameter: Plant Line Value: WS
  misc_feature: MA Experiment 20000265 PARAMETER Experiment Name: At_Open_Flower_P Parameter: Tissue Value: Closed Flower vs. Whole Plant
  misc_feature: MA Experiment ID: 20000286 Result: Down-regulated in Transcription
  misc_feature: MA Experiment 20000286 PARAMETER Experiment Name: At_Open_Flower_P Parameter: Age (day) Value: 21
  misc_feature: MA Experiment 20000286 PARAMETER Experiment Name: At_Open_Flower_P Parameter: Plant Line Value: WS
  misc_feature: MA Experiment 20000286 PARAMETER Experiment Name: At_Open_Flower_P Parameter: Tissue Value: Half Open vs. Whole Plant
  misc_feature: MA Experiment ID: 20000709 Result: Up-regulated in Transcription
  misc_feature: MA Experiment 20000709 PARAMETER Experiment Name: At_15mM_NH4NO3_L-to-H_P Parameter: Age (hr) Value: 14
  misc_feature: MA Experiment 20000709 PARAMETER Experiment Name: At_15mM_NH4NO3_L-to-H_P Parameter: Organism Value: A. thaliana
  misc_feature: MA Experiment 20000709 PARAMETER Experiment Name: At_15mM_NH4NO3_L-to-H_P Parameter: Plant Line Value: WS
  misc_feature: MA Experiment 20000709 PARAMETER Experiment Name: At_15mM_NH4NO3_L-to-H_P Parameter: Timepoint (hr) Value: 4
  misc_feature: MA Experiment 20000709 PARAMETER Experiment Name: At_15mM_NH4NO3_L-to-H_P Parameter: Tissue Value: Aerial
  misc_feature: MA Experiment 20000709 PARAMETER Experiment Name: At_15mM_NH4NO3_L-to-H_P Parameter: Treatment Value: 15mM NH4NO3 vs. 30mM Mannitol
  misc_feature: MA Experiment ID: 20000794 Result: Down-regulated in Transcription
  misc_feature: MA Experiment 20000794 PARAMETER Experiment Name: At_Petals_P Parameter: Age (day) Value: 23-25 days
  misc_feature: MA Experiment 20000794 PARAMETER Experiment Name: At_Petals_P Parameter: Plant Line Value: WS
  misc_feature: MA Experiment 20000794 PARAMETER Experiment Name: At_Petals_P Parameter: Tissue Value: Petals vs. Whole plant
  misc_feature: MA Experiment ID: 20001450 Result: Up-regulated in Transcription
  misc_feature: MA Experiment 20001450 PARAMETER Experiment Name: At_Far-red-induction_P Parameter: Age (day) Value: 7
  misc_feature: MA Experiment 20001450 PARAMETER Experiment Name: At_Far-red-induction_P Parameter: Light Value: Far-red vs. White
  misc_feature: MA Experiment 20001450 PARAMETER Experiment Name: At_Far-red-induction_P Parameter: Organism Value: A. thaliana
  misc_feature: MA Experiment 20001450 PARAMETER Experiment Name: At_Far-red-induction_P Parameter: Plant Line Value: Columbia
  misc_feature: MA Experiment 20001450 PARAMETER Experiment Name: At_Far-red-induction_P Parameter: Timepoint (hr) Value: 8
  misc_feature: MA Experiment 20001450 PARAMETER Experiment Name: At_Far-red-induction_P Parameter: Tissue Value: Whole Plant
  misc_feature: MA Experiment ID: 20001457 Result: Up-regulated in Transcription
  misc_feature: MA Experiment 20001457 PARAMETER Experiment Name: At_50mM_NH4NO3_L-to-H_P Parameter: Age (day) Value: Undefined
  misc_feature: MA Experiment 20001457 PARAMETER Experiment Name: At_50mM_NH4NO3_L-to-H_P Parameter: Organism Value: Undefined
  misc_feature: MA Experiment 20001457 PARAMETER Experiment Name: At_50mM_NH4NO3_L-to-H_P Parameter: Plant Line Value: Undefined
  misc_feature: MA Experiment 20001457 PARAMETER Experiment Name: At_50mM_NH4NO3_L-to-H_P Parameter: Timepoint (hr) Value: 0.5
  misc_feature: MA Experiment 20001457 PARAMETER Experiment Name: At_50mM_NH4NO3_L-to-H_P Parameter: Tissue Value: Siliques
  misc_feature: MA Experiment 20001457 PARAMETER Experiment Name: At_50mM_NH4NO3_L-to-H_P Parameter: Treatment Value: 50mM NH4NO3 vs. 100mM Manitol
  misc_feature: MA Experiment ID: 20001458 Result: Up-regulated in Transcription
  misc_feature: MA Experiment 20001458 PARAMETER Experiment Name: At_50mM_NH4NO3_L-to-H_P Parameter: Age (day) Value: Undefined
  misc_feature: MA Experiment 20001458 PARAMETER Experiment Name: At_50mM_NH4NO3_L-to-H_P Parameter: Organism Value: Undefined
  misc_feature: MA Experiment 20001458 PARAMETER Experiment Name: At_50mM_NH4NO3_L-to-H_P Parameter: Plant Line Value: Undefined
  misc_feature: MA Experiment 20001458 PARAMETER Experiment Name: At_50mM_NH4NO3_L-to-H_P Parameter: Timepoint (hr) Value: 2
  misc_feature: MA Experiment 20001458 PARAMETER Experiment Name: At_50mM_NH4NO3_L-to-H_P Parameter: Tissue Value: Siliques
  misc_feature: MA Experiment 20001458 PARAMETER Experiment Name: At_50mM_NH4NO3_L-to-H_P Parameter: Treatment Value: 50mM NH4NO3 vs. 100mM Manitol
  misc_feature: MA Experiment ID: 20001459 Result: Up-regulated in Transcription
  misc_feature: MA Experiment 20001459 PARAMETER Experiment Name: At_50mM_NH4NO3_L-to-H_P Parameter: Age (day) Value: Undefined
  misc_feature: MA Experiment 20001459 PARAMETER Experiment Name: At_50mM_NH4NO3_L-to-H_P Parameter: Organism Value: Undefined
  misc_feature: MA Experiment 20001459 PARAMETER Experiment Name: At_50mM_NH4NO3_L-to-H_P Parameter: Plant Line Value: Undefined
  misc_feature: MA Experiment 20001459 PARAMETER Experiment Name: At_50mM_NH4NO3_L-to-H_P Parameter: Timepoint (hr) Value: 4
  misc_feature: MA Experiment 20001459 PARAMETER Experiment Name: At_50mM_NH4NO3_L-to-H_P Parameter: Tissue Value: Siliques
  misc_feature: MA Experiment 20001459 PARAMETER Experiment Name: At_50mM_NH4NO3_L-to-H_P Parameter: Treatment Value: 50mM NH4NO3 vs. 100mM Manitol
  misc_feature: MA Experiment ID: 20001756 Result: Up-regulated in Transcription
  misc_feature: MA Experiment 20001756 PARAMETER Experiment Name: At_50mM_NH4NO3_L-to-H_P Parameter: Timepoint (hr) Value: 4
  misc_feature: MA Experiment 20001756 PARAMETER Experiment Name: At_50mM_NH4NO3_L-to-H_P Parameter: Tissue Value: Leaf
  misc_feature: MA Experiment 20001756 PARAMETER Experiment Name: At_50mM_NH4NO3_L-to-H_P Parameter: Treatment Value: 50mM NH4NO3 vs 100mM Mannitol
  misc_feature: MA Experiment ID: 20001757 Result: Up-regulated in Transcription
  misc_feature: MA Experiment 20001757 PARAMETER Experiment Name: At_50mM_NH4NO3_L-to-H_P Parameter: Timepoint (hr) Value: 6
  misc_feature: MA Experiment 20001757 PARAMETER Experiment Name: At_50mM_NH4NO3_L-to-H_P Parameter: Tissue Value: Leaf
  misc_feature: MA Experiment 20001757 PARAMETER Experiment Name: At_50mM_NH4NO3_L-to-H_P Parameter: Treatment Value: 50mM NH4NO3 vs 100mM Mannitol
  misc_feature: MA Experiment ID: 20001759 Result: Up-regulated in Transcription
  misc_feature: MA Experiment 20001759 PARAMETER Experiment Name: At_50mM_NH4NO3_L-to-H_P Parameter: Timepoint (hr) Value: 1
  misc_feature: MA Experiment 20001759 PARAMETER Experiment Name: At_50mM_NH4NO3_L-to-H_P Parameter: Tissue Value: Siliques
  misc_feature: MA Experiment 20001759 PARAMETER Experiment Name: At_50mM_NH4NO3_L-to-H_P Parameter: Treatment Value: 50mM NH4NO3 vs 100mM Mannitol
gacggcccgacctcgattctcttccacttctttcttgttccaaaaacctaaaccctctctctctctctctctctctctctatctcttgaaaaatcaacaaaacattggaatcaatttctctatgttttgattctattttaaagatccaatattctttctccattgagattaagcttctttctcgttgtcgtctctctatagatcttggttcttagtcccttttgaataataatgatggtggagatggattacgctaagaaaatgcagaaatgtcatgaatacgttgaagcacttgaagaagaacagaagaaaatccaagtctttcaacgcgagcttcctttatgtttagagcttgtcactcaagcgatcgaagcttgtcggaaggagttatctggtacgacgacaactacatcagaacagtgttcagaacagaccacaagtgtttgtggtggtcctgtctttgaagagtttattcctatcaagaaaattagttccttgtgtgaagaagtacaagaagaagaagaagaagatggtgaacatgaatcttctccagaacttgtgaataataagaaatcagattggcttagatctgttcagctatggaatcattcaccggatctaaatccaaaagaggagcgtgtagctaagaaagcgaaagtggtggaggtgaaaccaaaaagcggtgcgtttcagccatttcaaaagcgcgttttggagactgatttgcaaccggcggtgaaagtagctagttcgatgccagcgacgacgacgagttctacgacggaaacttgtggtggtaaaagtgatttgattaaagctggagatgaggaaagacggatagagcagcagcaatcgcagtcgcatacgcatagaaaacaaaggcggtgctggtcgccggaattacaccgtcgattcctaaacgcgcttcagcagcttggaggatctcatgttgctacaccaaagcaaatcagggatcacatgaaggttgatggattaacaaacgacgaagttaaaagccatttacagaaatatagacttcacacaagaaggccagcagcaacatccgtggcggcacaaagtaccgggaatcagcaacaaccacaatttgtggtggttggaggcatatgggtaccatcgtcacaagattttccaccaccgtccgatgtagccaacaagggtggtgtatatgctccggttgcggtggcgcaatctccaaaacgttcgttggagagaagttgcaactcgccggcggcatcttcctctacaaatacaaatacttctactcctgtgtcatagtctgatagtcatactagaatcatctcctgatgttgattttagtgcaggtttgaaaatgtttatgtgaatgtaagatatattttcgtccgtttttgtttgtaaccaagaaatgttatttcctcggttggaaattttgaataaagtagacgaatgctactatgtagtatatacacgagataagtgaagactctttgtttttct

SEQ ID NO: 25269 - protein, 354 aa, Arabidopsis thaliana
  peptide (1)..(354): Ceres Seq. ID no. 12738562
  misc_feature (217)..(268): Pfam Name: Myb-like DNA-binding domain Pfam Description: Myb-like DNA-binding domain
  misc_feature (214)..(328): Homolog of NCBI NO: 18404660 NR Description: expressed protein
  misc_feature (9)..(146): Homolog of NCBI NO: 18404660 NR Description: expressed protein
  misc_feature (190)..(303): Homolog of NCBI NO: 18391499 NR Description: expressed protein
  misc_feature (5)..(140): Homolog of NCBI NO: 18391499 NR Description: expressed protein
  misc_feature (11)..(352): Homolog of NCBI NO: 21554044 NR Description: unknown [Arabidopsis thaliana]
  misc_feature (4)..(352): Homolog of NCBI NO: 25513742 NR Description: 38.7K hypothetical protein F2J7.21 - Arabidopsis
  misc_feature (4)..(352): Homolog of NCBI NO: 18395724 NR Description: expressed protein
  misc_feature (11)..(354): Homolog of NCBI NO: 21593572 NR Description: unknown [Arabidopsis thaliana]
  misc_feature (2)..(354): Homolog of NCBI NO: 25404762 NR Description: F24J5.9 [imported] - Arabidopsis thaliana
  misc_feature (1)..(354): Homolog of NCBI NO: 18409089 NR Description: expressed protein
MMVEMDYAKKMQKCHEYVEALEEEQKKIQVFQRELPLCLELVTQAIEACRKELSGTTTTTSEQCSEQTTSVCGGPVFEEFIPIKKISSLCEEVQEEEEEDGEHESSPELVNNKKSDWLRSVQLWNHSPDLNPKEERVAKKAKVVEVKPKSGAFQPFQKRVLETDLQPAVKVASSMPATTTSSTTETCGGKSDLIKAGDEERRIEQQQSQSHTHRKQRRCWSPELHRRFLNALQQLGGSHVATPKQIRDHMKVDGLTNDEVKSHLQKYRLHTRRPAATSVAAQSTGNQQQPQFVVVGGIWVPSSQDFPPPSDVANKGGVYAPVAVAQSPKRSLERSCNSPAASSSTNTNTSTPVS

SEQ ID NO: 25270 - protein, 353 aa, Arabidopsis thaliana
  peptide (1)..(353): Ceres Seq. ID no. 12738563
  misc_feature (216)..(267): Pfam Name: Myb-like DNA-binding domain Pfam Description: Myb-like DNA-binding domain
  misc_feature (189)..(302): Homolog of NCBI NO: 18391499 NR Description: expressed protein
  misc_feature (4)..(139): Homolog of NCBI NO: 18391499 NR Description: expressed protein
  misc_feature (10)..(351): Homolog of NCBI NO: 21554044 NR Description: unknown [Arabidopsis thaliana]
  misc_feature (3)..(351): Homolog of NCBI NO: 25513742 NR Description: 38.7K hypothetical protein F2J7.21 - Arabidopsis
  misc_feature (213)..(327): Homolog of NCBI NO: 18404660 NR Description: expressed protein
  misc_feature (8)..(145): Homolog of NCBI NO: 18404660 NR Description: expressed protein
  misc_feature (3)..(351): Homolog of NCBI NO: 18395724 NR Description: expressed protein
  misc_feature (10)..(353): Homolog of NCBI NO: 21593572 NR Description: unknown [Arabidopsis thaliana]
  misc_feature (1)..(353): Homolog of NCBI NO: 25404762 NR Description: F24J5.9 [imported] - Arabidopsis thaliana
  misc_feature (1)..(353): Homolog of NCBI NO: 18409089 NR Description: expressed protein
MVEMDYAKKMQKCHEYVEALEEEQKKIQVFQRELPLCLELVTQAIEACRKELSGTTTTTSEQCSEQTTSVCGGPVFEEFIPIKKISSLCEEVQEEEEEDGEHESSPELVNNKKSDWLRSVQLWNHSPDLNPKEERVAKKAKVVEVKPKSGAFQPFQKRVLETDLQPAVKVASSMPATTTSSTTETCGGKSDLIKAGDEERRIEQQQSQSHTHRKQRRCWSPELHRRFLNALQQLGGSHVATPKQIRDHMKVDGLTNDEVKSHLQKYRLHTRRPAATSVAAQSTGNQQQPQFVVVGGIWVPSSQDFPPPSDVANKGGVYAPVAVAQSPKRSLERSCNSPAASSSTNTNTSTPVS

SEQ ID NO: 25271 - protein, 350 aa, Arabidopsis thaliana
  peptide (1)..(350): Ceres Seq. ID no. 12738564
  misc_feature (213)..(264): Pfam Name: Myb-like DNA-binding domain Pfam Description: Myb-like DNA-binding domain
  misc_feature (210)..(324): Homolog of NCBI NO: 18404660 NR Description: expressed protein
  misc_feature (5)..(142): Homolog of NCBI NO: 18404660 NR Description: expressed protein
  misc_feature (186)..(299): Homolog of NCBI NO: 18391499 NR Description: expressed protein
  misc_feature (1)..(136): Homolog of NCBI NO: 18391499 NR Description: expressed protein
  misc_feature (7)..(348): Homolog of NCBI NO: 21554044 NR Description: unknown [Arabidopsis thaliana]
  misc_feature (1)..(348): Homolog of NCBI NO: 25513742 NR Description: 38.7K hypothetical protein F2J7.21 - Arabidopsis
  misc_feature (1)..(348): Homolog of NCBI NO: 18395724 NR Description: expressed protein
  misc_feature (7)..(350): Homolog of NCBI NO: 21593572 NR Description: unknown [Arabidopsis thaliana]
  misc_feature (1)..(350): Homolog of NCBI NO: 25404762 NR Description: F24J5.9 [imported] - Arabidopsis thaliana
  misc_feature (1)..(350): Homolog of NCBI NO: 18409089 NR Description: expressed protein
MDYAKKMQKCHEYVEALEEEQKKIQVFQRELPLCLELVTQAIEACRKELSGTTTTTSEQCSEQTTSVCGGPVFEEFIPIKKISSLCEEVQEEEEEDGEHESSPELVNNKKSDWLRSVQLWNHSPDLNPKEERVAKKAKVVEVKPKSGAFQPFQKRVLETDLQPAVKVASSMPATTTSSTTETCGGKSDLIKAGDEERRIEQQQSQSHTHRKQRRCWSPELHRRFLNALQQLGGSHVATPKQIRDHMKVDGLTNDEVKSHLQKYRLHTRRPAATSVAAQSTGNQQQPQFVVVGGIWVPSSQDFPPPSDVANKGGVYAPVAVAQSPKRSLERSCNSPAASSSTNTNTSTPVS

SEQ ID NO: 25272 - DNA, 1679 bp, Arabidopsis thaliana
  misc_feature (1)..(1679): Ceres Seq. ID no. 13575488
  misc_feature: MA Experiment ID: 20000179 Result: Up-regulated in Transcription
  misc_feature: MA Experiment 20000179 PARAMETER Experiment Name: At_Germinating_Seeds_P Parameter: Age (hr) Value: 6 vs. 0
  misc_feature: MA Experiment 20000179 PARAMETER Experiment Name: At_Germinating_Seeds_P Parameter: Tissue Value: Germinating Seeds
  misc_feature: MA Experiment ID: 20000180 Result: Up-regulated in Transcription
  misc_feature: MA Experiment 20000180 PARAMETER Experiment Name: At_Germinating_Seeds_P Parameter: Age (hr) Value: 24 vs. 0
  misc_feature: MA Experiment 20000180 PARAMETER Experiment Name: At_Germinating_Seeds_P Parameter: Tissue Value: Germinating Seeds
  misc_feature: MA Experiment ID: 20000184 Result: Up-regulated in Transcription
  misc_feature: MA Experiment 20000184 PARAMETER Experiment Name: At_Shoots__P Parameter: Age (day) Value: 7
  misc_feature: MA Experiment 20000184 PARAMETER Experiment Name: At_Shoots__P Parameter: Tissue Value: Shoots vs. Whole Plant
  misc_feature: MA Experiment ID: 20000234 Result: Up-regulated in Transcription
  misc_feature: MA Experiment 20000234 PARAMETER Experiment Name: At_Siliques_P Parameter: Age (day) Value: 21
  misc_feature: MA Experiment 20000234 PARAMETER Experiment Name: At_Siliques_P Parameter: Organism Value: A. thaliana
  misc_feature: MA Experiment 20000234 PARAMETER Experiment Name: At_Siliques_P Parameter: Plant Line Value: WS
  misc_feature: MA Experiment 20000234 PARAMETER Experiment Name: At_Siliques_P Parameter: Tissue Value: Less Than 5mm Siliques vs. Whole Plant
  misc_feature: MA Experiment ID: 20000235 Result: Up-regulated in Transcription
  misc_feature: MA Experiment 20000235 PARAMETER Experiment Name: At_Siliques_P Parameter: Age (day) Value: 21
  misc_feature: MA Experiment 20000235 PARAMETER Experiment Name: At_Siliques_P Parameter: Organism Value: A. thaliana
  misc_feature: MA Experiment 20000235 PARAMETER Experiment Name: At_Siliques_P Parameter: Plant Line Value: WS
  misc_feature: MA Experiment 20000235 PARAMETER Experiment Name: At_Siliques_P Parameter: Tissue Value: 5-10mm Siliques vs. Whole Plant
  misc_feature: MA Experiment ID: 20000286 Result: Up-regulated in Transcription
  misc_feature: MA Experiment 20000286 PARAMETER Experiment Name: At_Open_Flower_P Parameter: Age (day) Value: 21
  misc_feature: MA Experiment 20000286 PARAMETER Experiment Name: At_Open_Flower_P Parameter: Plant Line Value: WS
  misc_feature: MA Experiment 20000286 PARAMETER Experiment Name: At_Open_Flower_P Parameter: Tissue Value: Half Open vs. Whole Plant
  misc_feature: MA Experiment ID: 20000438 Result: Up-regulated in Transcription
  misc_feature: MA Experiment 20000438 PARAMETER Experiment Name: At_Shoots__P Parameter: Age (day) Value: 14
  misc_feature: MA Experiment 20000438 PARAMETER Experiment Name: At_Shoots__P Parameter: Tissue Value: Shoots vs. Whole Plant
  misc_feature: MA Experiment ID: 20000794 Result: Down-regulated in Transcription
  misc_feature: MA Experiment 20000794 PARAMETER Experiment Name: At_Petals_P Parameter: Age (day) Value: 23-25 days
  misc_feature: MA Experiment 20000794 PARAMETER Experiment Name: At_Petals_P Parameter: Plant Line Value: WS
  misc_feature: MA Experiment 20000794 PARAMETER Experiment Name: At_Petals_P Parameter: Tissue Value: Petals vs. Whole plant
  misc_feature: MA Experiment ID: 20001451 Result: Down-regulated in Transcription
  misc_feature: MA Experiment 20001451 PARAMETER Experiment Name: At_Far-red-induction_P Parameter: Age (day) Value: 7
  misc_feature: MA Experiment 20001451 PARAMETER Experiment Name: At_Far-red-induction_P Parameter: Light Value: Far-red vs. White
  misc_feature: MA Experiment 20001451 PARAMETER Experiment Name: At_Far-red-induction_P Parameter: Organism Value: A. thaliana
  misc_feature: MA Experiment 20001451 PARAMETER Experiment Name: At_Far-red-induction_P Parameter: Plant Line Value: Columbia
  misc_feature: MA Experiment 20001451 PARAMETER Experiment Name: At_Far-red-induction_P Parameter: Timepoint (hr) Value: 24
  misc_feature: MA Experiment 20001451 PARAMETER Experiment Name: At_Far-red-induction_P Parameter: Tissue Value: Whole Plant
  misc_feature: MA Experiment ID: 20001911 Result: Down-regulated in Transcription
  misc_feature: MA Experiment 20001911 PARAMETER Experiment Name: At_Drought_Reproduction_P Parameter: Age (day) Value: 40
  misc_feature: MA Experiment 20001911 PARAMETER Experiment Name: At_Drought_Reproduction_P Parameter: Organism Value: A. thaliana
  misc_feature: MA Experiment 20001911 PARAMETER Experiment Name: At_Drought_Reproduction_P Parameter: Plant Line Value: WS
  misc_feature: MA Experiment 20001911 PARAMETER Experiment Name: At_Drought_Reproduction_P Parameter: Timepoint (day) Value: 10
  misc_feature: MA Experiment 20001911 PARAMETER Experiment Name: At_Drought_Reproduction_P Parameter: Tissue Value: Flowers
  misc_feature: MA Experiment 20001911 PARAMETER Experiment Name: At_Drought_Reproduction_P Parameter: Treatment Value: Drought vs. No Drought
gcacacacacacacactctacaaatctgaaatcacaaatctcatcatctccttcctcccttgcgagatctgatcgtatcaatggagatcttctacttcgtggtgttcggtggcctggctgcgatcgtcgccggcttggagctgagcaaatcgaacaaagaccgcattaacacctcctccgccttcaactccttcaagaacaactatctcctcgtctactctctcatgatggctggggactggttgcagggtccgtatgtgtactatctctacagcacttatggctttggaaagggagagatcggtcagctctttattgctggttttggatcttccatgttgtttggcaccattgttggatctcttgccgacaaacagggtcgcaagagagcttctatcacctactgtatcacctacattctcagctgtatcaccaaacattctccccagtacaaagttttgatggtcggtcgtgttcttggtggtatcgctacttctctccttttctctgccttcgaatcctggctcgtcgctgagcacaacaagagaggcttcgagcagcagtggctttctgtcactttctccaaggctattttcctcggtaatggattagtcgccatcattgctggcctctttggcaattaccttgtcgattctctctccctcggtcctgttgctcctttcgatgctgctgcttgcttccttgctattggtatggccgttattatctcatcttggtccgaaaactatggagatccatctgaaaacaaagaccttcttacccagttcaagaacgctgcatctgccattgcttctgatgagaagatcgcattactcggtgctattcagtctctgtttgaagggtccatgtacacctttgtgtttctctggactcctgctttgagcccaaacgaagaggacattccacatggtttcatatttgcaacattcatgctggcttcgatgcttggtagctccattgcctctcgtttgttggcacattcgtctccaaaagtagagagctatatgcagatcgtatttgtgatatcttctgctgctctaatgcttcctgttgtaacaagcttcttggtggcgccctcaggtgtaaaaggtggaagcatatccttctctggatgcattcagttaatgggtttctgcacatttgaagcgtgtgtaggaatcttctggccatctataatgaagatgagatcgcaatacattccagaggaagctagaagcaccatcatgaattttttccgcatcccactcaacatctttgtctgccttgtattatacaatgttgacgcgtttccaatgaccgtgatgtttggaatgtgctctgtattcctttttgtggcctctatattgcagaggaggttgatgaatgtagccgagatccacaagtcaagatcacaagagtggtcagcagaaaaggagatgacctcagaagctgaccctctaaacccataataaccaaatcaaccatgacataagaaaaaagaagaaacgccgttccgtttctcttgatgatttttctacttgtcttaatatgttcgttggtcataaagtctttccacttgtttagttatatttggattttgtgccttcaccagatgtagcaaacacaccctaatacctctgcacgtcagcttatttgggctttggccactattcttctcg

SEQ ID NO: 25273 - protein, 462 aa, Arabidopsis thaliana
  peptide (1)..(462): Ceres Seq. ID no. 13575489
  misc_feature (4)..(358): Pfam Name: Protein of unknown function (DUF791) Pfam Description: Protein of unknown function (DUF791)
  misc_feature (363)..(406): Homolog of NCBI NO: 7487513 NR Description: hypothetical protein T29A15.210 - Arabidopsis
  misc_feature (1)..(337): Homolog of NCBI NO: 7487513 NR Description: hypothetical protein T29A15.210 - Arabidopsis
  misc_feature (1)..(155): Homolog of NCBI NO: 11292198 NR Description: hypothetical protein F2K15.170 - Arabidopsis
  misc_feature (144)..(460): Homolog of NCBI NO: 11292198 NR Description: hypothetical protein F2K15.170 - Arabidopsis
  misc_feature (1)..(462): Homolog of NCBI NO: 37536124 NR Description: putative transporter [Oryza sativa (japonica
  misc_feature (1)..(462): Homolog of NCBI NO: 34902182 NR Description: Putative transporter [Oryza sativa (japonica
  misc_feature (1)..(460): Homolog of NCBI NO: 30693172 NR Description: expressed protein [Arabidopsis thaliana]
  misc_feature (1)..(461): Homolog of NCBI NO: 18417054 NR Description: expressed protein [Arabidopsis thaliana]
  misc_feature (1)..(462): Homolog of NCBI NO: 6633826 NR Description: F1N19.22 [Arabidopsis thaliana]
  misc_feature (1)..(462): Homolog of NCBI NO: 15217708 NR Description: expressed protein [Arabidopsis thaliana]
MEIFYFVVFGGLAAIVAGLELSKSNKDRINTSSAFNSFKNNYLLVYSLMMAGDWLQGPYVYYLYSTYGFGKGEIGQLFIAGFGSSMLFGTIVGSLADKQGRKRASITYCITYILSCITKHSPQYKVLMVGRVLGGIATSLLFSAFESWLVAEHNKRGFEQQWLSVTFSKAIFLGNGLVAIIAGLFGNYLVDSLSLGPVAPFDAAACFLAIGMAVIISSWSENYGDPSENKDLLTQFKNAASAIASDEKIALLGAIQSLFEGSMYTFVFLWTPALSPNEEDIPHGFIFATFMLASMLGSSIASRLLAHSSPKVESYMQIVFVISSAALMLPVVTSFLVAPSGVKGGSISFSGCIQLMGFCTFEACVGIFWPSIMKMRSQYIPEEARSTIMNFFRIPLNIFVCLVLYNVDAFPMTVMFGMCSVFLFVASILQRRLMNVAEIHKSRSQEWSAEKEMTSEADPLNP

SEQ ID NO: 25274 - protein, 414 aa, Arabidopsis thaliana
  peptide (1)..(414): Ceres Seq. ID no. 13575490
  misc_feature (1)..(310): Pfam Name: Protein of unknown function (DUF791) Pfam Description: Protein of unknown function (DUF791)
  misc_feature (315)..(358): Homolog of NCBI NO: 7487513 NR Description: hypothetical protein T29A15.210 - Arabidopsis
  misc_feature (1)..(289): Homolog of NCBI NO: 7487513 NR Description: hypothetical protein T29A15.210 - Arabidopsis
  misc_feature (1)..(107): Homolog of NCBI NO: 11292198 NR Description: hypothetical protein F2K15.170 - Arabidopsis
  misc_feature (96)..(412): Homolog of NCBI NO: 11292198 NR Description: hypothetical protein F2K15.170 - Arabidopsis
  misc_feature (1)..(414): Homolog of NCBI NO: 37536124 NR Description: putative transporter [Oryza sativa (japonica
  misc_feature (1)..(414): Homolog of NCBI NO: 34902182 NR Description: Putative transporter [Oryza sativa (japonica
  misc_feature (1)..(412): Homolog of NCBI NO: 30693172 NR Description: expressed protein [Arabidopsis thaliana]
  misc_feature (1)..(413): Homolog of NCBI NO: 18417054 NR Description: expressed protein [Arabidopsis thaliana]
  misc_feature (1)..(414): Homolog of NCBI NO: 6633826 NR Description: F1N19.22 [Arabidopsis thaliana]
  misc_feature (1)..(414): Homolog of NCBI NO: 15217708 NR Description: expressed protein [Arabidopsis thaliana]
MMAGDWLQGPYVYYLYSTYGFGKGEIGQLFIAGFGSSMLFGTIVGSLADKQGRKRASITYCITYILSCITKHSPQYKVLMVGRVLGGIATSLLFSAFESWLVAEHNKRGFEQQWLSVTFSKAIFLGNGLVAIIAGLFGNYLVDSLSLGPVAPFDAAACFLAIGMAVIISSWSENYGDPSENKDLLTQFKNAASAIASDEKIALLGAIQSLFEGSMYTFVFLWTPALSPNEEDIPHGFIFATFMLASMLGSSIASRLLAHSSPKVESYMQIVFVISSAALMLPVVTSFLVAPSGVKGGSISFSGCIQLMGFCTFEACVGIFWPSIMKMRSQYIPEEARSTIMNFFRIPLNIFVCLVLYNVDAFPMTVMFGMCSVFLFVASILQRRLMNVAEIHKSRSQEWSAEKEMTSEADPLNP

SEQ ID NO: 25275 - protein, 413 aa, Arabidopsis thaliana
  peptide (1)..(413): Ceres Seq. ID no. 13575491
  misc_feature (1)..(309): Pfam Name: Protein of unknown function (DUF791) Pfam Description: Protein of unknown function (DUF791)
  misc_feature (314)..(357): Homolog of NCBI NO: 7487513 NR Description: hypothetical protein T29A15.210 - Arabidopsis
  misc_feature (1)..(288): Homolog of NCBI NO: 7487513 NR Description: hypothetical protein T29A15.210 - Arabidopsis
  misc_feature (1)..(106): Homolog of NCBI NO: 11292198 NR Description: hypothetical protein F2K15.170 - Arabidopsis
  misc_feature (95)..(411): Homolog of NCBI NO: 11292198 NR Description: hypothetical protein F2K15.170 - Arabidopsis
  misc_feature (1)..(413): Homolog of NCBI NO: 37536124 NR Description: putative transporter [Oryza sativa (japonica
  misc_feature (1)..(413): Homolog of NCBI NO: 34902182 NR Description: Putative transporter [Oryza sativa (japonica
  misc_feature (1)..(411): Homolog of NCBI NO: 30693172 NR Description: expressed protein [Arabidopsis thaliana]
  misc_feature (1)..(412): Homolog of NCBI NO: 18417054 NR Description: expressed protein [Arabidopsis thaliana]
  misc_feature (1)..(413): Homolog of NCBI NO: 6633826 NR Description: F1N19.22 [Arabidopsis thaliana]
  misc_feature (1)..(413): Homolog of NCBI NO: 15217708 NR Description: expressed protein [Arabidopsis thaliana]
MAGDWLQGPYVYYLYSTYGFGKGEIGQLFIAGFGSSMLFGTIVGSLADKQGRKRASITYCITYILSCITKHSPQYKVLMVGRVLGGIATSLLFSAFESWLVAEHNKRGFEQQWLSVTFSKAIFLGNGLVAIIAGLFGNYLVDSLSLGPVAPFDAAACFLAIGMAVIISSWSENYGDPSENKDLLTQFKNAASAIASDEKIALLGAIQSLFEGSMYTFVFLWTPALSPNEEDIPHGFIFATFMLASMLGSSIASRLLAHSSPKVESYMQIVFVISSAALMLPVVTSFLVAPSGVKGGSISFSGCIQLMGFCTFEACVGIFWPSIMKMRSQYIPEEARSTIMNFFRIPLNIFVCLVLYNVDAFPMTVMFGMCSVFLFVASILQRRLMNVAEIHKSRSQEWSAEKEMTSEADPLNP

SEQ ID NO: 25276 - DNA, 1197 bp, Arabidopsis thaliana
  misc_feature (1)..(1197): Ceres Seq. ID no. 12335573
  misc_feature: MA Experiment ID: 108461 Result: Up-regulated in Transcription
  misc_feature: MA Experiment 108461 PARAMETER Experiment Name: At_Germinating_Seeds_cDNA_P Parameter: Age (day) Value: 1 vs. 0
  misc_feature: MA Experiment 108461 PARAMETER Experiment Name: At_Germinating_Seeds_cDNA_P Parameter: Tissue Value: Germinating Seeds
  misc_feature: MA Experiment ID: 108462 Result: Up-regulated in Transcription
  misc_feature: MA Experiment 108462 PARAMETER Experiment Name: At_Germinating_Seeds_cDNA_P Parameter: Age (day) Value: 2 vs. 0
  misc_feature: MA Experiment 108462 PARAMETER Experiment Name: At_Germinating_Seeds_cDNA_P Parameter: Tissue Value: Germinating Seeds
  misc_feature: MA Experiment ID: 108464 Result: Up-regulated in Transcription
  misc_feature: MA Experiment 108464 PARAMETER Experiment Name: At_Germinating_Seeds_cDNA_P Parameter: Age (day) Value: 4 vs. 0
  misc_feature: MA Experiment 108464 PARAMETER Experiment Name: At_Germinating_Seeds_cDNA_P Parameter: Tissue Value: Germinating Seeds
  misc_feature: MA Experiment ID: 108474 Result: Down-regulated in Transcription
  misc_feature: MA Experiment 108474 PARAMETER Experiment Name: At_Drought_Flowers_cDNA_P Parameter: Timepoint (hr) Value: null
  misc_feature: MA Experiment 108474 PARAMETER Experiment Name: At_Drought_Flowers_cDNA_P Parameter: Treatment Value: Drought vs. No Drought
  misc_feature: MA Experiment ID: 108501 Result: Up-regulated in Transcription
  misc_feature: MA Experiment 108501 PARAMETER Experiment Name: At_ap2_floral_buds_cDNA_P Parameter: Plant Line Value: ap2 (Ler.)
  misc_feature: MA Experiment 108501 PARAMETER Experiment Name: At_ap2_floral_buds_cDNA_P Parameter: Tissue Value: Closed Flower
  misc_feature: MA Experiment ID: 108561 Result: Down-regulated in Transcription
  misc_feature: MA Experiment 108561 PARAMETER Experiment Name: At_100uM_ABA_cDNA_P Parameter: Timepoint (hr) Value: 6
  misc_feature: MA Experiment 108561 PARAMETER Experiment Name: At_100uM_ABA_cDNA_P Parameter: Tissue Value: Aerial
  misc_feature: MA Experiment 108561 PARAMETER Experiment Name: At_100uM_ABA_cDNA_P Parameter: Treatment Value: 100uM ABA vs. No Treatment
  misc_feature: MA Experiment ID: 108579 Result: Up-regulated in Transcription
  misc_feature: MA Experiment 108579 PARAMETER Experiment Name: At_4deg_Cold_cDNA_P Parameter: Temperature (deg C) Value: 4 vs. 22
  misc_feature: MA Experiment 108579 PARAMETER Experiment Name: At_4deg_Cold_cDNA_P Parameter: Timepoint (hr) Value: 6
  misc_feature: MA Experiment 108579 PARAMETER Experiment Name: At_4deg_Cold_cDNA_P Parameter: Tissue Value: Aerial
  misc_feature: MA Experiment ID: 108594 Result: Down-regulated in Transcription
  misc_feature: MA Experiment 108594 PARAMETER Experiment Name: At_Ler-rhl_Root_cDNA_P Parameter: Plant Line Value: null
  misc_feature: MA Experiment ID: 108595 Result: Up-regulated in Transcription
  misc_feature: MA Experiment 108595 PARAMETER Experiment Name: At_Ler-pi_Ovule_cDNA_P Parameter: Plant Line Value: null
  misc_feature: MA Experiment ID: 20000071 Result: Down-regulated in Transcription
  misc_feature: MA Experiment 20000071 PARAMETER Experiment Name: At_100uM_ABA_Mutants_cDNA_P Parameter: Plant Line Value: CS8104
  misc_feature: MA Experiment 20000071 PARAMETER Experiment Name: At_100uM_ABA_Mutants_cDNA_P Parameter: Timepoint (hr) Value: 6
  misc_feature: MA Experiment 20000071 PARAMETER Experiment Name: At_100uM_ABA_Mutants_cDNA_P Parameter: Tissue Value: Aerial
  misc_feature: MA Experiment 20000071 PARAMETER Experiment Name: At_100uM_ABA_Mutants_cDNA_P Parameter: Treatment Value: 100uM ABA vs. No Treatment
  misc_feature: MA Experiment ID: 20000113 Result: Down-regulated in Transcription
  misc_feature: MA Experiment 20000113 PARAMETER Experiment Name: At_42deg_Heat_cDNA_P Parameter: Temperature (deg C) Value: 42 vs. 22
  misc_feature: MA Experiment 20000113 PARAMETER Experiment Name: At_42deg_Heat_cDNA_P Parameter: Timepoint (hr) Value: 8
  misc_feature: MA Experiment 20000113 PARAMETER Experiment Name: At_42deg_Heat_cDNA_P Parameter: Tissue Value: Aerial
  misc_feature: MA Experiment ID: 20000117 Result: Down-regulated in Transcription
  misc_feature: MA Experiment 20000117 PARAMETER Experiment Name: At_100uM_ABA_Mutants_cDNA_P Parameter: Plant Line Value: Columbia
  misc_feature: MA Experiment 20000117 PARAMETER Experiment Name: At_100uM_ABA_Mutants_cDNA_P Parameter: Timepoint (hr) Value: 6
  misc_feature: MA Experiment 20000117 PARAMETER Experiment Name: At_100uM_ABA_Mutants_cDNA_P Parameter: Tissue Value: Aerial
  misc_feature: MA Experiment 20000117 PARAMETER Experiment Name: At_100uM_ABA_Mutants_cDNA_P Parameter: Treatment Value: 100uM ABA vs. No Treatment
acttgttcatcttccattccaatctcaagatgcacgcgaagaccgactccgaggtgacaagcctctcagcttcatcgccgactagatctccccgtcgaccagcctacttcgtccaatctccatcacgtgactcccacgatggggagaaaacagcaacatcattccactcaacaccggtactcaccagcccgatgggatctccaccacattctcactcttcctcaagccgcttctccaagatcaacggctcaaaacgtaagggccacgctggagaaaaacagttcgctatgattgaagaagaaggtcttcttgatgatggagatagagaacaagaagctttgcctcgtcgatgttatgttttagctttcattgttggattctctctactctttgctttcttctctttgattctttatgcagctgctaaacctcagaaacctaagatctctgttaagagtataacgtttgagcaacttaaggttcaagctggacaagatgctggaggtataggaactgatatgatcactatgaacgcgacactgagaatgttgtaccgtaacactggtactttctttggtgttcatgtcacttcttctccgattgatcttagcttctcgcagatcactattggctctggctctattaagaagttttatcagtcaaggaaaagccaaagaacagtggtggtgaatgtacttggagacaagattccactctatggaagtggctcaacattagtcccaccaccacctcctgcaccaattccaaaacccaagaagaagaaaggacctatcgttatcgtcgaaccaccagcgcctcctgctccagtaccgatgaggctaaacttcaccgttagatctcgagcttacgtgttggggaagttagttcaacctaagttttacaagagaatcgtgtgcttgattaatttcgaacacaagaaactcagtaaacatattcccatcacgaataactgcactgtcacatctatttaaaagaagaaaaaatacacatgagagtgcggacggtctcgtattgggtagtgcgcctatggccctatacatgttacaaggttacaaggtattgcgtgtggcctaccccaaagcagaataatcatcatcagtgggtttcataaatttaatttacgtaattggtttgagagatttttgttaatgatacacagaaaacgagaagattcgc

SEQ ID NO: 25277 - protein, 329 aa, Arabidopsis thaliana
  peptide (1)..(329): Ceres Seq. ID no. 12335574
  misc_feature (276)..(324): Homolog of NCBI NO: 15227481 NR Description: unknown protein; protein id: At2g41990.1
  misc_feature (10)..(243): Homolog of NCBI NO: 15227481 NR Description: unknown protein; protein id: At2g41990.1
  misc_feature (271)..(326): Homolog of NCBI NO: 32488073 NR Description: OSJNBa0084A10.1 [Oryza sativa (japonica
  misc_feature (24)..(255): Homolog of NCBI NO: 32488073 NR Description: OSJNBa0084A10.1 [Oryza sativa (japonica
  misc_feature (10)..(324): Homolog of NCBI NO: 38345517 NR Description: OSJNBa0039K24.20 [Oryza sativa (japonica
  misc_feature (274)..(324): Homolog of NCBI NO: 5777621 NR Description: CAA30379.1 protein [Oryza sativa]
  misc_feature (9)..(255): Homolog of NCBI NO: 5777621 NR Description: CAA30379.1 protein [Oryza sativa]
  misc_feature (28)..(329): Homolog of NCBI NO: 18401556 NR Description: expressed protein
  misc_feature (10)..(329): Homolog of NCBI NO: 28416677 NR Description: At5g42860 [Arabidopsis thaliana]
  misc_feature (10)..(329): Homolog of NCBI NO: 15239097 NR Description: putative protein; protein id: At5g42860.1
LFIFHSNLKMHAKTDSEVTSLSASSPTRSPRRPAYFVQSPSRDSHDGEKTATSFHSTPVLTSPMGSPPHSHSSSSRFSKINGSKRKGHAGEKQFAMIEEEGLLDDGDREQEALPRRCYVLAFIVGFSLLFAFFSLILYAAAKPQKPKISVKSITFEQLKVQAGQDAGGIGTDMITMNATLRMLYRNTGTFFGVHVTSSPIDLSFSQITIGSGSIKKFYQSRKSQRTVVVNVLGDKIPLYGSGSTLVPPPPPAPIPKPKKKKGPIVIVEPPAPPAPVPMRLNFTVRSRAYVLGKLVQPKFYKRIVCLINFEHKKLSKHIPITNNCTVTSI

SEQ ID NO: 25278 - protein, 320 aa, Arabidopsis thaliana
  peptide (1)..(320): Ceres Seq. ID no. 12335575
  misc_feature (267)..(315): Homolog of NCBI NO: 15227481 NR Description: unknown protein; protein id: At2g41990.1
  misc_feature (1)..(234): Homolog of NCBI NO: 15227481 NR Description: unknown protein; protein id: At2g41990.1
  misc_feature (262)..(317): Homolog of NCBI NO: 32488073 NR Description: OSJNBa0084A10.1 [Oryza sativa (japonica
  misc_feature (15)..(246): Homolog of NCBI NO: 32488073 NR Description: OSJNBa0084A10.1 [Oryza sativa (japonica
  misc_feature (1)..(315): Homolog of NCBI NO: 38345517 NR Description: OSJNBa0039K24.20 [Oryza sativa (japonica
  misc_feature (265)..(315): Homolog of NCBI NO: 5777621 NR Description: CAA30379.1 protein [Oryza sativa]
  misc_feature (1)..(246): Homolog of NCBI NO: 5777621 NR Description: CAA30379.1 protein [Oryza sativa]
  misc_feature (19)..(320): Homolog of NCBI NO: 18401556 NR Description: expressed protein
  misc_feature (1)..(320): Homolog of NCBI NO: 28416677 NR Description: At5g42860 [Arabidopsis thaliana]
  misc_feature (1)..(320): Homolog of NCBI NO: 15239097 NR Description: putative protein; protein id: At5g42860.1
MHAKTDSEVTSLSASSPTRSPRRPAYFVQSPSRDSHDGEKTATSFHSTPVLTSPMGSPPHSHSSSSRFSKINGSKRKGHAGEKQFAMIEEEGLLDDGDREQEALPRRCYVLAFIVGFSLLFAFFSLILYAAAKPQKPKISVKSITFEQLKVQAGQDAGGIGTDMITMNATLRMLYRNTGTFFGVHVTSSPIDLSFSQITIGSGSIKKFYQSRKSQRTVVVNVLGDKIPLYGSGSTLVPPPPPAPIPKPKKKKGPIVIVEPPAPPAPVPMRLNFTVRSRAYVLGKLVQPKFYKRIVCLINFEHKKLSKHIPITNNCTVTSI

SEQ ID NO: 25279 - protein, 266 aa, Arabidopsis thaliana
  peptide (1)..(266): Ceres Seq. ID no. 12335576
  misc_feature (213)..(261): Homolog of NCBI NO: 15227481 NR Description: unknown protein; protein id: At2g41990.1
  misc_feature (1)..(180): Homolog of NCBI NO: 15227481 NR Description: unknown protein; protein id: At2g41990.1
  misc_feature (208)..(263): Homolog of NCBI NO: 32488073 NR Description: OSJNBa0084A10.1 [Oryza sativa (japonica
  misc_feature (1)..(192): Homolog of NCBI NO: 32488073 NR Description: OSJNBa0084A10.1 [Oryza sativa (japonica
  misc_feature (1)..(261): Homolog of NCBI NO: 38345517 NR Description: OSJNBa0039K24.20 [Oryza sativa (japonica
  misc_feature (211)..(261): Homolog of NCBI NO: 5777621 NR Description: CAA30379.1 protein [Oryza sativa]
  misc_feature (1)..(192): Homolog of NCBI NO: 5777621 NR Description: CAA30379.1 protein [Oryza sativa]
  misc_feature (1)..(266): Homolog of NCBI NO: 18401556 NR Description: expressed protein
  misc_feature (1)..(266): Homolog of NCBI NO: 28416677 NR Description: At5g42860 [Arabidopsis thaliana]
  misc_feature (1)..(266): Homolog of NCBI NO: 15239097 NR Description: putative protein; protein id: At5g42860.1
MGSPPHSHSSSSRFSKINGSKRKGHAGEKQFAMIEEEGLLDDGDREQEALPRRCYVLAFIVGFSLLFAFFSLILYAAAKPQKPKISVKSITFEQLKVQAGQDAGGIGTDMITMNATLRMLYRNTGTFFGVHVTSSPIDLSFSQITIGSGSIKKFYQSRKSQRTVVVNVLGDKIPLYGSGSTLVPPPPPAPIPKPKKKKGPIVIVEPPAPPAPVPMRLNFTVRSRAYVLGKLVQPKFYKRIVCLINFEHKKLSKHIPITNNCTVTSI

SEQ ID NO: 25280 - DNA, 1274 bp, Arabidopsis thaliana
  misc_feature (1)..(1274): Ceres Seq. ID no. 12357658
  misc_feature: MA Experiment ID: 108462 Result: Down-regulated in Transcription
  misc_feature: MA Experiment 108462 PARAMETER Experiment Name: At_Germinating_Seeds_cDNA_P Parameter: Age (day) Value: 2 vs. 0
  misc_feature: MA Experiment 108462 PARAMETER Experiment Name: At_Germinating_Seeds_cDNA_P Parameter: Tissue Value: Germinating Seeds
  misc_feature: MA Experiment ID: 20000111 Result: Up-regulated in Transcription
  misc_feature: MA Experiment 20000111 PARAMETER Experiment Name: At_42deg_Heat_cDNA_P Parameter: Temperature (deg C) Value: 42 vs. 22
  misc_feature: MA Experiment 20000111 PARAMETER Experiment Name: At_42deg_Heat_cDNA_P Parameter: Timepoint (hr) Value: 6
  misc_feature: MA Experiment 20000111 PARAMETER Experiment Name: At_42deg_Heat_cDNA_P Parameter: Tissue Value: Aerial
  misc_feature: MA Experiment ID: 20000112 Result: Up-regulated in Transcription
  misc_feature: MA Experiment 20000112 PARAMETER Experiment Name: At_42deg_Heat_cDNA_P Parameter: Temperature (deg C) Value: 42 vs. 22
  misc_feature: MA Experiment 20000112 PARAMETER Experiment Name: At_42deg_Heat_cDNA_P Parameter: Timepoint (hr) Value: 2
  misc_feature: MA Experiment 20000112 PARAMETER Experiment Name: At_42deg_Heat_cDNA_P Parameter: Tissue Value: Aerial
  misc_feature: MA Experiment ID: 20000113 Result: Up-regulated in Transcription
  misc_feature: MA Experiment 20000113 PARAMETER Experiment Name: At_42deg_Heat_cDNA_P Parameter: Temperature (deg C) Value: 42 vs. 22
  misc_feature: MA Experiment 20000113 PARAMETER Experiment Name: At_42deg_Heat_cDNA_P Parameter: Timepoint (hr) Value: 8
  misc_feature: MA Experiment 20000113 PARAMETER Experiment Name: At_42deg_Heat_cDNA_P Parameter: Tissue Value: Aerial
  misc_feature: MA Experiment ID: 20000184 Result: Down-regulated in Transcription
  misc_feature: MA Experiment 20000184 PARAMETER Experiment Name: At_Shoots__P Parameter: Age (day) Value: 7
  misc_feature: MA Experiment 20000184 PARAMETER Experiment Name: At_Shoots__P Parameter: Tissue Value: Shoots vs. Whole Plant
ctcgaaatctgaatccagagattaaacaaaaattggtattgcgaatgatcgattcttcttcctctaaactctgattcctgaacggacttgctttgacacagcagaccgtaaatcgggatgggtgctcctaagcagaaatggactcaagaagaagaatcagctttaaagtctggagttataaagcatggacctggtaaatggcgcacaattctcaaagatcctgaatttagcggagtcttgtacctgcgttccaatgttgatcttaaggataaatggagaaacatgagtgtcatggcaaatggctggggatcgcgcgaaaagtctaggttagctgttaaaaggacgttctcccttcctaaacaggaagagaactcactagccctaaccaattctttgcaaagtgatgaagaaaatgtggatgccacctctggactccaagtttcttctaatcctcctccaaggagacctaatgtaaggttggatagccttataatggaagcaatagctaccctgaaagagcctggtggctgtaacaaaacaacaattggtgcctacattgaggatcaatatcatgctccaccagacttcaaacggttgttgtctaccaagctaaagtacttgacatcttgcgggaaacttgtgaaggttaaacgtaagtacagaattccaaactccacctccttgtcttcccacaggagaaaaggtctgggggtgtttggaggaaaacagaggacttcttctttgccttcacctaaaacagacatagatgaagtgaattttcagacaaggtcacagattgatacagagatagccagaatgaagagtatgaacgtacatgaggcggcagcagttgcagcacaggcagtagcagaggcagaagctgccatggcagaggctgaggaagctgcaaaggaagcggaggcagcagaagccgaagcagaagtagctcaagctttcgctgaggaagcttcaaagacattgaaaggaagaaacatctgcaaaatgatgatccgtgcctgaggtaatggaaagcgagagaagaaggagactaaatgtgaagagagagtagagagaagcctagtgtttgtgttgatcattctctttacttgggaagttgttttttagtagtaagcaatcaaatatgtttgtcagtatgtcgtcgctctgactcttttgattcctgcacaacttttgggaaaaaatgttttatttggctcttctcactctccaatatacatacaattatcgttagtaatgtgtataatttatagacc

SEQ ID NO: 25281 - protein, 300 aa, Arabidopsis thaliana
  peptide (1)..(300): Ceres Seq. ID no. 12357659
  misc_feature (123)..(185): Pfam Name: linker histone H1 and H5 family Pfam Description: linker histone H1 and H5 family
  misc_feature (1)..(291): Homolog of NCBI NO: 18481426 NR Description: telomere repeat binding factor 2 [Arabidopsis
  misc_feature (1)..(291): Homolog of NCBI NO: 15240783 NR Description: putative protein
  misc_feature (1)..(297): Homolog of NCBI NO: 34105719 NR Description: Single myb histone 5 [Zea mays subsp. mays]
  misc_feature (1)..(300): Homolog of NCBI NO: 33286863 NR Description: Single myb histone 1 [Zea mays subsp. mays]
  misc_feature (1)..(292): Homolog of NCBI NO: 34912214 NR Description: putative telomere repeat binding factor
  misc_feature (1)..(297): Homolog of NCBI NO: 34105723 NR Description: Single myb histone 6 [Zea mays subsp. mays]
  misc_feature (1)..(297): Homolog of NCBI NO: 25405344 NR Description: hypothetical protein F2J10.16 [imported] -
  misc_feature (1)..(300): Homolog of NCBI NO: 18402853 NR Description: DNA-binding protein PcMYB1, putative
  misc_feature (1)..(300): Homolog of NCBI NO: 18481420 NR Description: telomere repeat binding factor 1 [Arabidopsis
  misc_feature (1)..(300): Homolog of NCBI NO: 21593573 NR Description: DNA-binding protein PcMYB1, putative [Arabidopsis
MGAPKQKWTQEEESALKSGVIKHGPGKWRTILKDPEFSGVLYLRSNVDLKDKWRNMSVMANGWGSREKSRLAVKRTFSLPKQEENSLALTNSLQSDEENVDATSGLQVSSNPPPRRPNVRLDSLIMEAIATLKEPGGCNKTTIGAYIEDQYHAPPDFKRLLSTKLKYLTSCGKLVKVKRKYRIPNSTSLSSHRRKGLGVFGGKQRTSSLPSPKTDIDEVNFQTRSQIDTEIARMKSMNVHEAAAVAAQAVAEAEAAMAEAEEAAKEAEAAEAEAEVAQAFAEEASKTLKGRNICKMMIRA

SEQ ID NO: 25282 - protein, 245 aa, Arabidopsis thaliana
  peptide (1)..(245): Ceres Seq. ID no. 12357660
  misc_feature (68)..(130): Pfam Name: linker histone H1 and H5 family Pfam Description: linker histone H1 and H5 family
  misc_feature (1)..(245): Homolog of NCBI NO: 21593573 NR Description: DNA-binding protein PcMYB1, putative [Arabidopsis
  misc_feature (1)..(236): Homolog of NCBI NO: 18481426 NR Description: telomere repeat binding factor 2 [Arabidopsis
  misc_feature (1)..(236): Homolog of NCBI NO: 15240783 NR Description: putative protein
  misc_feature (1)..(242): Homolog of NCBI NO: 34105719 NR Description: Single myb histone 5 [Zea mays subsp. mays]
  misc_feature (1)..(245): Homolog of NCBI NO: 33286863 NR Description: Single myb histone 1 [Zea mays subsp. mays]
  misc_feature (1)..(237): Homolog of NCBI NO: 34912214 NR Description: putative telomere repeat binding factor
  misc_feature (1)..(242): Homolog of NCBI NO: 34105723 NR Description: Single myb histone 6 [Zea mays subsp. mays]
  misc_feature (1)..(242): Homolog of NCBI NO: 25405344 NR Description: hypothetical protein F2J10.16 [imported] -
  misc_feature (1)..(245): Homolog of NCBI NO: 18402853 NR Description: DNA-binding protein PcMYB1, putative
  misc_feature (1)..(245): Homolog of NCBI NO: 18481420 NR Description: telomere repeat binding factor 1 [Arabidopsis
MSVMANGWGSREKSRLAVKRTFSLPKQEENSLALTNSLQSDEENVDATSGLQVSSNPPPRRPNVRLDSLIMEAIATLKEPGGCNKTTIGAYIEDQYHAPPDFKRLLSTKLKYLTSCGKLVKVKRKYRIPNSTSLSSHRRKGLGVFGGKQRTSSLPSPKTDIDEVNFQTRSQIDTEIARMKSMNVHEAAAVAAQAVAEAEAAMAEAEEAAKEAEAAEAEAEVAQAFAEEASKTLKGRNICKMMIRA

SEQ ID NO: 25283 - protein, 242 aa, Arabidopsis thaliana
  peptide (1)..(242): Ceres Seq. ID no. 12357661
  misc_feature (65)..(127): Pfam Name: linker histone H1 and H5 family Pfam Description: linker histone H1 and H5 family
  misc_feature (1)..(233): Homolog of NCBI NO: 18481426 NR Description: telomere repeat binding factor 2 [Arabidopsis
  misc_feature (1)..(233): Homolog of NCBI NO: 15240783 NR Description: putative protein
  misc_feature (1)..(239): Homolog of NCBI NO: 34105719 NR Description: Single myb histone 5 [Zea mays subsp. mays]
  misc_feature (1)..(242): Homolog of NCBI NO: 33286863 NR Description: Single myb histone 1 [Zea mays subsp. mays]
  misc_feature (1)..(234): Homolog of NCBI NO: 34912214 NR Description: putative telomere repeat binding factor
  misc_feature (1)..(239): Homolog of NCBI NO: 34105723 NR Description: Single myb histone 6 [Zea mays subsp. mays]
  misc_feature (1)..(239): Homolog of NCBI NO: 25405344 NR Description: hypothetical protein F2J10.16 [imported] -
  misc_feature (1)..(242): Homolog of NCBI NO: 18402853 NR Description: DNA-binding protein PcMYB1, putative
  misc_feature (1)..(242): Homolog of NCBI NO: 18481420 NR Description: telomere repeat binding factor 1 [Arabidopsis
  misc_feature (1)..(242): Homolog of NCBI NO: 21593573 NR Description: DNA-binding protein PcMYB1, putative [Arabidopsis
MANGWGSREKSRLAVKRTFSLPKQEENSLALTNSLQSDEENVDATSGLQVSSNPPPRRPNVRLDSLIMEAIATLKEPGGCNKTTIGAYIEDQYHAPPDFKRLLSTKLKYLTSCGKLVKVKRKYRIPNSTSLSSHRRKGLGVFGGKQRTSSLPSPKTDIDEVNFQTRSQIDTEIARMKSMNVHEAAAVAAQAVAEAEAAMAEAEEAAKEAEAAEAEAEVAQAFAEEASKTLKGRNICKMMIRA

SEQ ID NO: 25284 - DNA, 1306 bp, Arabidopsis thaliana
  misc_feature (1)..(1306): Ceres Seq. ID no. 12335581
  misc_feature: MA Experiment ID: 108433 Result: Down-regulated in Transcription
  misc_feature: MA Experiment 108433 PARAMETER Experiment Name: At_rhl_Mutant2_cDNA_P Parameter: Age (day) Value: 7
  misc_feature: MA Experiment 108433 PARAMETER Experiment Name: At_rhl_Mutant2_cDNA_P Parameter: Organism Value: A. thaliana
  misc_feature: MA Experiment 108433 PARAMETER Experiment Name: At_rhl_Mutant2_cDNA_P Parameter: Plant Line Value: rhl Mutant vs. wt landsburg
  misc_feature: MA Experiment 108433 PARAMETER Experiment Name: At_rhl_Mutant2_cDNA_P Parameter: Tissue Value: Roots
  misc_feature: MA Experiment ID: 108435 Result: Up-regulated in Transcription
  misc_feature: MA Experiment 108435 PARAMETER Experiment Name: At_stm_Mutants_cDNA_P Parameter: Plant Line Value: wt Landsburg vs stm
  misc_feature: MA Experiment 108435 PARAMETER Experiment Name: At_stm_Mutants_cDNA_P Parameter: Tissue Value: Shoot Apical Meristem Region
  misc_feature: MA Experiment ID: 108461 Result: Up-regulated in Transcription
  misc_feature: MA Experiment 108461 PARAMETER Experiment Name: At_Germinating_Seeds_cDNA_P Parameter: Age (day) Value: 1 vs. 0
  misc_feature: MA Experiment 108461 PARAMETER Experiment Name: At_Germinating_Seeds_cDNA_P Parameter: Tissue Value: Germinating Seeds
  misc_feature: MA Experiment ID: 108464 Result: Up-regulated in Transcription
  misc_feature: MA Experiment 108464 PARAMETER Experiment Name: At_Germinating_Seeds_cDNA_P Parameter: Age (day) Value: 4 vs. 0
  misc_feature: MA Experiment 108464 PARAMETER Experiment Name: At_Germinating_Seeds_cDNA_P Parameter: Tissue Value: Germinating Seeds
  misc_feature: MA Experiment ID: 20000087 Result: Up-regulated in Transcription
  misc_feature: MA Experiment 20000087 PARAMETER Experiment Name: At_100uM_ABA_Mutants_cDNA_P Parameter: Plant Line Value: WS
  misc_feature: MA Experiment 20000087 PARAMETER Experiment Name: At_100uM_ABA_Mutants_cDNA_P Parameter: Timepoint (hr) Value: 6
  misc_feature: MA Experiment 20000087 PARAMETER Experiment Name: At_100uM_ABA_Mutants_cDNA_P Parameter: Tissue Value: Aerial
  misc_feature: MA Experiment 20000087 PARAMETER Experiment Name: At_100uM_ABA_Mutants_cDNA_P Parameter: Treatment Value: 100uM ABA vs. No Treatment
  misc_feature: MA Experiment ID: 20000117 Result: Up-regulated in Transcription
  misc_feature: MA Experiment 20000117 PARAMETER Experiment Name: At_100uM_ABA_Mutants_cDNA_P Parameter: Plant Line Value: Columbia
  misc_feature: MA Experiment 20000117 PARAMETER Experiment Name: At_100uM_ABA_Mutants_cDNA_P Parameter: Timepoint (hr) Value: 6
  misc_feature: MA Experiment 20000117 PARAMETER Experiment Name: At_100uM_ABA_Mutants_cDNA_P Parameter: Tissue Value: Aerial
  misc_feature: MA Experiment 20000117 PARAMETER Experiment Name: At_100uM_ABA_Mutants_cDNA_P Parameter: Treatment Value: 100uM ABA vs. No Treatment
  misc_feature: MA Experiment ID: 20000179 Result: Up-regulated in Transcription
  misc_feature: MA Experiment 20000179 PARAMETER Experiment Name: At_Germinating_Seeds_P Parameter: Age (hr) Value: 6 vs. 0
  misc_feature: MA Experiment 20000179 PARAMETER Experiment Name: At_Germinating_Seeds_P Parameter: Tissue Value: Germinating Seeds
  misc_feature: MA Experiment ID: 20000180 Result: Up-regulated in Transcription
  misc_feature: MA Experiment 20000180 PARAMETER Experiment Name: At_Germinating_Seeds_P Parameter: Age (hr) Value: 24 vs. 0
  misc_feature: MA Experiment 20000180 PARAMETER Experiment Name: At_Germinating_Seeds_P Parameter: Tissue Value: Germinating Seeds
  misc_feature: MA Experiment ID: 20000184 Result: Down-regulated in Transcription
  misc_feature: MA Experiment 20000184 PARAMETER Experiment Name: At_Shoots__P Parameter: Age (day) Value: 7
  misc_feature: MA Experiment 20000184 PARAMETER Experiment Name: At_Shoots__P Parameter: Tissue Value: Shoots vs. Whole Plant
  misc_feature: MA Experiment ID: 20000224 Result: Up-regulated in Transcription
  misc_feature: MA Experiment ID: 20000234 Result: Up-regulated in Transcription
  misc_feature: MA Experiment 20000234 PARAMETER Experiment Name: At_Siliques_P Parameter: Age (day) Value: 21
  misc_feature: MA Experiment 20000234 PARAMETER Experiment Name: At_Siliques_P Parameter: Organism Value: A. thaliana
  misc_feature: MA Experiment 20000234 PARAMETER Experiment Name: At_Siliques_P Parameter: Plant Line Value: WS
  misc_feature: MA Experiment 20000234 PARAMETER Experiment Name: At_Siliques_P Parameter: Tissue Value: Less Than 5mm Siliques vs. Whole Plant
  misc_feature: MA Experiment ID: 20000235 Result: Up-regulated in Transcription
  misc_feature: MA Experiment 20000235 PARAMETER Experiment Name: At_Siliques_P Parameter: Age (day) Value: 21
  misc_feature: MA Experiment 20000235 PARAMETER Experiment Name: At_Siliques_P Parameter: Organism Value: A. thaliana
  misc_feature: MA Experiment 20000235 PARAMETER Experiment Name: At_Siliques_P Parameter: Plant Line Value: WS
  misc_feature: MA Experiment 20000235 PARAMETER Experiment Name: At_Siliques_P Parameter: Tissue Value: 5-10mm Siliques vs. Whole Plant
  misc_feature: MA Experiment ID: 20000264 Result: Up-regulated in Transcription
  misc_feature: MA Experiment 20000264 PARAMETER Experiment Name: At_Open_Flower_P Parameter: Age (day) Value: 21
  misc_feature: MA Experiment 20000264 PARAMETER Experiment Name: At_Open_Flower_P Parameter: Plant Line Value: WS
  misc_feature: MA Experiment 20000264 PARAMETER Experiment Name: At_Open_Flower_P Parameter: Tissue Value: Open Flower vs. Whole Plant
  misc_feature: MA Experiment ID: 20000265 Result: Up-regulated in Transcription
  misc_feature: MA Experiment 20000265 PARAMETER Experiment Name: At_Open_Flower_P Parameter: Age (day) Value: 21
  misc_feature: MA Experiment 20000265 PARAMETER Experiment Name: At_Open_Flower_P Parameter: Plant Line Value: WS
  misc_feature: MA Experiment 20000265 PARAMETER Experiment Name: At_Open_Flower_P Parameter: Tissue Value: Closed Flower vs. Whole Plant
  misc_feature: MA Experiment ID: 20000286 Result: Up-regulated in Transcription
  misc_feature: MA Experiment 20000286 PARAMETER Experiment Name: At_Open_Flower_P Parameter: Age (day) Value: 21
  misc_feature: MA Experiment 20000286 PARAMETER Experiment Name: At_Open_Flower_P Parameter: Plant Line Value: WS
  misc_feature: MA Experiment 20000286 PARAMETER Experiment Name: At_Open_Flower_P Parameter: Tissue Value: Half Open vs. Whole Plant
  misc_feature: MA Experiment ID: 20000437 Result: Up-regulated in Transcription
  misc_feature: MA Experiment 20000437 PARAMETER Experiment Name: At_Drought_P Parameter: Age (day) Value: 8
  misc_feature: MA Experiment 20000437 PARAMETER Experiment Name: At_Drought_P Parameter: Organism Value: A. thaliana
  misc_feature: MA Experiment 20000437 PARAMETER Experiment Name: At_Drought_P Parameter: Plant Line Value: WS
  misc_feature: MA Experiment 20000437 PARAMETER Experiment Name: At_Drought_P Parameter: Timepoint (hr) Value: 24
  misc_feature: MA Experiment 20000437 PARAMETER Experiment Name: At_Drought_P Parameter: Tissue Value: Whole Plant
  misc_feature: MA Experiment 20000437 PARAMETER Experiment Name: At_Drought_P Parameter: Treatment Value: Drought vs. No Drought
  misc_feature: MA Experiment ID: 20000438 Result: Down-regulated in Transcription
  misc_feature: MA Experiment 20000438 PARAMETER Experiment Name: At_Shoots__P Parameter: Age (day) Value: 14
  misc_feature: MA Experiment 20000438 PARAMETER Experiment Name: At_Shoots__P Parameter: Tissue Value: Shoots vs. Whole Plant
  misc_feature: MA Experiment ID: 20000456 Result: Up-regulated in Transcription
  misc_feature: MA Experiment 20000456 PARAMETER Experiment Name: At_100uM_BA_P Parameter: Age (day) Value: 14
  misc_feature: MA Experiment 20000456 PARAMETER Experiment Name: At_100uM_BA_P Parameter: Organism Value: A. thaliana
  misc_feature: MA Experiment 20000456 PARAMETER Experiment Name: At_100uM_BA_P Parameter: Plant Line Value: WS
  misc_feature: MA Experiment 20000456 PARAMETER Experiment Name: At_100uM_BA_P Parameter: Timepoint (hr) Value: 6
  misc_feature: MA Experiment 20000456 PARAMETER Experiment Name: At_100uM_BA_P Parameter: Tissue Value: Aerial
  misc_feature: MA Experiment 20000456 PARAMETER Experiment Name: At_100uM_BA_P Parameter: Treatment Value: 100uM BA vs. No Treatment
  misc_feature: MA Experiment ID: 20000573 Result: Down-regulated in Transcription
  misc_feature: MA Experiment 20000573 PARAMETER Experiment Name: At_100uM_ABA_Mutants__P Parameter: Organism Value: A. thaliana
  misc_feature: MA Experiment 20000573 PARAMETER Experiment Name: At_100uM_ABA_Mutants__P Parameter: Plant Line Value: CS22 vs. Ler wt
  misc_feature: MA Experiment 20000573 PARAMETER Experiment Name: At_100uM_ABA_Mutants__P Parameter: Timepoint (hr) Value: N/A
  misc_feature: MA Experiment 20000573 PARAMETER Experiment Name: At_100uM_ABA_Mutants__P Parameter: Tissue Value: Whole Plant
  misc_feature: MA Experiment 20000573 PARAMETER Experiment Name: At_100uM_ABA_Mutants__P Parameter: Treatment Value: None
  misc_feature: MA Experiment ID: 20001247 Result: Down-regulated in Transcription
  misc_feature: MA Experiment 20001247 PARAMETER Experiment Name: At_Far-red-induction_P Parameter: Age (day) Value: 7
  misc_feature: MA Experiment 20001247 PARAMETER Experiment Name: At_Far-red-induction_P Parameter: Light Value: Far-red vs. White
  misc_feature: MA Experiment 20001247 PARAMETER Experiment Name: At_Far-red-induction_P Parameter: Organism Value: A. thaliana
  misc_feature: MA Experiment 20001247 PARAMETER Experiment Name: At_Far-red-induction_P Parameter: Plant Line Value: Columbia
  misc_feature: MA Experiment 20001247 PARAMETER Experiment Name: At_Far-red-induction_P Parameter: Timepoint (hr) Value: 1
  misc_feature: MA Experiment 20001247 PARAMETER Experiment Name: At_Far-red-induction_P Parameter: Tissue Value: Whole Plant
  misc_feature: MA Experiment ID: 20001248 Result: Down-regulated in Transcription
  misc_feature: MA Experiment 20001248 PARAMETER Experiment Name: At_Far-red-induction_P Parameter: Age (day) Value: 7
  misc_feature: MA Experiment 20001248 PARAMETER Experiment Name: At_Far-red-induction_P Parameter: Light Value: Far-red vs. White
  misc_feature: MA Experiment 20001248 PARAMETER Experiment Name: At_Far-red-induction_P Parameter: Organism Value: A. thaliana
  misc_feature: MA Experiment 20001248 PARAMETER Experiment Name: At_Far-red-induction_P Parameter: Plant Line Value: Columbia
  misc_feature: MA Experiment 20001248 PARAMETER Experiment Name: At_Far-red-induction_P Parameter: Timepoint (hr) Value: 4
  misc_feature: MA Experiment 20001248 PARAMETER Experiment Name: At_Far-red-induction_P Parameter: Tissue Value: Whole Plant
  misc_feature: MA Experiment ID: 20001450 Result: Down-regulated in Transcription
  misc_feature: MA Experiment 20001450 PARAMETER Experiment Name: At_Far-red-induction_P Parameter: Age (day) Value: 7
  misc_feature: MA Experiment 20001450 PARAMETER Experiment Name: At_Far-red-induction_P Parameter: Light Value: Far-red vs. White
  misc_feature: MA Experiment 20001450 PARAMETER Experiment Name: At_Far-red-induction_P Parameter: Organism Value: A. thaliana
  misc_feature: MA Experiment 20001450 PARAMETER Experiment Name: At_Far-red-induction_P Parameter: Plant Line Value: Columbia
  misc_feature: MA Experiment 20001450 PARAMETER Experiment Name: At_Far-red-induction_P Parameter: Timepoint (hr) Value: 8
  misc_feature: MA Experiment 20001450 PARAMETER Experiment Name: At_Far-red-induction_P Parameter: Tissue Value: Whole Plant
  misc_feature: MA Experiment ID: 20001451 Result: Down-regulated in Transcription
  misc_feature: MA Experiment 20001451 PARAMETER Experiment Name: At_Far-red-induction_P Parameter: Age (day) Value: 7
  misc_feature: MA Experiment 20001451 PARAMETER Experiment Name: At_Far-red-induction_P Parameter: Light Value: Far-red vs. White
  misc_feature: MA Experiment 20001451 PARAMETER Experiment Name: At_Far-red-induction_P Parameter: Organism Value: A. thaliana
  misc_feature: MA Experiment 20001451 PARAMETER Experiment Name: At_Far-red-induction_P Parameter: Plant Line Value: Columbia
  misc_feature: MA Experiment 20001451 PARAMETER Experiment Name: At_Far-red-induction_P Parameter: Timepoint (hr) Value: 24
  misc_feature: MA Experiment 20001451 PARAMETER Experiment Name: At_Far-red-induction_P Parameter: Tissue Value: Whole Plant
  misc_feature: MA Experiment ID: 20001555 Result: Up-regulated in Transcription
  misc_feature: MA Experiment 20001555 PARAMETER Experiment Name: At_Drought_Soil_Dry_P Parameter: Age (day) Value: 24
  misc_feature: MA Experiment 20001555 PARAMETER Experiment Name: At_Drought_Soil_Dry_P Parameter: Organism Value: A. thaliana
  misc_feature: MA Experiment 20001555 PARAMETER Experiment Name: At_Drought_Soil_Dry_P Parameter: Plant Line Value: WS
  misc_feature: MA Experiment 20001555 PARAMETER Experiment Name: At_Drought_Soil_Dry_P Parameter: Post Timepoint (hr) Value: None
  misc_feature: MA Experiment 20001555 PARAMETER Experiment Name: At_Drought_Soil_Dry_P Parameter: Post-Treatment Value: None
  misc_feature: MA Experiment 20001555 PARAMETER Experiment Name: At_Drought_Soil_Dry_P Parameter: Timepoint (day) Value: 10
  misc_feature: MA Experiment 20001555 PARAMETER Experiment Name: At_Drought_Soil_Dry_P Parameter: Treatment Value: Drought vs. No Drought
  misc_feature: MA Experiment ID: 20001556 Result: Up-regulated in Transcription
  misc_feature: MA Experiment 20001556 PARAMETER Experiment Name: At_Drought_Soil_Dry_P Parameter: Age (day) Value: 26
  misc_feature: MA Experiment 20001556 PARAMETER Experiment Name: At_Drought_Soil_Dry_P Parameter: Organism Value: A. thaliana
  misc_feature: MA Experiment 20001556 PARAMETER Experiment Name: At_Drought_Soil_Dry_P Parameter: Plant Line Value: WS
  misc_feature: MA Experiment 20001556 PARAMETER Experiment Name: At_Drought_Soil_Dry_P Parameter: Post Timepoint (hr) Value: None
  misc_feature: MA Experiment 20001556 PARAMETER Experiment Name: At_Drought_Soil_Dry_P Parameter: Post-Treatment Value: None
  misc_feature: MA Experiment 20001556 PARAMETER Experiment Name: At_Drought_Soil_Dry_P Parameter: Timepoint (day) Value: 12
  misc_feature: MA Experiment 20001556 PARAMETER Experiment Name: At_Drought_Soil_Dry_P Parameter: Treatment Value: Drought vs. No Drought
  misc_feature: MA Experiment ID: 20001557 Result: Up-regulated in Transcription
  misc_feature: MA Experiment 20001557 PARAMETER Experiment Name: At_Drought_Soil_Dry_P Parameter: Age (day) Value: 27
  misc_feature: MA Experiment 20001557 PARAMETER Experiment Name: At_Drought_Soil_Dry_P Parameter: Organism Value: A. thaliana
  misc_feature: MA Experiment 20001557 PARAMETER Experiment Name: At_Drought_Soil_Dry_P Parameter: Plant Line Value: WS
  misc_feature: MA Experiment 20001557 PARAMETER Experiment Name: At_Drought_Soil_Dry_P Parameter: Post Timepoint (hr) Value: 3
  misc_feature: MA Experiment 20001557 PARAMETER Experiment Name: At_Drought_Soil_Dry_P Parameter: Post-Treatment Value: Re-Water vs. No Drought
  misc_feature: MA Experiment 20001557 PARAMETER Experiment Name: At_Drought_Soil_Dry_P Parameter: Timepoint (day) Value: 13
  misc_feature: MA Experiment 20001557 PARAMETER Experiment Name: At_Drought_Soil_Dry_P Parameter: Treatment Value: Drought vs. No Drought
  misc_feature: MA Experiment ID: 20001558 Result: Up-regulated in Transcription
  misc_feature: MA Experiment 20001558 PARAMETER Experiment Name: At_Drought_Soil_Dry_P Parameter: Age (day) Value: 27
  misc_feature: MA Experiment 20001558 PARAMETER Experiment Name: At_Drought_Soil_Dry_P Parameter: Organism Value: A. thaliana
  misc_feature: MA Experiment 20001558 PARAMETER Experiment Name: At_Drought_Soil_Dry_P Parameter: Plant Line Value: WS
  misc_feature: MA Experiment 20001558 PARAMETER Experiment Name: At_Drought_Soil_Dry_P Parameter: Post Timepoint (hr) Value: 6
  misc_feature: MA Experiment 20001558 PARAMETER Experiment Name: At_Drought_Soil_Dry_P Parameter: Post-Treatment Value: Re-Water vs. No Drought
  misc_feature: MA Experiment 20001558 PARAMETER Experiment Name: At_Drought_Soil_Dry_P Parameter: Timepoint (day) Value: 13
  misc_feature: MA Experiment 20001558 PARAMETER Experiment Name: At_Drought_Soil_Dry_P Parameter: Treatment Value: Drought vs. No Drought
  misc_feature: MA Experiment ID: 20001560 Result: Up-regulated in Transcription
  misc_feature: MA Experiment 20001560 PARAMETER Experiment Name: At_Drought_Soil_Dry_P Parameter: Age (day) Value: 28
  misc_feature: MA Experiment 20001560 PARAMETER Experiment Name: At_Drought_Soil_Dry_P Parameter: Organism Value: A. thaliana
  misc_feature: MA Experiment 20001560 PARAMETER Experiment Name: At_Drought_Soil_Dry_P Parameter: Plant Line Value: WS
  misc_feature: MA Experiment 20001560 PARAMETER Experiment Name: At_Drought_Soil_Dry_P Parameter: Post Timepoint (hr) Value: None
  misc_feature: MA Experiment 20001560 PARAMETER Experiment Name: At_Drought_Soil_Dry_P Parameter: Post-Treatment Value: None
  misc_feature: MA Experiment 20001560 PARAMETER Experiment Name: At_Drought_Soil_Dry_P Parameter: Timepoint (day) Value: 14
  misc_feature: MA Experiment 20001560 PARAMETER Experiment Name: At_Drought_Soil_Dry_P Parameter: Treatment Value: Drought vs. No Drought
  misc_feature: MA Experiment ID: 20001904 Result: Up-regulated in Transcription
  misc_feature: MA Experiment 20001904 PARAMETER Experiment Name: At_Drought_Reproduction_P Parameter: Age (day) Value: 37
  misc_feature: MA Experiment 20001904 PARAMETER Experiment Name: At_Drought_Reproduction_P Parameter: Organism Value: A. thaliana
  misc_feature: MA Experiment 20001904 PARAMETER Experiment Name: At_Drought_Reproduction_P Parameter: Plant Line Value: WS
  misc_feature: MA Experiment 20001904 PARAMETER Experiment Name: At_Drought_Reproduction_P Parameter: Timepoint (day) Value: 7
  misc_feature: MA Experiment 20001904 PARAMETER Experiment Name: At_Drought_Reproduction_P Parameter: Tissue Value: Rosettes
  misc_feature: MA Experiment 20001904 PARAMETER Experiment Name: At_Drought_Reproduction_P Parameter: Treatment Value: Drought vs. No Drought
  misc_feature: MA Experiment ID: 20001905 Result: Up-regulated in Transcription
  misc_feature: MA Experiment 20001905 PARAMETER Experiment Name: At_Drought_Reproduction_P Parameter: Age (day) Value: 40
  misc_feature: MA Experiment 20001905 PARAMETER Experiment Name: At_Drought_Reproduction_P Parameter: Organism Value: A. thaliana
  misc_feature: MA Experiment 20001905 PARAMETER Experiment Name: At_Drought_Reproduction_P Parameter: Plant Line Value: WS
  misc_feature: MA Experiment 20001905 PARAMETER Experiment Name: At_Drought_Reproduction_P Parameter: Timepoint (day) Value: 10
  misc_feature: MA Experiment 20001905 PARAMETER Experiment Name: At_Drought_Reproduction_P Parameter: Tissue Value: Rosettes
  misc_feature: MA Experiment 20001905 PARAMETER Experiment Name: At_Drought_Reproduction_P Parameter: Treatment Value: Drought vs. No Drought
cttctctccttctctcccttttctctctctctcgaagatatcgcctttaattccttcttcttcttctgatttcttcaaagattcatttcttagagatctcagcttctgtaagagtaggctagctaccaaaaaaaaagaaatagaaaaaaacattgatgcttaatcagcagttcttggtgtttgagacacatgtctccaataatactcagtgagatctttctctctgggtttatgttaaattccacaatcaggcgcaggacccatcttgttcaatctttctctgttgtcttcctttactggctttactatgtctcatgatctctgaacttatctccagttttatatctatacgcataattacaacaaaaccctagtttcttttcaaatttctcttcttcgtttttcgtcatctgggtcctgtcctgttctgttgtgtcttgttctgttctgtttttaattcccctaaaaacccattttaaaatattttatctctcttctcttaaaaaaaactcttccctgtttttgtttgtgtgttactaaatggaatcgtcgtcgtcgggaacaacttcgtcgacgattcaaacgtcgtcaggatcggaggagagtctcatggagcagaggaaacgtaaacggatgctctcaaaccgtgaatctgcaaggagatcaagaatgaagaaacaaaagctcctagacgatctaacggctcaggttaatcatctgaaaaaagagaacacggagatcgtgacaagtgtcagcatcacaacgcaacactacctaaccgttgaagcagagaactctgttctcagagctcagcttgatgaacttaaccacaggctccaatctctcaacgacatcatcgagttcctcgacagtagcaacaacaacaacaacaacaacatgggcatgtgttcgaaccctctggttggtttggagtgtgatgatttcttcgtgaatcagatgaacatgtcttatattatgaaccagcctctcatggcgtcttctgatgctttaatgtattaaatgtggacctaaaaaccccctcgaaatcacaaagaaatggggccgtttttatttgtccgatttagagacatgtccaaagagagagatttatatataaaaatgggtctgttgtttgatttgtttccatttcaaatttttgtttgtttgggtccgttttaggcgttaggtatctctaagcatcatcgttatgagtgtgtctgtaataaaggctctgttgccgcatgagtacaaagtgttttcttaatattgtaatatgcttattactttctttttattcttaagtact

SEQ ID NO: 25285 - protein, 159 aa, Arabidopsis thaliana
  peptide (1)..(159): Ceres Seq. ID no. 12335582
  misc_feature (23)..(87): Pfam Name: bZIP transcription factor Pfam Description: bZIP transcription factor
  misc_feature (23)..(87): Pfam Name: bZIP transcription factor Pfam Description: bZIP transcription factor
  misc_feature (3)..(159): Homolog of NCBI NO: 16580130 NR Description: bZIP transcription factor BZI-2 [Nicotiana
  misc_feature (3)..(159): Homolog of NCBI NO: 4457221 NR Description: putative bZIP DNA-binding protein [Capsicum
  misc_feature (3)..(159): Homolog of NCBI NO: 24460973 NR Description: bZIP transcription factor [Capsicum chinense]
  misc_feature (3)..(159): Homolog of NCBI NO: 4457221 NR Description: putative bZIP DNA-binding protein [Capsicum
  misc_feature (1)..(159): Homolog of NCBI NO: 1769891 NR Description: bZIP transcription factor [Arabidopsis thaliana]
  misc_feature (1)..(159): Homolog of NCBI NO: 15236153 NR Description: bZIP family transcription factor; protein id:
  misc_feature (3)..(159): Homolog of NCBI NO: 24460973 NR Description: bZIP transcription factor [Capsicum chinense]
  misc_feature (3)..(159): Homolog of NCBI NO: 16580130 NR Description: bZIP transcription factor BZI-2 [Nicotiana
  misc_feature (1)..(159): Homolog of NCBI NO: 1769891 NR Description: bZIP transcription factor [Arabidopsis thaliana]
  misc_feature (1)..(159): Homolog of NCBI NO: 15236153 NR Description: bZIP family transcription factor; protein id:
MESSSSGTTSSTIQTSSGSEESLMEQRKRKRMLSNRESARRSRMKKQKLLDDLTAQVNHLKKENTEIVTSVSITTQHYLTVEAENSVLRAQLDELNHRLQSLNDIIEFLDSSNNNNNNNMGMCSNPLVGLECDDFFVNQMNMSYIMNQPLMASSDALMY

SEQ ID NO: 25286 - protein, 136 aa, Arabidopsis thaliana
  peptide (1)..(136): Ceres Seq. ID no. 12335583
  misc_feature (1)..(64): Pfam Name: bZIP transcription factor Pfam Description: bZIP transcription factor
  misc_feature (1)..(64): Pfam Name: bZIP transcription factor Pfam Description: bZIP transcription factor
  misc_feature (1)..(136): Homolog of NCBI NO: 16580130 NR Description: bZIP transcription factor BZI-2 [Nicotiana
  misc_feature (1)..(136): Homolog of NCBI NO: 4457221 NR Description: putative bZIP DNA-binding protein [Capsicum
  misc_feature (1)..(136): Homolog of NCBI NO: 24460973 NR Description: bZIP transcription factor [Capsicum chinense]
  misc_feature (1)..(136): Homolog of NCBI NO: 4457221 NR Description: putative bZIP DNA-binding protein [Capsicum
  misc_feature (1)..(136): Homolog of NCBI NO: 1769891 NR Description: bZIP transcription factor [Arabidopsis thaliana]
  misc_feature (1)..(136): Homolog of NCBI NO: 15236153 NR Description: bZIP family transcription factor; protein id:
  misc_feature (1)..(136): Homolog of NCBI NO: 24460973 NR Description: bZIP transcription factor [Capsicum chinense]
  misc_feature (1)..(136): Homolog of NCBI NO: 16580130 NR Description: bZIP transcription factor BZI-2 [Nicotiana
  misc_feature (1)..(136): Homolog of NCBI NO: 1769891 NR Description: bZIP transcription factor [Arabidopsis thaliana]
  misc_feature (1)..(136): Homolog of NCBI NO: 15236153 NR Description: bZIP family transcription factor; protein id:
MEQRKRKRMLSNRESARRSRMKKQKLLDDLTAQVNHLKKENTEIVTSVSITTQHYLTVEAENSVLRAQLDELNHRLQSLNDIIEFLDSSNNNNNNNMGMCSNPLVGLECDDFFVNQMNMSYIMNQPLMASSDALMY

SEQ ID NO: 25287 - protein, 128 aa, Arabidopsis thaliana
  peptide (1)..(128): Ceres Seq. ID no. 12335584
  misc_feature (1)..(56): Pfam Name: bZIP transcription factor Pfam Description: bZIP transcription factor
  misc_feature (1)..(56): Pfam Name: bZIP transcription factor Pfam Description: bZIP transcription factor
  misc_feature (1)..(128): Homolog of NCBI NO: 16580130 NR Description: bZIP transcription factor BZI-2 [Nicotiana
  misc_feature (1)..(128): Homolog of NCBI NO: 4457221 NR Description: putative bZIP DNA-binding protein [Capsicum
  misc_feature (1)..(128): Homolog of NCBI NO: 24460973 NR Description: bZIP transcription factor [Capsicum chinense]
  misc_feature (1)..(128): Homolog of NCBI NO: 4457221 NR Description: putative bZIP DNA-binding protein [Capsicum
  misc_feature (1)..(128): Homolog of NCBI NO: 1769891 NR Description: bZIP transcription factor [Arabidopsis thaliana]
  misc_feature (1)..(128): Homolog of NCBI NO: 15236153 NR Description: bZIP family transcription factor; protein id:
  misc_feature (1)..(128): Homolog of NCBI NO: 24460973 NR Description: bZIP transcription factor [Capsicum chinense]
  misc_feature (1)..(128): Homolog of NCBI NO: 16580130 NR Description: bZIP transcription factor BZI-2 [Nicotiana
  misc_feature (1)..(128): Homolog of NCBI NO: 1769891 NR Description: bZIP transcription factor [Arabidopsis thaliana]
  misc_feature (1)..(128): Homolog of NCBI NO: 15236153 NR Description: bZIP family transcription factor; protein id:
MLSNRESARRSRMKKQKLLDDLTAQVNHLKKENTEIVTSVSITTQHYLTVEAENSVLRAQLDELNHRLQSLNDIIEFLDSSNNNNNNNMGMCSNPLVGLECDDFFVNQMNMSYIMNQPLMASSDALMY

SEQ ID NO: 25288 - DNA, 1292 bp, Arabidopsis thaliana
  misc_feature (1)..(1292): Ceres Seq. ID no. 13490810
  misc_feature: MA Experiment ID: 108462 Result: Down-regulated in Transcription
  misc_feature: MA Experiment 108462 PARAMETER Experiment Name: At_Germinating_Seeds_cDNA_P Parameter: Age (day) Value: 2 vs. 0
  misc_feature: MA Experiment 108462 PARAMETER Experiment Name: At_Germinating_Seeds_cDNA_P Parameter: Tissue Value: Germinating Seeds
  misc_feature: MA Experiment ID: 108463 Result: Down-regulated in Transcription
  misc_feature: MA Experiment 108463 PARAMETER Experiment Name: At_Germinating_Seeds_cDNA_P Parameter: Age (day) Value: 3 vs. 0
  misc_feature: MA Experiment 108463 PARAMETER Experiment Name: At_Germinating_Seeds_cDNA_P Parameter: Tissue Value: Germinating Seeds
  misc_feature: MA Experiment ID: 108464 Result: Down-regulated in Transcription
  misc_feature: MA Experiment 108464 PARAMETER Experiment Name: At_Germinating_Seeds_cDNA_P Parameter: Age (day) Value: 4 vs. 0
  misc_feature: MA Experiment 108464 PARAMETER Experiment Name: At_Germinating_Seeds_cDNA_P Parameter: Tissue Value: Germinating Seeds
  misc_feature: MA Experiment ID: 108573 Result: Down-regulated in Transcription
  misc_feature: MA Experiment 108573 PARAMETER Experiment Name: At_Drought_cDNA_P Parameter: Timepoint (hr) Value: 6
  misc_feature: MA Experiment 108573 PARAMETER Experiment Name: At_Drought_cDNA_P Parameter: Tissue Value: Aerial
  misc_feature: MA Experiment 108573 PARAMETER Experiment Name: At_Drought_cDNA_P Parameter: Treatment Value: Drought vs. No Drought
aatttgttgtttccttaaacccttcaaagcaaaattagggtttctcttggttttcgcaaattagggattttttctctcgttctcatgaaaagatgagtttgatttccaaatccttggcaagaattgaatgttcgccatttttttatccaagagcttcagaaatcactaccggaaaacggataacctctccgcaaatccgtttatacactgcggcggccgtcggcgggaaaactggaaatggagaaaggaaacaaagagccaaagcaccggcgaaaactccggaggcagtgacacctgtgaaaccgctggagattgcgtcagtcacggcgacgacggagaatgaattgcctcggcctaatgagatagcttacgagagtgaagcagcgaattgggttaatctgattggatttgttgatcaaccagttcaattcgaagcttcttctgatggcaaattctgggctggtactgttatttcccagaggtctgcttcagattcctctggtttctggattccgataatatttgaaggcgatttagctaaaaccgcagctcgatatgtaagcaaagacgatcaaattcatgtgtctgggaagctgtttatagattctcctcctccaaatatgacttatgcacaagccaatgttcaggtattggtccagaatcttaactttatacagcctatgtccccgtctccgtcgccatttatggttatgtcatcatctgaaaaggaagaaagtggtatcaagaagcagcctgctagagctaagcaggatatagtcattgatgaagcttcagattcttggaatcacctcattgaaaatcctaaagaatggtgggatcaccgggaaaataaagtcaatggattggtaaaacctaggcatcctgatttcaaaagcaaggacagtagtttttcgctgtggctcaataaggctcctaattgggttttgccaaaactcgaaggactcgagttcgatgttctagtccctaaagccagagttgtaaaacaacttaaaggagaagaatcatggaaggacttggttcagaacccagataaatggtgggacaatagaatcgacaagagaaatgcaaaagcccctgatttcaagcacaaggagacaggtgaagcactgtggctaaacgagtctcctacttgggtattaccgaaactgccaccagtcaagaagaaacaagaaagtattgtcttttagctttagaaacattatctccatgtaaagagctccaagtgtttacaaaattcatcatttctattcaaagtggtctccaaagttccg

SEQ ID NO: 25289 - protein, 371 aa, Arabidopsis thaliana
  peptide (1)..(371): Ceres Seq. ID no. 13490811
  misc_feature (1)..(371): Pfam Name: Protein of unknown function (DUF731) Pfam Description: Protein of unknown function (DUF731)
  misc_feature (81)..(369): Homolog of NCBI NO: 21554639 NR Description: unknown [Arabidopsis thaliana]
  misc_feature (81)..(369): Homolog of NCBI NO: 18397761 NR Description: expressed protein [Arabidopsis thaliana]
  misc_feature (1)..(70): Homolog of NCBI NO: 21537140 NR Description: unknown [Arabidopsis thaliana]
  misc_feature (61)..(367): Homolog of NCBI NO: 21537140 NR Description: unknown [Arabidopsis thaliana]
  misc_feature (1)..(70): Homolog of NCBI NO: 18422482 NR Description: expressed protein [Arabidopsis thaliana]
  misc_feature (1)..(70): Homolog of NCBI NO: 2660671 NR Description: hypothetical protein [Arabidopsis thaliana]
  misc_feature (61)..(367): Homolog of NCBI NO: 18422482 NR Description: expressed protein [Arabidopsis thaliana]
  misc_feature (61)..(367): Homolog of NCBI NO: 2660671 NR Description: hypothetical protein [Arabidopsis thaliana]
  misc_feature (1)..(371): Homolog of NCBI NO: 18415421 NR Description: expressed protein [Arabidopsis thaliana]
  misc_feature (1)..(371): Homolog of NCBI NO: 26451527 NR Description: unknown protein [Arabidopsis thaliana]
MSLISKSLARIECSPFFYPRASEITTGKRITSPQIRLYTAAAVGGKTGNGERKQRAKAPAKTPEAVTPVKPLEIASVTATTENELPRPNEIAYESEAANWVNLIGFVDQPVQFEASSDGKFWAGTVISQRSASDSSGFWIPIIFEGDLAKTAARYVSKDDQIHVSGKLFIDSPPPNMTYAQANVQVLVQNLNFIQPMSPSPSPFMVMSSSEKEESGIKKQPARAKQDIVIDEASDSWNHLIENPKEWWDHRENKVNGLVKPRHPDFKSKDSSFSLWLNKAPNWVLPKLEGLEFDVLVPKARVVKQLKGEESWKDLVQNPDKWWDNRIDKRNAKAPDFKHKETGEALWLNESPTWVLPKLPPVKKKQESIVF

SEQ ID NO: 25290 - protein, 195 aa, Arabidopsis thaliana
  peptide (1)..(195): Ceres Seq. ID no. 13490812
  misc_feature (1)..(195): Pfam Name: Protein of unknown function (DUF731) Pfam Description: Protein of unknown function (DUF731)
  misc_feature (1)..(153): Homolog of NCBI NO: 19386812 NR Description: B1147A04.4 [Oryza sativa (japonica
  misc_feature (56)..(191): Homolog of NCBI NO: 21537140 NR Description: unknown [Arabidopsis thaliana]
  misc_feature (56)..(191): Homolog of NCBI NO: 18422482 NR Description: expressed protein [Arabidopsis thaliana]
  misc_feature (1)..(193): Homolog of NCBI NO: 21554639 NR Description: unknown [Arabidopsis thaliana]
  misc_feature (1)..(193): Homolog of NCBI NO: 18397761 NR Description: expressed protein [Arabidopsis thaliana]
  misc_feature (1)..(191): Homolog of NCBI NO: 21537140 NR Description: unknown [Arabidopsis thaliana]
  misc_feature (1)..(191): Homolog of NCBI NO: 18422482 NR Description: expressed protein [Arabidopsis thaliana]
  misc_feature (1)..(191): Homolog of NCBI NO: 2660671 NR Description: hypothetical protein [Arabidopsis thaliana]
  misc_feature (1)..(195): Homolog of NCBI NO: 18415421 NR Description: expressed protein [Arabidopsis thaliana]
  misc_feature (1)..(195): Homolog of NCBI NO: 26451527 NR Description: unknown protein [Arabidopsis thaliana]
MTYAQANVQVLVQNLNFIQPMSPSPSPFMVMSSSEKEESGIKKQPARAKQDIVIDEASDSWNHLIENPKEWWDHRENKVNGLVKPRHPDFKSKDSSFSLWLNKAPNWVLPKLEGLEFDVLVPKARVVKQLKGEESWKDLVQNPDKWWDNRIDKRNAKAPDFKHKETGEALWLNESPTWVLPKLPPVKKKQESIVF

SEQ ID NO: 25291 - DNA, 1197 bp, Arabidopsis thaliana
  misc_feature (1)..(1197): Ceres Seq. ID no. 12739062
  misc_feature: MA Experiment ID: 108434 Result: Down-regulated in Transcription
  misc_feature: MA Experiment 108434 PARAMETER Experiment Name: At_Root_Tips_cDNA_P Parameter: Tissue Value: Root Tips
  misc_feature: MA Experiment ID: 108488 Result: Down-regulated in Transcription
  misc_feature: MA Experiment ID: 108576 Result: Up-regulated in Transcription
  misc_feature: MA Experiment 108576 PARAMETER Experiment Name: At_42deg_Heat_cDNA_P Parameter: Temperature (deg C) Value: 42 vs. 22
  misc_feature: MA Experiment 108576 PARAMETER Experiment Name: At_42deg_Heat_cDNA_P Parameter: Timepoint (hr) Value: 1
  misc_feature: MA Experiment 108576 PARAMETER Experiment Name: At_42deg_Heat_cDNA_P Parameter: Tissue Value: Aerial
  misc_feature: MA Experiment ID: 108579 Result: Down-regulated in Transcription
  misc_feature: MA Experiment 108579 PARAMETER Experiment Name: At_4deg_Cold_cDNA_P Parameter: Temperature (deg C) Value: 4 vs. 22
  misc_feature: MA Experiment 108579 PARAMETER Experiment Name: At_4deg_Cold_cDNA_P Parameter: Timepoint (hr) Value: 6
  misc_feature: MA Experiment 108579 PARAMETER Experiment Name: At_4deg_Cold_cDNA_P Parameter: Tissue Value: Aerial
  misc_feature: MA Experiment ID: 20000111 Result: Up-regulated in Transcription
  misc_feature: MA Experiment 20000111 PARAMETER Experiment Name: At_42deg_Heat_cDNA_P Parameter: Temperature (deg C) Value: 42 vs. 22
  misc_feature: MA Experiment 20000111 PARAMETER Experiment Name: At_42deg_Heat_cDNA_P Parameter: Timepoint (hr) Value: 6
  misc_feature: MA Experiment 20000111 PARAMETER Experiment Name: At_42deg_Heat_cDNA_P Parameter: Tissue Value: Aerial
  misc_feature: MA Experiment ID: 20000112 Result: Up-regulated in Transcription
  misc_feature: MA Experiment 20000112 PARAMETER Experiment Name: At_42deg_Heat_cDNA_P Parameter: Temperature (deg C) Value: 42 vs. 22
  misc_feature: MA Experiment 20000112 PARAMETER Experiment Name: At_42deg_Heat_cDNA_P Parameter: Timepoint (hr) Value: 2
  misc_feature: MA Experiment 20000112 PARAMETER Experiment Name: At_42deg_Heat_cDNA_P Parameter: Tissue Value: Aerial
  misc_feature: MA Experiment ID: 20000113 Result: Up-regulated in Transcription
  misc_feature: MA Experiment 20000113 PARAMETER Experiment Name: At_42deg_Heat_cDNA_P Parameter: Temperature (deg C) Value: 42 vs. 22
  misc_feature: MA Experiment 20000113 PARAMETER Experiment Name: At_42deg_Heat_cDNA_P Parameter: Timepoint (hr) Value: 8
  misc_feature: MA Experiment 20000113 PARAMETER Experiment Name: At_42deg_Heat_cDNA_P Parameter: Tissue Value: Aerial
  misc_feature: MA Experiment ID: 20000144 Result: Up-regulated in Transcription
  misc_feature: MA Experiment 20000144 PARAMETER Experiment Name: At_42deg_Heat_cDNA_P Parameter: Temperature (deg C) Value: 42 vs. 22
  misc_feature: MA Experiment 20000144 PARAMETER Experiment Name: At_42deg_Heat_cDNA_P Parameter: Timepoint (hr) Value: 1
  misc_feature: MA Experiment 20000144 PARAMETER Experiment Name: At_42deg_Heat_cDNA_P Parameter: Tissue Value: Aerial
  misc_feature: MA Experiment ID: 20000171 Result: Up-regulated in Transcription
  misc_feature: MA Experiment 20000171 PARAMETER Experiment Name: At_42deg_Heat_P Parameter: Age (day) Value: 14
  misc_feature: MA Experiment 20000171 PARAMETER Experiment Name: At_42deg_Heat_P Parameter: Organism Value: A. thaliana
  misc_feature: MA Experiment 20000171 PARAMETER Experiment Name: At_42deg_Heat_P Parameter: Plant Line Value: WS
  misc_feature: MA Experiment 20000171 PARAMETER Experiment Name: At_42deg_Heat_P Parameter: Temperature (deg C) Value: 42 vs. 22
  misc_feature: MA Experiment 20000171 PARAMETER Experiment Name: At_42deg_Heat_P Parameter: Timepoint (hr) Value: 1
  misc_feature: MA Experiment 20000171 PARAMETER Experiment Name: At_42deg_Heat_P Parameter: Tissue Value: Aerial
  misc_feature: MA Experiment ID: 20000173 Result: Up-regulated in Transcription
  misc_feature: MA Experiment 20000173 PARAMETER Experiment Name: At_42deg_Heat_P Parameter: Age (day) Value: 14
  misc_feature: MA Experiment 20000173 PARAMETER Experiment Name: At_42deg_Heat_P Parameter: Organism Value: A. thaliana
  misc_feature: MA Experiment 20000173 PARAMETER Experiment Name: At_42deg_Heat_P Parameter: Plant Line Value: WS
  misc_feature: MA Experiment 20000173 PARAMETER Experiment Name: At_42deg_Heat_P Parameter: Temperature (deg C) Value: 42 vs. 22
  misc_feature: MA Experiment 20000173 PARAMETER Experiment Name: At_42deg_Heat_P Parameter: Timepoint (hr) Value: 6
  misc_feature: MA Experiment 20000173 PARAMETER Experiment Name: At_42deg_Heat_P Parameter: Tissue Value: Aerial
  misc_feature: MA Experiment ID: 20000224 Result: Down-regulated in Transcription
  misc_feature: MA Experiment ID: 20000234 Result: Down-regulated in Transcription
  misc_feature: MA Experiment 20000234 PARAMETER Experiment Name: At_Siliques_P Parameter: Age (day) Value: 21
  misc_feature: MA Experiment 20000234 PARAMETER Experiment Name: At_Siliques_P Parameter: Organism Value: A. thaliana
  misc_feature: MA Experiment 20000234 PARAMETER Experiment Name: At_Siliques_P Parameter: Plant Line Value: WS
  misc_feature: MA Experiment 20000234 PARAMETER Experiment Name: At_Siliques_P Parameter: Tissue Value: Less Than 5mm Siliques vs. Whole Plant
aacggtgtcgtcgtcgccaaacgatttgcctcttcctaaagggtacaacaagaatggaagaagagtatgagagtcgtcgattgaggagatgggaagagttggacactgacatcttagtaagaattttccagaagtttagcgtctttgagttgacttcgggattagctcatgtttgtagaggatggagagctgcttgttgcgatccgattctttggaagacggtggatttgtcaaacatgagatctagtttcatcaagatcccattagagccttatgtctatgtggaacgccgatctgatgaggccctaacccgcatcctgaaactctccatgaaccttagcggaggaagcacgaggaccttgatttttcatttcaacttgttcttgagtgatgatcagcttacttacaccgcagaaaggtgtccagggttgagacgggtcgtcctaccggcttggaacagaataaagaagactggtatatgcaaagcgataagaatctggaaagatctagagtcactaacaatgccaagcatcgcaaacccgccttatctcttaacagaaattgccaagaactgcaagaattttaaagagctgaagatcatgggtccattcgaggtcttctttgcaaacacgctcatcacttgcctcccaaacatcaaaacactcagcatcagatgctcggcgataaagcgggaagcactgatgaaaatccttgacggattaccaagccttgaagtgctcaacatatcacactctcacctagtggagtacagcgtttggcagcctcagcagaaggtgattgttagagagctcgataagacgataatggagaaaacagcaaggctaaagaaattcttgacttgcatggatcacaagacgtgtgtgatgtgtcagaggactgaaaacgatgaagggattgtgagatggtacaagtatgaggaaggagactggaaggttgatgaagtgagttctcttcatctttgatgtttctgctgtgatcattctctgtgaaggacttaacttgttattgttctcatctttgactgttgaattgtttatttctttgtgttgtttgttttgatttgaatcgtattatgtgtatatatctgtaggctatgccaatgaatgtatgtagtgatcaacttttgatcaccaccaaccttgcacaccaaataggaaaataaaacaatattgttgc

SEQ ID NO: 25292 - protein, 326 aa, Arabidopsis thaliana
  peptide (1)..(326): Ceres Seq. ID no. 12739063
  misc_feature (30)..(248): Homolog of NCBI NO: 18424042 NR Description: SKP1 interacting partner 1 (SKIP1)
  misc_feature (28)..(248): Homolog of NCBI NO: 30692594 NR Description: predicted protein [Arabidopsis thaliana]
  misc_feature (30)..(248): Homolog of NCBI NO: 18412951 NR Description: F-box protein family, AtFBL22; protein id:
  misc_feature (15)..(248): Homolog of NCBI NO: 18412953 NR Description: F-box protein family, AtFBL9/AtFBL23; protein id:
  misc_feature (29)..(239): Homolog of NCBI NO: 37718854 NR Description: hypothetical protein [Oryza sativa (japonica
  misc_feature (21)..(80): Homolog of NCBI NO: 15234238 NR Description: F-box protein family; protein id: At4g11580.1
  misc_feature (76)..(324): Homolog of NCBI NO: 15234238 NR Description: F-box protein family; protein id: At4g11580.1
  misc_feature (128)..(326): Homolog of NCBI NO: 37535806 NR Description: putative Rhizobium-induced nodule development
  misc_feature (18)..(326): Homolog of NCBI NO: 21618163 NR Description: unknown [Arabidopsis thaliana]
  misc_feature (18)..(326): Homolog of NCBI NO: 15229043 NR Description: F-box protein family
RCRRRQTICLFLKGTTRMEEEYESRRLRRWEELDTDILVRIFQKFSVFELTSGLAHVCRGWRAACCDPILWKTVDLSNMRSSFIKIPLEPYVYVERRSDEALTRILKLSMNLSGGSTRTLIFHFNLFLSDDQLTYTAERCPGLRRVVLPAWNRIKKTGICKAIRIWKDLESLTMPSIANPPYLLTEIAKNCKNFKELKIMGPFEVFFANTLITCLPNIKTLSIRCSAIKREALMKILDGLPSLEVLNISHSHLVEYSVWQPQQKVIVRELDKTIMEKTARLKKFLTCMDHKTCVMCQRTENDEGIVRWYKYEEGDWKVDEVSSLHL

SEQ ID NO: 25293 - protein, 309 aa, Arabidopsis thaliana
  peptide (1)..(309): Ceres Seq. ID no. 12739064
  misc_feature (13)..(231): Homolog of NCBI NO: 18424042 NR Description: SKP1 interacting partner 1 (SKIP1)
  misc_feature (11)..(231): Homolog of NCBI NO: 30692594 NR Description: predicted protein [Arabidopsis thaliana]
  misc_feature (13)..(231): Homolog of NCBI NO: 18412951 NR Description: F-box protein family, AtFBL22; protein id:
  misc_feature (1)..(231): Homolog of NCBI NO: 18412953 NR Description: F-box protein family, AtFBL9/AtFBL23; protein id:
  misc_feature (12)..(222): Homolog of NCBI NO: 37718854 NR Description: hypothetical protein [Oryza sativa (japonica
  misc_feature (4)..(63): Homolog of NCBI NO: 15234238 NR Description: F-box protein family; protein id: At4g11580.1
  misc_feature (59)..(307): Homolog of NCBI NO: 15234238 NR Description: F-box protein family; protein id: At4g11580.1
  misc_feature (111)..(309): Homolog of NCBI NO: 37535806 NR Description: putative Rhizobium-induced nodule development
  misc_feature (1)..(309): Homolog of NCBI NO: 21618163 NR Description: unknown [Arabidopsis thaliana]
  misc_feature (1)..(309): Homolog of NCBI NO: 15229043 NR Description: F-box protein family
MEEEYESRRLRRWEELDTDILVRIFQKFSVFELTSGLAHVCRGWRAACCDPILWKTVDLSNMRSSFIKIPLEPYVYVERRSDEALTRILKLSMNLSGGSTRTLIFHFNLFLSDDQLTYTAERCPGLRRVVLPAWNRIKKTGICKAIRIWKDLESLTMPSIANPPYLLTEIAKNCKNFKELKIMGPFEVFFANTLITCLPNIKTLSIRCSAIKREALMKILDGLPSLEVLNISHSHLVEYSVWQPQQKVIVRELDKTIMEKTARLKKFLTCMDHKTCVMCQRTENDEGIVRWYKYEEGDWKVDEVSSLHL

SEQ ID NO: 25294 - protein, 248 aa, Arabidopsis thaliana
  peptide (1)..(248): Ceres Seq. ID no. 12739065
  misc_feature (1)..(170): Homolog of NCBI NO: 18412953 NR Description: F-box protein family, AtFBL9/AtFBL23; protein id:
  misc_feature (1)..(161): Homolog of NCBI NO: 37718854 NR Description: hypothetical protein [Oryza sativa (japonica
  misc_feature (1)..(246): Homolog of NCBI NO: 15234238 NR Description: F-box protein family; protein id: At4g11580.1
  misc_feature (50)..(248): Homolog of NCBI NO: 37535806 NR Description: putative Rhizobium-induced nodule development
  misc_feature (1)..(248): Homolog of NCBI NO: 21618163 NR Description: unknown [Arabidopsis thaliana]
  misc_feature (1)..(248): Homolog of NCBI NO: 15229043 NR Description: F-box protein family
  misc_feature (1)..(170): Homolog of NCBI NO: 18413178 NR Description: F-box protein family, AtFBW2
  misc_feature (1)..(170): Homolog of NCBI NO: 18424042 NR Description: SKP1 interacting partner 1 (SKIP1)
  misc_feature (1)..(170): Homolog of NCBI NO: 30692594 NR Description: predicted protein [Arabidopsis thaliana]
  misc_feature (1)..(170): Homolog of NCBI NO: 18412951 NR Description: F-box protein family, AtFBL22; protein id:
MRSSFIKIPLEPYVYVERRSDEALTRILKLSMNLSGGSTRTLIFHFNLFLSDDQLTYTAERCPGLRRVVLPAWNRIKKTGICKAIRIWKDLESLTMPSIANPPYLLTEIAKNCKNFKELKIMGPFEVFFANTLITCLPNIKTLSIRCSAIKREALMKILDGLPSLEVLNISHSHLVEYSVWQPQQKVIVRELDKTIMEKTARLKKFLTCMDHKTCVMCQRTENDEGIVRWYKYEEGDWKVDEVSSLHL

SEQ ID NO: 25295 - DNA, 1149 bp, Arabidopsis thaliana
  misc_feature (1)..(1149): Ceres Seq. ID no. 12321882
  misc_feature: MA Experiment ID: 108461 Result: Up-regulated in Transcription
  misc_feature: MA Experiment 108461 PARAMETER Experiment Name: At_Germinating_Seeds_cDNA_P Parameter: Age (day) Value: 1 vs. 0
  misc_feature: MA Experiment 108461 PARAMETER Experiment Name: At_Germinating_Seeds_cDNA_P Parameter: Tissue Value: Germinating Seeds
  misc_feature: MA Experiment ID: 108462 Result: Up-regulated in Transcription
  misc_feature: MA Experiment 108462 PARAMETER Experiment Name: At_Germinating_Seeds_cDNA_P Parameter: Age (day) Value: 2 vs. 0
  misc_feature: MA Experiment 108462 PARAMETER Experiment Name: At_Germinating_Seeds_cDNA_P Parameter: Tissue Value: Germinating Seeds
  misc_feature: MA Experiment ID: 108463 Result: Up-regulated in Transcription
  misc_feature: MA Experiment 108463 PARAMETER Experiment Name: At_Germinating_Seeds_cDNA_P Parameter: Age (day) Value: 3 vs. 0
  misc_feature: MA Experiment 108463 PARAMETER Experiment Name: At_Germinating_Seeds_cDNA_P Parameter: Tissue Value: Germinating Seeds
  misc_feature: MA Experiment ID: 108464 Result: Up-regulated in Transcription
  misc_feature: MA Experiment 108464 PARAMETER Experiment Name: At_Germinating_Seeds_cDNA_P Parameter: Age (day) Value: 4 vs. 0
  misc_feature: MA Experiment 108464 PARAMETER Experiment Name: At_Germinating_Seeds_cDNA_P Parameter: Tissue Value: Germinating Seeds
  misc_feature: MA Experiment ID: 108594 Result: Down-regulated in Transcription
  misc_feature: MA Experiment 108594 PARAMETER Experiment Name: At_Ler-rhl_Root_cDNA_P Parameter: Plant Line Value: null
  misc_feature: MA Experiment ID: 108595 Result: Up-regulated in Transcription
  misc_feature: MA Experiment 108595 PARAMETER Experiment Name: At_Ler-pi_Ovule_cDNA_P Parameter: Plant Line Value: null
  misc_feature: MA Experiment ID: 20000439 Result: Up-regulated in Transcription
  misc_feature: MA Experiment 20000439 PARAMETER Experiment Name: At_Roots__P Parameter: Age (day) Value: 14 vs. 21
  misc_feature: MA Experiment 20000439 PARAMETER Experiment Name: At_Roots__P Parameter: Organism Value: A. thaliana
  misc_feature: MA Experiment 20000439 PARAMETER Experiment Name: At_Roots__P Parameter: Tissue Value: Roots vs. Whole Plant
aatggatagattagagaaatagaaaaatcaaaagaagctttggcaaagagctaaagatcaaagcttttctttgagaatgagattgtggattgtgagtgtactcgtgcttacacaccttgtccatggagctctctgttgggggaaggatggtcactacactgtttgcaaattagctgagggattctttgaggatgatactattgctgcagtgaagaaacttctgcctgaatcagttgatggtggtggactagcagatttttgctcatggcctgatgaaattaaaaaactctcgcaatggcaatggactagcactttgcactatgttaacacacctgaatacaggtgcaactacgagtattgccgggactgccatgacactcataagcatagggactggtgtgtgacaggagcgatcttcaattacacaaaccagttaatgtctgcttctgaaaactcacagaatatagtccactacaacttgacagaggctctcttgttcttgtcacattatatgggagatgttcatcagcccttgcatactggttttcttggagatctaggtggtaacacaataatagtcaactggtaccataacaaatcaaatttgcaccatgtctgggacaacatgataattgactctgctctagaaacatactacaattcaagccttccacacatgattcaagctcttcaagccaaactcaagaacggctggtcgaatgatgttccgtcgtggaagtcatgtcactttcaccaaaaggcctgtccaaatctgtatgcttctgaaagcattgatctcgcctgcaagtatgcttacaggaacgctactccggggactactttaggagatgagtatttcctttctcggttacccgttgtagagaagagacttgcacaaggtgggattcgcttggcagctactcttaatcgtatcttttctgcaaaaccgaagctcgcaggattatgaatctaagaaaaagatccttgagaacccacgtaacaactctttttaagtgttttttataacactgtgaatagttgagtcatgactaatgagtgaacctccaaaattttcatgcaaaaatttgttattttgggacatggttcaaacttccaataacaaaccacactaacggataacactttgct

SEQ ID NO: 25296 - protein, 296 aa, Arabidopsis thaliana
  peptide (1)..(296): Ceres Seq. ID no. 12321883
  misc_feature (1)..(291): Homolog of NCBI NO: 9558456 NR Description: unnamed protein product [Oryza sativa (japonica
  misc_feature (258)..(283): Homolog of NCBI NO: 7485718 NR Description: hypothetical protein F18E5.220 - Arabidopsis
  misc_feature (34)..(199): Homolog of NCBI NO: 7485718 NR Description: hypothetical protein F18E5.220 - Arabidopsis
  misc_feature (32)..(94): Homolog of NCBI NO: 7485717 NR Description: hypothetical protein F18E5.210 - Arabidopsis
  misc_feature (133)..(294): Homolog of NCBI NO: 7485717 NR Description: hypothetical protein F18E5.210 - Arabidopsis
  misc_feature (4)..(294): Homolog of NCBI NO: 4099835 NR Description: bifunctional nuclease [Zinnia elegans]
  misc_feature (1)..(294): Homolog of NCBI NO: 18415727 NR Description: putative bifunctional nuclease
  misc_feature (1)..(295): Homolog of NCBI NO: 22328857 NR Description: expressed protein; protein id: At4g21585.1
  misc_feature (1)..(296): Homolog of NCBI NO: 18415729 NR Description: endonuclease, putative
  misc_feature (1)..(296): Homolog of NCBI NO: 21593575 NR Description: endonuclease, putative [Arabidopsis thaliana]
MRLWIVSVLVLTHLVHGALCWGKDGHYTVCKLAEGFFEDDTIAAVKKLLPESVDGGGLADFCSWPDEIKKLSQWQWTSTLHYVNTPEYRCNYEYCRDCHDTHKHRDWCVTGAIFNYTNQLMSASENSQNIVHYNLTEALLFLSHYMGDVHQPLHTGFLGDLGGNTIIVNWYHNKSNLHHVWDNMIIDSALETYYNSSLPHMIQALQAKLKNGWSNDVPSWKSCHFHQKACPNLYASESIDLACKYAYRNATPGTTLGDEYFLSRLPVVEKRLAQGGIRLAATLNRIFSAKPKLAGL

SEQ ID NO: 25297 - protein, 176 aa, Arabidopsis thaliana
  peptide (1)..(176): Ceres Seq. ID no. 12321884
  misc_feature (1)..(171): Homolog of NCBI NO: 34895514 NR Description: putative bifunctional nuclease
  misc_feature (1)..(171): Homolog of NCBI NO: 9558456 NR Description: unnamed protein product [Oryza sativa (japonica
  misc_feature (138)..(163): Homolog of NCBI NO: 7485718 NR Description: hypothetical protein F18E5.220 - Arabidopsis
  misc_feature (1)..(79): Homolog of NCBI NO: 7485718 NR Description: hypothetical protein F18E5.220 - Arabidopsis
  misc_feature (13)..(174): Homolog of NCBI NO: 7485717 NR Description: hypothetical protein F18E5.210 - Arabidopsis
  misc_feature (1)..(174): Homolog of NCBI NO: 4099835 NR Description: bifunctional nuclease [Zinnia elegans]
  misc_feature (1)..(174): Homolog of NCBI NO: 18415727 NR Description: putative bifunctional nuclease
  misc_feature (1)..(175): Homolog of NCBI NO: 22328857 NR Description: expressed protein; protein id: At4g21585.1
  misc_feature (1)..(176): Homolog of NCBI NO: 18415729 NR Description: endonuclease, putative
  misc_feature (1)..(176): Homolog of NCBI NO: 21593575 NR Description: endonuclease, putative [Arabidopsis thaliana]
MSASENSQNIVHYNLTEALLFLSHYMGDVHQPLHTGFLGDLGGNTIIVNWYHNKSNLHHVWDNMIIDSALETYYNSSLPHMIQALQAKLKNGWSNDVPSWKSCHFHQKACPNLYASESIDLACKYAYRNATPGTTLGDEYFLSRLPVVEKRLAQGGIRLAATLNRIFSAKPKLAGL

SEQ ID NO: 25298 - protein, 151 aa, Arabidopsis thaliana
  peptide (1)..(151): Ceres Seq. ID no. 12321885
  misc_feature (1)..(146): Homolog of NCBI NO: 34895514 NR Description: putative bifunctional nuclease
  misc_feature (1)..(146): Homolog of NCBI NO: 9558456 NR Description: unnamed protein product [Oryza sativa (japonica
  misc_feature (113)..(138): Homolog of NCBI NO: 7485718 NR Description: hypothetical protein F18E5.220 - Arabidopsis
  misc_feature (1)..(54): Homolog of NCBI NO: 7485718 NR Description: hypothetical protein F18E5.220 - Arabidopsis
  misc_feature (1)..(149): Homolog of NCBI NO: 7485717 NR Description: hypothetical protein F18E5.210 - Arabidopsis
  misc_feature (1)..(149): Homolog of NCBI NO: 4099835 NR Description: bifunctional nuclease [Zinnia elegans]
  misc_feature (1)..(149): Homolog of NCBI NO: 18415727 NR Description: putative bifunctional nuclease
  misc_feature (1)..(150): Homolog of NCBI NO: 22328857 NR Description: expressed protein; protein id: At4g21585.1
  misc_feature (1)..(151): Homolog of NCBI NO: 18415729 NR Description: endonuclease, putative
  misc_feature (1)..(151): Homolog of NCBI NO: 21593575 NR Description: endonuclease, putative [Arabidopsis thaliana]
MGDVHQPLHTGFLGDLGGNTIIVNWYHNKSNLHHVWDNMIIDSALETYYNSSLPHMIQALQAKLKNGWSNDVPSWKSCHFHQKACPNLYASESIDLACKYAYRNATPGTTLGDEYFLSRLPVVEKRLAQGGIRLAATLNRIFSAKPKLAGL

SEQ ID NO: 25299 - DNA, 1144 bp, Arabidopsis thaliana
  misc_feature (1)..(1144): Ceres Seq. ID no. 13612288
  misc_feature: MA Experiment ID: 108433 Result: Down-regulated in Transcription
  misc_feature: MA Experiment 108433 PARAMETER Experiment Name: At_rhl_Mutant2_cDNA_P Parameter: Age (day) Value: 7
  misc_feature: MA Experiment 108433 PARAMETER Experiment Name: At_rhl_Mutant2_cDNA_P Parameter: Organism Value: A. thaliana
  misc_feature: MA Experiment 108433 PARAMETER Experiment Name: At_rhl_Mutant2_cDNA_P Parameter: Plant Line Value: rhl Mutant vs. wt landsburg
  misc_feature: MA Experiment 108433 PARAMETER Experiment Name: At_rhl_Mutant2_cDNA_P Parameter: Tissue Value: Roots
  misc_feature: MA Experiment ID: 108434 Result: Up-regulated in Transcription
  misc_feature: MA Experiment 108434 PARAMETER Experiment Name: At_Root_Tips_cDNA_P Parameter: Tissue Value: Root Tips
  misc_feature: MA Experiment ID: 108474 Result: Up-regulated in Transcription
  misc_feature: MA Experiment 108474 PARAMETER Experiment Name: At_Drought_Flowers_cDNA_P Parameter: Timepoint (hr) Value: null
  misc_feature: MA Experiment 108474 PARAMETER Experiment Name: At_Drought_Flowers_cDNA_P Parameter: Treatment Value: Drought vs. No Drought
  misc_feature: MA Experiment ID: 108489 Result: Up-regulated in Transcription
  misc_feature: MA Experiment ID: 108501 Result: Down-regulated in Transcription
  misc_feature: MA Experiment 108501 PARAMETER Experiment Name: At_ap2_floral_buds_cDNA_P Parameter: Plant Line Value: ap2 (Ler.)
  misc_feature: MA Experiment 108501 PARAMETER Experiment Name: At_ap2_floral_buds_cDNA_P Parameter: Tissue Value: Closed Flower
  misc_feature: MA Experiment ID: 108572 Result: Up-regulated in Transcription
  misc_feature: MA Experiment 108572 PARAMETER Experiment Name: At_Drought_cDNA_P Parameter: Timepoint (hr) Value: 1
  misc_feature: MA Experiment 108572 PARAMETER Experiment Name: At_Drought_cDNA_P Parameter: Tissue Value: Aerial
  misc_feature: MA Experiment 108572 PARAMETER Experiment Name: At_Drought_cDNA_P Parameter: Treatment Value: Drought vs. No Drought
  misc_feature: MA Experiment ID: 108573 Result: Up-regulated in Transcription
  misc_feature: MA Experiment 108573 PARAMETER Experiment Name: At_Drought_cDNA_P Parameter: Timepoint (hr) Value: 6
  misc_feature: MA Experiment 108573 PARAMETER Experiment Name: At_Drought_cDNA_P Parameter: Tissue Value: Aerial
  misc_feature: MA Experiment 108573 PARAMETER Experiment Name: At_Drought_cDNA_P Parameter: Treatment Value: Drought vs. No Drought
  misc_feature: MA Experiment ID: 108585 Result: Up-regulated in Transcription
  misc_feature: MA Experiment 108585 PARAMETER Experiment Name: At_5mM_NaNP_cDNA_P Parameter: Timepoint (hr) Value: 6
  misc_feature: MA Experiment 108585 PARAMETER Experiment Name: At_5mM_NaNP_cDNA_P Parameter: Tissue Value: Aerial
  misc_feature: MA Experiment 108585 PARAMETER Experiment Name: At_5mM_NaNP_cDNA_P Parameter: Treatment Value: null
  misc_feature: MA Experiment ID: 108594 Result: Down-regulated in Transcription
  misc_feature: MA Experiment 108594 PARAMETER Experiment Name: At_Ler-rhl_Root_cDNA_P Parameter: Plant Line Value: null
  misc_feature: MA Experiment ID: 20000069 Result: Down-regulated in Transcription
  misc_feature: MA Experiment 20000069 PARAMETER Experiment Name: At_100uM_ABA_Mutants_cDNA_P Parameter: Plant Line Value: CS23
  misc_feature: MA Experiment 20000069 PARAMETER Experiment Name: At_100uM_ABA_Mutants_cDNA_P Parameter: Timepoint (hr) Value: 6
  misc_feature: MA Experiment 20000069 PARAMETER Experiment Name: At_100uM_ABA_Mutants_cDNA_P Parameter: Tissue Value: Aerial
  misc_feature: MA Experiment 20000069 PARAMETER Experiment Name: At_100uM_ABA_Mutants_cDNA_P Parameter: Treatment Value: 100uM ABA vs. No Treatment
  misc_feature: MA Experiment ID: 20000086 Result: Down-regulated in Transcription
  misc_feature: MA Experiment 20000086 PARAMETER Experiment Name: At_100uM_ABA_Mutants_cDNA_P Parameter: Plant Line Value: CS22
  misc_feature: MA Experiment 20000086 PARAMETER Experiment Name: At_100uM_ABA_Mutants_cDNA_P Parameter: Timepoint (hr) Value: 6
  misc_feature: MA Experiment 20000086 PARAMETER Experiment Name: At_100uM_ABA_Mutants_cDNA_P Parameter: Tissue Value: Aerial
  misc_feature: MA Experiment 20000086 PARAMETER Experiment Name: At_100uM_ABA_Mutants_cDNA_P Parameter: Treatment Value: 100uM ABA vs. No Treatment
  misc_feature: MA Experiment ID: 20000184 Result: Up-regulated in Transcription
  misc_feature: MA Experiment 20000184 PARAMETER Experiment Name: At_Shoots__P Parameter: Age (day) Value: 7
  misc_feature: MA Experiment 20000184 PARAMETER Experiment Name: At_Shoots__P Parameter: Tissue Value: Shoots vs. Whole Plant
  misc_feature: MA Experiment ID: 20000185 Result: Up-regulated in Transcription
  misc_feature: MA Experiment 20000185 PARAMETER Experiment Name: At_Roots__P Parameter: Age (day) Value: 7 vs. 21
  misc_feature: MA Experiment 20000185 PARAMETER Experiment Name: At_Roots__P Parameter: Organism Value: A. thaliana
  misc_feature: MA Experiment 20000185 PARAMETER Experiment Name: At_Roots__P Parameter: Tissue Value: Roots vs. Whole Plant
  misc_feature: MA Experiment ID: 20000264 Result: Down-regulated in Transcription
  misc_feature: MA Experiment 20000264 PARAMETER Experiment Name: At_Open_Flower_P Parameter: Age (day) Value: 21
  misc_feature: MA Experiment 20000264 PARAMETER Experiment Name: At_Open_Flower_P Parameter: Plant Line Value: WS
  misc_feature: MA Experiment 20000264 PARAMETER Experiment Name: At_Open_Flower_P Parameter: Tissue Value: Open Flower vs. Whole Plant
  misc_feature: MA Experiment ID: 20000265 Result: Down-regulated in Transcription
  misc_feature: MA Experiment 20000265 PARAMETER Experiment Name: At_Open_Flower_P Parameter: Age (day) Value: 21
  misc_feature: MA Experiment 20000265 PARAMETER Experiment Name: At_Open_Flower_P Parameter: Plant Line Value: WS
  misc_feature: MA Experiment 20000265 PARAMETER Experiment Name: At_Open_Flower_P Parameter: Tissue Value: Closed Flower vs. Whole Plant
  misc_feature: MA Experiment ID: 20000286 Result: Down-regulated in Transcription
  misc_feature: MA Experiment 20000286 PARAMETER Experiment Name: At_Open_Flower_P Parameter: Age (day) Value: 21
  misc_feature: MA Experiment 20000286 PARAMETER Experiment Name: At_Open_Flower_P Parameter: Plant Line Value: WS
  misc_feature: MA Experiment 20000286 PARAMETER Experiment Name: At_Open_Flower_P Parameter: Tissue Value: Half Open vs. Whole Plant
  misc_feature: MA Experiment ID: 20000437 Result: Down-regulated in Transcription
  misc_feature: MA Experiment 20000437 PARAMETER Experiment Name: At_Drought_P Parameter: Age (day) Value: 8
  misc_feature: MA Experiment 20000437 PARAMETER Experiment Name: At_Drought_P Parameter: Organism Value: A. thaliana
  misc_feature: MA Experiment 20000437 PARAMETER Experiment Name: At_Drought_P Parameter: Plant Line Value: WS
  misc_feature: MA Experiment 20000437 PARAMETER Experiment Name: At_Drought_P Parameter: Timepoint (hr) Value: 24
  misc_feature: MA Experiment 20000437 PARAMETER Experiment Name: At_Drought_P Parameter: Tissue Value: Whole Plant
  misc_feature: MA Experiment 20000437 PARAMETER Experiment Name: At_Drought_P Parameter: Treatment Value: Drought vs. No Drought
  misc_feature: MA Experiment ID: 20000438 Result: Up-regulated in Transcription
  misc_feature: MA Experiment 20000438 PARAMETER Experiment Name: At_Shoots__P Parameter: Age (day) Value: 14
  misc_feature: MA Experiment 20000438 PARAMETER Experiment Name: At_Shoots__P Parameter: Tissue Value: Shoots vs. Whole Plant
  misc_feature: MA Experiment ID: 20000441 Result: Up-regulated in Transcription
  misc_feature: MA Experiment 20000441 PARAMETER Experiment Name: At_1uM_BR-BRZ__P Parameter: Tissue Value: Shoot Apices
  misc_feature: MA Experiment 20000441 PARAMETER Experiment Name: At_1uM_BR-BRZ__P Parameter: Treatment Value: 1uM BR vs. No Treatment
  misc_feature: MA Experiment ID: 20000495 Result: Up-regulated in Transcription
  misc_feature: MA Experiment 20000495 PARAMETER Experiment Name: At_Guard_Cells_P Parameter: Harvest Date Value: 8/2/2002
  misc_feature: MA Experiment 20000495 PARAMETER Experiment Name: At_Guard_Cells_P Parameter: Organism Value: A. thaliana
  misc_feature: MA Experiment 20000495 PARAMETER Experiment Name: At_Guard_Cells_P Parameter: Tissue Value: Guard Cells vs. Leaves
  misc_feature: MA Experiment ID: 20000709 Result: Up-regulated in Transcription
  misc_feature: MA Experiment 20000709 PARAMETER Experiment Name: At_15mM_NH4NO3_L-to-H_P Parameter: Age (hr) Value: 14
  misc_feature: MA Experiment 20000709 PARAMETER Experiment Name: At_15mM_NH4NO3_L-to-H_P Parameter: Organism Value: A. thaliana
  misc_feature: MA Experiment 20000709 PARAMETER Experiment Name: At_15mM_NH4NO3_L-to-H_P Parameter: Plant Line Value: WS
  misc_feature: MA Experiment 20000709 PARAMETER Experiment Name: At_15mM_NH4NO3_L-to-H_P Parameter: Timepoint (hr) Value: 4
  misc_feature: MA Experiment 20000709 PARAMETER Experiment Name: At_15mM_NH4NO3_L-to-H_P Parameter: Tissue Value: Aerial
  misc_feature: MA Experiment 20000709 PARAMETER Experiment Name: At_15mM_NH4NO3_L-to-H_P Parameter: Treatment Value: 15mM NH4NO3 vs. 30mM Mannitol
  misc_feature: MA Experiment ID: 20001451 Result: Up-regulated in Transcription
  misc_feature: MA Experiment 20001451 PARAMETER Experiment Name: At_Far-red-induction_P Parameter: Age (day) Value: 7
  misc_feature: MA Experiment 20001451 PARAMETER Experiment Name: At_Far-red-induction_P Parameter: Light Value: Far-red vs. White
  misc_feature: MA Experiment 20001451 PARAMETER Experiment Name: At_Far-red-induction_P Parameter: Organism Value: A. thaliana
  misc_feature: MA Experiment 20001451 PARAMETER Experiment Name: At_Far-red-induction_P Parameter: Plant Line Value: Columbia
  misc_feature: MA Experiment 20001451 PARAMETER Experiment Name: At_Far-red-induction_P Parameter: Timepoint (hr) Value: 24
  misc_feature: MA Experiment 20001451 PARAMETER Experiment Name: At_Far-red-induction_P Parameter: Tissue Value: Whole Plant
  misc_feature: MA Experiment ID: 20001457 Result: Up-regulated in Transcription
  misc_feature: MA Experiment 20001457 PARAMETER Experiment Name: At_50mM_NH4NO3_L-to-H_P Parameter: Age (day) Value: Undefined
  misc_feature: MA Experiment 20001457 PARAMETER Experiment Name: At_50mM_NH4NO3_L-to-H_P Parameter: Organism Value: Undefined
  misc_feature: MA Experiment 20001457 PARAMETER Experiment Name: At_50mM_NH4NO3_L-to-H_P Parameter: Plant Line Value: Undefined
  misc_feature: MA Experiment 20001457 PARAMETER Experiment Name: At_50mM_NH4NO3_L-to-H_P Parameter: Timepoint (hr) Value: 0.5
  misc_feature: MA Experiment 20001457 PARAMETER Experiment Name: At_50mM_NH4NO3_L-to-H_P Parameter: Tissue Value: Siliques
  misc_feature: MA Experiment 20001457 PARAMETER Experiment Name: At_50mM_NH4NO3_L-to-H_P Parameter: Treatment Value: 50mM NH4NO3 vs. 100mM Manitol
  misc_feature: MA Experiment ID: 20001458 Result: Up-regulated in Transcription
  misc_feature: MA Experiment 20001458 PARAMETER Experiment Name: At_50mM_NH4NO3_L-to-H_P Parameter: Age (day) Value: Undefined
  misc_feature: MA Experiment 20001458 PARAMETER Experiment Name: At_50mM_NH4NO3_L-to-H_P Parameter: Organism Value: Undefined
  misc_feature: MA Experiment 20001458 PARAMETER Experiment Name: At_50mM_NH4NO3_L-to-H_P Parameter: Plant Line Value: Undefined
  misc_feature: MA Experiment 20001458 PARAMETER Experiment Name: At_50mM_NH4NO3_L-to-H_P Parameter: Timepoint (hr) Value: 2
  misc_feature: MA Experiment 20001458 PARAMETER Experiment Name: At_50mM_NH4NO3_L-to-H_P Parameter: Tissue Value: Siliques
  misc_feature: MA Experiment 20001458 PARAMETER Experiment Name: At_50mM_NH4NO3_L-to-H_P Parameter: Treatment Value: 50mM NH4NO3 vs. 100mM Manitol
  misc_feature: MA Experiment ID: 20001459 Result: Up-regulated in Transcription
  misc_feature: MA Experiment 20001459 PARAMETER Experiment Name: At_50mM_NH4NO3_L-to-H_P Parameter: Age (day) Value: Undefined
  misc_feature: MA Experiment 20001459 PARAMETER Experiment Name: At_50mM_NH4NO3_L-to-H_P Parameter: Organism Value: Undefined
  misc_feature: MA Experiment 20001459 PARAMETER Experiment Name: At_50mM_NH4NO3_L-to-H_P Parameter: Plant Line Value: Undefined
  misc_feature: MA Experiment 20001459 PARAMETER Experiment Name: At_50mM_NH4NO3_L-to-H_P Parameter: Timepoint (hr) Value: 4
  misc_feature: MA Experiment 20001459 PARAMETER Experiment Name: At_50mM_NH4NO3_L-to-H_P Parameter: Tissue Value: Siliques
  misc_feature: MA Experiment 20001459 PARAMETER Experiment Name: At_50mM_NH4NO3_L-to-H_P Parameter: Treatment Value: 50mM NH4NO3 vs. 100mM Manitol
  misc_feature: MA Experiment ID: 20001557 Result: Down-regulated in Transcription
  misc_feature: MA Experiment 20001557 PARAMETER Experiment Name: At_Drought_Soil_Dry_P Parameter: Age (day) Value: 27
  misc_feature: MA Experiment 20001557 PARAMETER Experiment Name: At_Drought_Soil_Dry_P Parameter: Organism Value: A. thaliana
  misc_feature: MA Experiment 20001557 PARAMETER Experiment Name: At_Drought_Soil_Dry_P Parameter: Plant Line Value: WS
  misc_feature: MA Experiment 20001557 PARAMETER Experiment Name: At_Drought_Soil_Dry_P Parameter: Post Timepoint (hr) Value: 3
  misc_feature: MA Experiment 20001557 PARAMETER Experiment Name: At_Drought_Soil_Dry_P Parameter: Post-Treatment Value: Re-Water vs. No Drought
  misc_feature: MA Experiment 20001557 PARAMETER Experiment Name: At_Drought_Soil_Dry_P Parameter: Timepoint (day) Value: 13
  misc_feature: MA Experiment 20001557 PARAMETER Experiment Name: At_Drought_Soil_Dry_P Parameter: Treatment Value: Drought vs. No Drought
  misc_feature: MA Experiment ID: 20001559 Result: Down-regulated in Transcription
  misc_feature: MA Experiment 20001559 PARAMETER Experiment Name: At_Drought_Soil_Dry_P Parameter: Age (day) Value: 28
  misc_feature: MA Experiment 20001559 PARAMETER Experiment Name: At_Drought_Soil_Dry_P Parameter: Organism Value: A. thaliana
  misc_feature: MA Experiment 20001559 PARAMETER Experiment Name: At_Drought_Soil_Dry_P Parameter: Plant Line Value: WS
  misc_feature: MA Experiment 20001559 PARAMETER Experiment Name: At_Drought_Soil_Dry_P Parameter: Post Timepoint (hr) Value: 29
  misc_feature: MA Experiment 20001559 PARAMETER Experiment Name: At_Drought_Soil_Dry_P Parameter: Post-Treatment Value: Re-Water vs. No Drought
  misc_feature: MA Experiment 20001559 PARAMETER Experiment Name: At_Drought_Soil_Dry_P Parameter: Timepoint (day) Value: 14
  misc_feature: MA Experiment 20001559 PARAMETER Experiment Name: At_Drought_Soil_Dry_P Parameter: Treatment Value: Drought vs. No Drought
  misc_feature: MA Experiment ID: 20001755 Result: Up-regulated in Transcription
  misc_feature: MA Experiment 20001755 PARAMETER Experiment Name: At_50mM_NH4NO3_L-to-H_P Parameter: Timepoint (hr) Value: 2
  misc_feature: MA Experiment 20001755 PARAMETER Experiment Name: At_50mM_NH4NO3_L-to-H_P Parameter: Tissue Value: Leaf
  misc_feature: MA Experiment 20001755 PARAMETER Experiment Name: At_50mM_NH4NO3_L-to-H_P Parameter: Treatment Value: 50mM NH4NO3 vs 100mM Mannitol
  misc_feature: MA Experiment ID: 20001756 Result: Up-regulated in Transcription
  misc_feature: MA Experiment 20001756 PARAMETER Experiment Name: At_50mM_NH4NO3_L-to-H_P Parameter: Timepoint (hr) Value: 4
  misc_feature: MA Experiment 20001756 PARAMETER Experiment Name: At_50mM_NH4NO3_L-to-H_P Parameter: Tissue Value: Leaf
  misc_feature: MA Experiment 20001756 PARAMETER Experiment Name: At_50mM_NH4NO3_L-to-H_P Parameter: Treatment Value: 50mM NH4NO3 vs 100mM Mannitol
  misc_feature: MA Experiment ID: 20001757 Result: Up-regulated in Transcription
  misc_feature: MA Experiment 20001757 PARAMETER Experiment Name: At_50mM_NH4NO3_L-to-H_P Parameter: Timepoint (hr) Value: 6
  misc_feature: MA Experiment 20001757 PARAMETER Experiment Name: At_50mM_NH4NO3_L-to-H_P Parameter: Tissue Value: Leaf
  misc_feature: MA Experiment 20001757 PARAMETER Experiment Name: At_50mM_NH4NO3_L-to-H_P Parameter: Treatment Value: 50mM NH4NO3 vs 100mM Mannitol
  misc_feature: MA Experiment ID: 20001759 Result: Up-regulated in Transcription
  misc_feature: MA Experiment 20001759 PARAMETER Experiment Name: At_50mM_NH4NO3_L-to-H_P Parameter: Timepoint (hr) Value: 1
  misc_feature: MA Experiment 20001759 PARAMETER Experiment Name: At_50mM_NH4NO3_L-to-H_P Parameter: Tissue Value: Siliques
  misc_feature: MA Experiment 20001759 PARAMETER Experiment Name: At_50mM_NH4NO3_L-to-H_P Parameter: Treatment Value: 50mM NH4NO3 vs 100mM Mannitol
  misc_feature: MA Experiment ID: 20001760 Result: Up-regulated in Transcription
  misc_feature: MA Experiment 20001760 PARAMETER Experiment Name: At_50mM_NH4NO3_L-to-H_P Parameter: Timepoint (hr) Value: 2
  misc_feature: MA Experiment 20001760 PARAMETER Experiment Name: At_50mM_NH4NO3_L-to-H_P Parameter: Tissue Value: Siliques
  misc_feature: MA Experiment 20001760 PARAMETER Experiment Name: At_50mM_NH4NO3_L-to-H_P Parameter: Treatment Value: 50mM NH4NO3 vs 100mM Mannitol
  misc_feature: MA Experiment ID: 20001906 Result: Down-regulated in Transcription
  misc_feature: MA Experiment 20001906 PARAMETER Experiment Name: At_Drought_Reproduction_P Parameter: Age (day) Value: 35
  misc_feature: MA Experiment 20001906 PARAMETER Experiment Name: At_Drought_Reproduction_P Parameter: Organism Value: A. thaliana
  misc_feature: MA Experiment 20001906 PARAMETER Experiment Name: At_Drought_Reproduction_P Parameter: Plant Line Value: WS
  misc_feature: MA Experiment 20001906 PARAMETER Experiment Name: At_Drought_Reproduction_P Parameter: Timepoint (day) Value: 5
  misc_feature: MA Experiment 20001906 PARAMETER Experiment Name: At_Drought_Reproduction_P Parameter: Tissue Value: Siliques
  misc_feature: MA Experiment 20001906 PARAMETER Experiment Name: At_Drought_Reproduction_P Parameter: Treatment Value: Drought vs. No Drought
  misc_feature: MA Experiment ID: 20001908 Result: Down-regulated in Transcription
  misc_feature: MA Experiment 20001908 PARAMETER Experiment Name: At_Drought_Reproduction_P Parameter: Age (day) Value: 40
  misc_feature: MA Experiment 20001908 PARAMETER Experiment Name: At_Drought_Reproduction_P Parameter: Organism Value: A. thaliana
  misc_feature: MA Experiment 20001908 PARAMETER Experiment Name: At_Drought_Reproduction_P Parameter: Plant Line Value: WS
  misc_feature: MA Experiment 20001908 PARAMETER Experiment Name: At_Drought_Reproduction_P Parameter: Timepoint (day) Value: 10
  misc_feature: MA Experiment 20001908 PARAMETER Experiment Name: At_Drought_Reproduction_P Parameter: Tissue Value: Siliques
  misc_feature: MA Experiment 20001908 PARAMETER Experiment Name: At_Drought_Reproduction_P Parameter: Treatment Value: Drought vs. No Drought
attttaatctctcttctcttttttttgtctgtgcaaagatatcactttcttcttcttcttctcccagacatcagcaagattcaggagattaaaaccttaaattaaaacaatacaaactccaaattcaccggaggaaataacttaaaacttgaatctgaaaagatgagctgcaatggttgccgtgttctccggaaaggttgcagcgagaattgtatcctccggccatgtattcaatggattgaaaccgccgatgctcaaggccacgccaccgtcttcgtcgctaaattcttcggccgtgctggtctcatgtcctttatctccgctgttccggattctcaacgtcctgctttgtttcagtcgttgctctacgaagcttgtggaagaactgtcaatccagttaacggagcaatcggaatgttatggactggaaactggaatatctgtcaagcggctgttgaaacagtgcttcgcggcggttctttaagaccgatcccggagcttctcactcacggcggcggtttcgctggctttccttcgcctacatctgaagaagcatctgagatctgcaccgaaatgttgaatctccagcaaaatgattccaccgatcgtaacatctatcatcattcacgattctcaagctctagatctagatctactatggattcttcttctccgacgaaacgtaagagattatcatcggaagaccaaccatcttcggagcttgatctatctctcatccctaattttcccattaagcaagcaacaccttcttctacacggcggcgatcagtaacaccgtcgatgaactcagaggactccgggacgacgacgactacgacggcgttttgtgacaagggtgatgtgtacggtaacggaggaggagaaacgaccaagttgcttaacctttttgtttaatgcaaaacggcggcggttttctcagagttagtctagggttttaaatgtaattttacacattttcttcctttttcctggataaatattggaccggcgaattaacaactacgtcgttttgttctctcggttttgagtcccccccccccccaccattaaccaattgtaaaactttattgagtgaaaaatattatgtctagtttttctgcataatccagtaacaatgtgaact

SEQ ID NO: 25300 - protein, 250 aa, Arabidopsis thaliana
  peptide (1)..(250): Ceres Seq. ID no. 13612289
  misc_feature (2)..(107): Pfam Name: Protein of unknown function DUF260 Pfam Description: Protein of unknown function DUF260
  misc_feature (1)..(111): Homolog of NCBI NO: 34895540 NR Description: unnamed protein product [Oryza sativa (japonica
  misc_feature (1)..(110): Homolog of NCBI NO: 40539088 NR Description: expressed protein [Oryza sativa (japonica
  misc_feature (1)..(186): Homolog of NCBI NO: 15219829 NR Description: lateral organ boundaries (LOB) domain family
  misc_feature (1)..(222): Homolog of NCBI NO: 34394489 NR Description: putative lateral organ boundaries (LOB) domain
  misc_feature (1)..(250): Homolog of NCBI NO: 15235604 NR Description: lateral organ boundaries (LOB) domain family
  misc_feature (1)..(250): Homolog of NCBI NO: 21592894 NR Description: unknown [Arabidopsis thaliana]
  misc_feature (1)..(249): Homolog of NCBI NO: 21553886 NR Description: unknown [Arabidopsis thaliana]
  misc_feature (1)..(249): Homolog of NCBI NO: 15229644 NR Description: lateral organ boundaries (LOB) domain protein,
  misc_feature (1)..(250): Homolog of NCBI NO: 21593577 NR Description: unknown [Arabidopsis thaliana]
  misc_feature (1)..(250): Homolog of NCBI NO: 15240739 NR Description: lateral organ boundaries (LOB) domain protein 37
MSCNGCRVLRKGCSENCILRPCIQWIETADAQGHATVFVAKFFGRAGLMSFISAVPDSQRPALFQSLLYEACGRTVNPVNGAIGMLWTGNWNICQAAVETVLRGGSLRPIPELLTHGGGFAGFPSPTSEEASEICTEMLNLQQNDSTDRNIYHHSRFSSSRSRSTMDSSSPTKRKRLSSEDQPSSELDLSLIPNFPIKQATPSSTRRRSVTPSMNSEDSGTTTTTTAFCDKGDVYGNGGGETTKLLNLFV

SEQ ID NO: 25301 - protein, 202 aa, Arabidopsis thaliana
  peptide (1)..(202): Ceres Seq. ID no. 13612290
  misc_feature (1)..(59): Pfam Name: Protein of unknown function DUF260 Pfam Description: Protein of unknown function DUF260
  misc_feature (1)..(63): Homolog of NCBI NO: 34895540 NR Description: unnamed protein product [Oryza sativa (japonica
  misc_feature (1)..(62): Homolog of NCBI NO: 40539088 NR Description: expressed protein [Oryza sativa (japonica
  misc_feature (1)..(138): Homolog of NCBI NO: 15219829 NR Description: lateral organ boundaries (LOB) domain family
  misc_feature (1)..(174): Homolog of NCBI NO: 34394489 NR Description: putative lateral organ boundaries (LOB) domain
  misc_feature (1)..(202): Homolog of NCBI NO: 15235604 NR Description: lateral organ boundaries (LOB) domain family
  misc_feature (1)..(202): Homolog of NCBI NO: 21592894 NR Description: unknown [Arabidopsis thaliana]
  misc_feature (1)..(201): Homolog of NCBI NO: 21553886 NR Description: unknown [Arabidopsis thaliana]
  misc_feature (1)..(201): Homolog of NCBI NO: 15229644 NR Description: lateral organ boundaries (LOB) domain protein,
  misc_feature (1)..(202): Homolog of NCBI NO: 21593577 NR Description: unknown [Arabidopsis thaliana]
  misc_feature (1)..(202): Homolog of NCBI NO: 15240739 NR Description: lateral organ boundaries (LOB) domain protein 37
MSFISAVPDSQRPALFQSLLYEACGRTVNPVNGAIGMLWTGNWNICQAAVETVLRGGSLRPIPELLTHGGGFAGFPSPTSEEASEICTEMLNLQQNDSTDRNIYHHSRFSSSRSRSTMDSSSPTKRKRLSSEDQPSSELDLSLIPNFPIKQATPSSTRRRSVTPSMNSEDSGTTTTTTAFCDKGDVYGNGGGETTKLLNLFV

SEQ ID NO: 25302 - protein, 166 aa, Arabidopsis thaliana
  peptide (1)..(166): Ceres Seq. ID no. 13612291
  misc_feature (1)..(27): Homolog of NCBI NO: 34895540 NR Description: unnamed protein product [Oryza sativa (japonica
  misc_feature (1)..(26): Homolog of NCBI NO: 40539088 NR Description: expressed protein [Oryza sativa (japonica
  misc_feature (1)..(102): Homolog of NCBI NO: 15219829 NR Description: lateral organ boundaries (LOB) domain family
  misc_feature (1)..(138): Homolog of NCBI NO: 34394489 NR Description: putative lateral organ boundaries (LOB) domain
  misc_feature (1)..(166): Homolog of NCBI NO: 15235604 NR Description: lateral organ boundaries (LOB) domain family
  misc_feature (1)..(166): Homolog of NCBI NO: 21592894 NR Description: unknown [Arabidopsis thaliana]
  misc_feature (1)..(165): Homolog of NCBI NO: 21553886 NR Description: unknown [Arabidopsis thaliana]
  misc_feature (1)..(165): Homolog of NCBI NO: 15229644 NR Description: lateral organ boundaries (LOB) domain protein,
  misc_feature (1)..(166): Homolog of NCBI NO: 21593577 NR Description: unknown [Arabidopsis thaliana]
  misc_feature (1)..(166): Homolog of NCBI NO: 15240739 NR Description: lateral organ boundaries (LOB) domain protein 37
MLWTGNWNICQAAVETVLRGGSLRPIPELLTHGGGFAGFPSPTSEEASEICTEMLNLQQNDSTDRNIYHHSRFSSSRSRSTMDSSSPTKRKRLSSEDQPSSELDLSLIPNFPIKQATPSSTRRRSVTPSMNSEDSGTTTTTTAFCDKGDVYGNGGGETTKLLNLFV

SEQ ID NO: 25303 - DNA, 1698 bp, Arabidopsis thaliana
  misc_feature (1)..(1698): Ceres Seq. ID no. 12335362
  misc_feature: MA Experiment ID: 108434 Result: Up-regulated in Transcription
  misc_feature: MA Experiment 108434 PARAMETER Experiment Name: At_Root_Tips_cDNA_P Parameter: Tissue Value: Root Tips
  misc_feature: MA Experiment ID: 108462 Result: Down-regulated in Transcription
  misc_feature: MA Experiment 108462 PARAMETER Experiment Name: At_Germinating_Seeds_cDNA_P Parameter: Age (day) Value: 2 vs. 0
  misc_feature: MA Experiment 108462 PARAMETER Experiment Name: At_Germinating_Seeds_cDNA_P Parameter: Tissue Value: Germinating Seeds
  misc_feature: MA Experiment ID: 108463 Result: Down-regulated in Transcription
  misc_feature: MA Experiment 108463 PARAMETER Experiment Name: At_Germinating_Seeds_cDNA_P Parameter: Age (day) Value: 3 vs. 0
  misc_feature: MA Experiment 108463 PARAMETER Experiment Name: At_Germinating_Seeds_cDNA_P Parameter: Tissue Value: Germinating Seeds
  misc_feature: MA Experiment ID: 108464 Result: Down-regulated in Transcription
  misc_feature: MA Experiment 108464 PARAMETER Experiment Name: At_Germinating_Seeds_cDNA_P Parameter: Age (day) Value: 4 vs. 0
  misc_feature: MA Experiment 108464 PARAMETER Experiment Name: At_Germinating_Seeds_cDNA_P Parameter: Tissue Value: Germinating Seeds
  misc_feature: MA Experiment ID: 108585 Result: Up-regulated in Transcription
  misc_feature: MA Experiment 108585 PARAMETER Experiment Name: At_5mM_NaNP_cDNA_P Parameter: Timepoint (hr) Value: 6
  misc_feature: MA Experiment 108585 PARAMETER Experiment Name: At_5mM_NaNP_cDNA_P Parameter: Tissue Value: Aerial
  misc_feature: MA Experiment 108585 PARAMETER Experiment Name: At_5mM_NaNP_cDNA_P Parameter: Treatment Value: null
  misc_feature: MA Experiment ID: 20000224 Result: Up-regulated in Transcription
  misc_feature: MA Experiment ID: 20000315 Result: Down-regulated in Transcription
  misc_feature: MA Experiment 20000315 PARAMETER Experiment Name: At_14day_Shoots-Roots_Sub_P Parameter: Age (day) Value: 14
  misc_feature: MA Experiment 20000315 PARAMETER Experiment Name: At_14day_Shoots-Roots_Sub_P Parameter: Organism Value: A. thaliana
  misc_feature: MA Experiment 20000315 PARAMETER Experiment Name: At_14day_Shoots-Roots_Sub_P Parameter: Plant Line Value: WS
  misc_feature: MA Experiment 20000315 PARAMETER Experiment Name: At_14day_Shoots-Roots_Sub_P Parameter: Tissue Value: Shoots vs. Whole Plant
  misc_feature: MA Experiment ID: 20000440 Result: Up-regulated in Transcription
  misc_feature: MA Experiment 20000440 PARAMETER Experiment Name: At_Closed-Flower__Sub_P Parameter: Tissue Value: Closed Flower vs. Whole Plant
acttgttcaaggggttggggtttcgacgctaacattctctctctcagtgaacctttagaagttaaatctgtttcatcaccggaaagtttcactaactcttcttctctctctcggagtattgattcccggcgtttagcaatggaagaaagtagacaactcgaatcgtcgattgatcggctgctgaacgaagagaaacagatgaggctcgcagaaaatgtcgccggaactagaaaagcagctaccgagattcttaagctttgtttcgaagctaaggattggaaacttctcaacgaacagattttgaatctctcgaagaaacgtggtcagcttaagcaggctgtacaatccatggtgcaacaagcaatgcagtatattgatcagacactagacatagaaactcggattgagcttattaagactctaaacaatgtagctgctggaaagatatatgtcgaaatcgagagagctcgtttgaccaagatgcttgctaagattaaggaagaacaaggtttgattgctgaagctgcggatctcatgcaagaagttgctgtggagacatttggtgctatggcaaaaactgagaaaattgctttcattcttgaacaagtccgcttgtgtttggatcaaaaagattttgtccgtgcacaaattttatctaggaagatcaacccaagagtgtttgatgcagataccacgaaggagaaaaagaagcctaaggaaggtgaaaacatggtagaggaggctccggctgatatacctacattgttggtgctaaaacggatttactatgagctaatgattcggtattattctcacaacaatgagtacattgagatatgccgtagctacaaggcgatatatgatatcccttctgtaaaggaaaacccagaacaatggattccagtcctgagaaagatttgctggtttttggccttggcaccacatgatccaatgcaatcgagcctactcaatgcaaccttggaagataaaaagttatcagagattcctgatttcaagatgcttctaaaacagattgttacaatggaggtgattcagtggacatctctctggaataaatacaaggacgagtttgagaatgagaaaaacatgattggaggctctttgggtgacaaagctggtgaagatctcaaactaagaataatcgaacacaatattctcgttgtctcaaagtactactcaaggattacctttaagagacttgcagaacttttatgcctaaccactgaggaagcagagaagcatctatctgaaatggttgtgtccaaagccttgatagcaaaaatcgacagaccatcaggaataatctgcttccagattgttaaagacagcaacgaaatcctcaactcgtgggcaacaaacttggagaagcttttggatcttgttgaaaagagttgtcaccaaattcacaaagaaacaatggttcataaagttgcactaagagcttgagaacccggtctagccacacacatcggtggaaagaatctttcaggctctcgttctaacataatcatttgagttttctttctctgcttggttcgaacacattttttttgtgttctttaggagaccttgcaagattatatacaaaactctcttttttttcctttctccatgtggtctttttaatgtttgttacaatgaaacgaaattataatgcaaaaatataataaattaagt

SEQ ID NO: 25304 - protein, 488 aa, Arabidopsis thaliana
  peptide (1)..(488): Ceres Seq. ID no. 12335363
  misc_feature (336)..(446): Pfam Name: PCI domain Pfam Description: PCI domain
  misc_feature (258)..(484): Homolog of NCBI NO: 4506221 NR Description: proteasome 26S non-ATPase subunit 12 isoform 1
  misc_feature (53)..(484): Homolog of NCBI NO: 40741155 NR Description: hypothetical protein AN4775.2 [Aspergillus
  misc_feature (47)..(484): Homolog of NCBI NO: 27503944 NR Description: Similar to proteasome (prosome, macropain) 26S
  misc_feature (37)..(484): Homolog of NCBI NO: 12857304 NR Description: unnamed protein product [Mus musculus]
  misc_feature (37)..(484): Homolog of NCBI NO: 13385384 NR Description: proteasome 26S non-ATPase subunit 12 [Mus
  misc_feature (221)..(488): Homolog of NCBI NO: 17298157 NR Description: 26S proteasome regulatory particle non-ATPase
  misc_feature (47)..(488): Homolog of NCBI NO: 27573351 NR Description: putative proteasome regulatory non-ATPase subunit
  misc_feature (47)..(487): Homolog of NCBI NO: 15242545 NR Description: 26S proteasome regulatory subunit (RPN5), putative
  misc_feature (47)..(488): Homolog of NCBI NO: 30698065 NR Description: 26S proteasome regulatory subunit (RPN5),
  misc_feature (4)..(488): Homolog of NCBI NO: 10177207 NR Description: proteasome regulatory subunit-like [Arabidopsis
TCSRGWGFDANILSLSEPLEVKSVSSPESFTNSSSLSRSIDSRRLAMEESRQLESSIDRLLNEEKQMRLAENVAGTRKAATEILKLCFEAKDWKLLNEQILNLSKKRGQLKQAVQSMVQQAMQYIDQTLDIETRIELIKTLNNVAAGKIYVEIERARLTKMLAKIKEEQGLIAEAADLMQEVAVETFGAMAKTEKIAFILEQVRLCLDQKDFVRAQILSRKINPRVFDADTTKEKKKPKEGENMVEEAPADIPTLLVLKRIYYELMIRYYSHNNEYIEICRSYKAIYDIPSVKENPEQWIPVLRKICWFLALAPHDPMQSSLLNATLEDKKLSEIPDFKMLLKQIVTMEVIQWTSLWNKYKDEFENEKNMIGGSLGDKAGEDLKLRIIEHNILVVSKYYSRITFKRLAELLCLTTEEAEKHLSEMVVSKALIAKIDRPSGIICFQIVKDSNEILNSWATNLEKLLDLVEKSCHQIHKETMVHKVALRA

SEQ ID NO: 25305 - protein, 442 aa, Arabidopsis thaliana
  peptide (1)..(442): Ceres Seq. ID no. 12335364
  misc_feature (290)..(400): Pfam Name: PCI domain Pfam Description: PCI domain
  misc_feature (1)..(438): Homolog of NCBI NO: 27503944 NR Description: Similar to proteasome (prosome, macropain) 26S
  misc_feature (1)..(438): Homolog of NCBI NO: 12857304 NR Description: unnamed protein product [Mus musculus]
  misc_feature (1)..(438): Homolog of NCBI NO: 13385384 NR Description: proteasome 26S non-ATPase subunit 12 [Mus
  misc_feature (175)..(442): Homolog of NCBI NO: 17298157 NR Description: 26S proteasome regulatory particle non-ATPase
  misc_feature (212)..(438): Homolog of NCBI NO: 4506221 NR Description: proteasome 26S non-ATPase subunit 12 isoform 1
  misc_feature (7)..(438): Homolog of NCBI NO: 40741155 NR Description: hypothetical protein AN4775.2 [Aspergillus
  misc_feature (1)..(442): Homolog of NCBI NO: 27573351 NR Description: putative proteasome regulatory non-ATPase subunit
  misc_feature (1)..(441): Homolog of NCBI NO: 15242545 NR Description: 26S proteasome regulatory subunit (RPN5), putative
  misc_feature (1)..(442): Homolog of NCBI NO: 30698065 NR Description: 26S proteasome regulatory subunit (RPN5),
  misc_feature (1)..(442): Homolog of NCBI NO: 10177207 NR Description: proteasome regulatory subunit-like [Arabidopsis
MEESRQLESSIDRLLNEEKQMRLAENVAGTRKAATEILKLCFEAKDWKLLNEQILNLSKKRGQLKQAVQSMVQQAMQYIDQTLDIETRIELIKTLNNVAAGKIYVEIERARLTKMLAKIKEEQGLIAEAADLMQEVAVETFGAMAKTEKIAFILEQVRLCLDQKDFVRAQILSRKINPRVFDADTTKEKKKPKEGENMVEEAPADIPTLLVLKRIYYELMIRYYSHNNEYIEICRSYKAIYDIPSVKENPEQWIPVLRKICWFLALAPHDPMQSSLLNATLEDKKLSEIPDFKMLLKQIVTMEVIQWTSLWNKYKDEFENEKNMIGGSLGDKAGEDLKLRIIEHNILVVSKYYSRITFKRLAELLCLTTEEAEKHLSEMVVSKALIAKIDRPSGIICFQIVKDSNEILNSWATNLEKLLDLVEKSCHQIHKETMVHKVALRA

SEQ ID NO: 25306 - protein, 422 aa, Arabidopsis thaliana
  peptide (1)..(422): Ceres Seq. ID no. 12335365
  misc_feature (270)..(380): Pfam Name: PCI domain Pfam Description: PCI domain
  misc_feature (192)..(418): Homolog of NCBI NO: 4506221 NR Description: proteasome 26S non-ATPase subunit 12 isoform 1
  misc_feature (1)..(418): Homolog of NCBI NO: 40741155 NR Description: hypothetical protein AN4775.2 [Aspergillus
  misc_feature (1)..(418): Homolog of NCBI NO: 27503944 NR Description: Similar to proteasome (prosome, macropain) 26S
  misc_feature (1)..(418): Homolog of NCBI NO: 12857304 NR Description: unnamed protein product [Mus musculus]
  misc_feature (1)..(418): Homolog of NCBI NO: 13385384 NR Description: proteasome 26S non-ATPase subunit 12 [Mus
  misc_feature (155)..(422): Homolog of NCBI NO: 17298157 NR Description: 26S proteasome regulatory particle non-ATPase
  misc_feature (1)..(422): Homolog of NCBI NO: 27573351 NR Description: putative proteasome regulatory non-ATPase subunit
  misc_feature (1)..(421): Homolog of NCBI NO: 15242545 NR Description: 26S proteasome regulatory subunit (RPN5), putative
  misc_feature (1)..(422): Homolog of NCBI NO: 30698065 NR Description: 26S proteasome regulatory subunit (RPN5),
  misc_feature (1)..(422): Homolog of NCBI NO: 10177207 NR Description: proteasome regulatory subunit-like [Arabidopsis
MRLAENVAGTRKAATEILKLCFEAKDWKLLNEQILNLSKKRGQLKQAVQSMVQQAMQYIDQTLDIETRIELIKTLNNVAAGKIYVEIERARLTKMLAKIKEEQGLIAEAADLMQEVAVETFGAMAKTEKIAFILEQVRLCLDQKDFVRAQILSRKINPRVFDADTTKEKKKPKEGENMVEEAPADIPTLLVLKRIYYELMIRYYSHNNEYIEICRSYKAIYDIPSVKENPEQWIPVLRKICWFLALAPHDPMQSSLLNATLEDKKLSEIPDFKMLLKQIVTMEVIQWTSLWNKYKDEFENEKNMIGGSLGDKAGEDLKLRIIEHNILVVSKYYSRITFKRLAELLCLTTEEAEKHLSEMVVSKALIAKIDRPSGIICFQIVKDSNEILNSWATNLEKLLDLVEKSCHQIHKETMVHKVALRA

SEQ ID NO: 25307 - DNA, 1139 bp, Arabidopsis thaliana
  misc_feature (1)..(1139): Ceres Seq. ID no. 12370812
  misc_feature: MA Experiment ID: 108433 Result: Down-regulated in Transcription
  misc_feature: MA Experiment 108433 PARAMETER Experiment Name: At_rhl_Mutant2_cDNA_P Parameter: Age (day) Value: 7
  misc_feature: MA Experiment 108433 PARAMETER Experiment Name: At_rhl_Mutant2_cDNA_P Parameter: Organism Value: A. thaliana
  misc_feature: MA Experiment 108433 PARAMETER Experiment Name: At_rhl_Mutant2_cDNA_P Parameter: Plant Line Value: rhl Mutant vs. wt landsburg
  misc_feature: MA Experiment 108433 PARAMETER Experiment Name: At_rhl_Mutant2_cDNA_P Parameter: Tissue Value: Roots
  misc_feature: MA Experiment ID: 108461 Result: Up-regulated in Transcription
  misc_feature: MA Experiment 108461 PARAMETER Experiment Name: At_Germinating_Seeds_cDNA_P Parameter: Age (day) Value: 1 vs. 0
  misc_feature: MA Experiment 108461 PARAMETER Experiment Name: At_Germinating_Seeds_cDNA_P Parameter: Tissue Value: Germinating Seeds
  misc_feature: MA Experiment ID: 20000112 Result: Up-regulated in Transcription
  misc_feature: MA Experiment 20000112 PARAMETER Experiment Name: At_42deg_Heat_cDNA_P Parameter: Temperature (deg C) Value: 42 vs. 22
  misc_feature: MA Experiment 20000112 PARAMETER Experiment Name: At_42deg_Heat_cDNA_P Parameter: Timepoint (hr) Value: 2
  misc_feature: MA Experiment 20000112 PARAMETER Experiment Name: At_42deg_Heat_cDNA_P Parameter: Tissue Value: Aerial
  misc_feature: MA Experiment ID: 20000144 Result: Up-regulated in Transcription
  misc_feature: MA Experiment 20000144 PARAMETER Experiment Name: At_42deg_Heat_cDNA_P Parameter: Temperature (deg C) Value: 42 vs. 22
  misc_feature: MA Experiment 20000144 PARAMETER Experiment Name: At_42deg_Heat_cDNA_P Parameter: Timepoint (hr) Value: 1
  misc_feature: MA Experiment 20000144 PARAMETER Experiment Name: At_42deg_Heat_cDNA_P Parameter: Tissue Value: Aerial
  misc_feature: MA Experiment ID: 20000179 Result: Up-regulated in Transcription
  misc_feature: MA Experiment 20000179 PARAMETER Experiment Name: At_Germinating_Seeds_P Parameter: Age (hr) Value: 6 vs. 0
  misc_feature: MA Experiment 20000179 PARAMETER Experiment Name: At_Germinating_Seeds_P Parameter: Tissue Value: Germinating Seeds
  misc_feature: MA Experiment ID: 20000180 Result: Up-regulated in Transcription
  misc_feature: MA Experiment 20000180 PARAMETER Experiment Name: At_Germinating_Seeds_P Parameter: Age (hr) Value: 24 vs. 0
  misc_feature: MA Experiment 20000180 PARAMETER Experiment Name: At_Germinating_Seeds_P Parameter: Tissue Value: Germinating Seeds
  misc_feature: MA Experiment ID: 20000224 Result: Down-regulated in Transcription
ctttctcagattcgctctttcccgagaaaatttgaagaaacagagattcatcattttctcttcctctcaaaaatcagatctgcaaaactctcagatcactcatgggtttgatttcaaaccctacccgtttgattctcgtcgccaccatcttcttcctcgtttcttcaatctccggtcaggattctgtcgttgagaacaatgagagacaagaatctgaaggatctggtaaagagcttggtcgtcgtggaatggttggtactgaacgaattggagttgatactgttgtagacaatattggtgctcttggtttgaatctagaccttgatgctactgctcctagtgtatttgatgctttgttttcgagtttctcgatgatacttgtcaccgagattggggatgaaacttttataatagcggcattgatggctatgcgacatcctaaagctactgttttatctggtgcactctcagctttgtttgttatgactatactttctactggacttggtaggatagtgccaaacttgatatcgaggaagcacaccaatagtgctgctacagtgctctatgcattttttggtttgcgactactctacattgcttggaggtctactgattcaaagtcaaatcagaagaaagaaatggaggaagttgaagagaagctcgagtcaggtcaagggaagacacccttccgtcgtttattctcaagattttgtaccccaatatttctggagtccttcatcttaacctttctagctgaatggggtgaccgtagccagatcgctacaatagctttggcgactcacaagaacgccataggagtggccattggggcaagtattggacacactgtgtgtacttcactagcagttgttggaggaagcatgctggcttcaaggatctcgcaacgtacggtcgcaactgttggaggcttactcttcctcggcttttcagtctcctcctatttctatcctccattgtagtaaatgtgcttctttcgaaaatgggtgttagagacaatttctaagtaaagtttcaattttttttttgattttaatttaagtttgatttttgtttaatatcaatggccaaaatggccaaaccaaagaatccaacgcctatgcttttacaatttactt

SEQ ID NO: 25308 - protein, 293 aa, Arabidopsis thaliana
  peptide (1)..(293): Ceres Seq. ID no. 12370813
  misc_feature (209)..(284): Pfam Name: Uncharacterized protein family UPF0016 Pfam Description: Uncharacterized protein family UPF0016
  misc_feature (80)..(289): Homolog of NCBI NO: 15420543 NR Description: putative membrane protein [Crithidia fasciculata]
  misc_feature (80)..(288): Homolog of NCBI NO: 21593636 NR Description: transmembrane protein, putative [Arabidopsis
  misc_feature (80)..(288): Homolog of NCBI NO: 15222613 NR Description: transmembrane protein, putative
  misc_feature (177)..(292): Homolog of NCBI NO: 20385488 NR Description: transmembrane protein HTP-1 [Danio rerio]
  misc_feature (10)..(189): Homolog of NCBI NO: 20385488 NR Description: transmembrane protein HTP-1 [Danio rerio]
  misc_feature (73)..(292): Homolog of NCBI NO: 21357589 NR Description: CG4196-PC [Drosophila melanogaster]
  misc_feature (208)..(292): Homolog of NCBI NO: 31240317 NR Description: ENSANGP00000008699 [Anopheles gambiae]
  misc_feature (84)..(198): Homolog of NCBI NO: 31240317 NR Description: ENSANGP00000008699 [Anopheles gambiae]
  misc_feature (1)..(273): Homolog of NCBI NO: 9759042 NR Description: transmembrane protein FT27/PFT27-like
  misc_feature (1)..(293): Homolog of NCBI NO: 18421551 NR Description: transmembrane protein FT27/PFT27-like
MGLISNPTRLILVATIFFLVSSISGQDSVVENNERQESEGSGKELGRRGMVGTERIGVDTVVDNIGALGLNLDLDATAPSVFDALFSSFSMILVTEIGDETFIIAALMAMRHPKATVLSGALSALFVMTILSTGLGRIVPNLISRKHTNSAATVLYAFFGLRLLYIAWRSTDSKSNQKKEMEEVEEKLESGQGKTPFRRLFSRFCTPIFLESFILTFLAEWGDRSQIATIALATHKNAIGVAIGASIGHTVCTSLAVVGGSMLASRISQRTVATVGGLLFLGFSVSSYFYPPL

SEQ ID NO: 25309 - protein, 244 aa, Arabidopsis thaliana
  peptide (1)..(244): Ceres Seq. ID no. 12370814
  misc_feature (160)..(235): Pfam Name: Uncharacterized protein family UPF0016 Pfam Description: Uncharacterized protein family UPF0016
  misc_feature (31)..(240): Homolog of NCBI NO: 15420543 NR Description: putative membrane protein [Crithidia fasciculata]
  misc_feature (31)..(239): Homolog of NCBI NO: 21593636 NR Description: transmembrane protein, putative [Arabidopsis
  misc_feature (31)..(239): Homolog of NCBI NO: 15222613 NR Description: transmembrane protein, putative
  misc_feature (128)..(243): Homolog of NCBI NO: 20385488 NR Description: transmembrane protein HTP-1 [Danio rerio]
  misc_feature (1)..(140): Homolog of NCBI NO: 20385488 NR Description: transmembrane protein HTP-1 [Danio rerio]
  misc_feature (24)..(243): Homolog of NCBI NO: 21357589 NR Description: CG4196-PC [Drosophila melanogaster]
  misc_feature (159)..(243): Homolog of NCBI NO: 31240317 NR Description: ENSANGP00000008699 [Anopheles gambiae]
  misc_feature (35)..(149): Homolog of NCBI NO: 31240317 NR Description: ENSANGP00000008699 [Anopheles gambiae]
  misc_feature (1)..(224): Homolog of NCBI NO: 9759042 NR Description: transmembrane protein FT27/PFT27-like
  misc_feature (1)..(244): Homolog of NCBI NO: 18421551 NR Description: transmembrane protein FT27/PFT27-like
MVGTERIGVDTVVDNIGALGLNLDLDATAPSVFDALFSSFSMILVTEIGDETFIIAALMAMRHPKATVLSGALSALFVMTILSTGLGRIVPNLISRKHTNSAATVLYAFFGLRLLYIAWRSTDSKSNQKKEMEEVEEKLESGQGKTPFRRLFSRFCTPIFLESFILTFLAEWGDRSQIATIALATHKNAIGVAIGASIGHTVCTSLAVVGGSMLASRISQRTVATVGGLLFLGFSVSSYFYPPL

SEQ ID NO: 25310 - protein, 203 aa, Arabidopsis thaliana
  peptide (1)..(203): Ceres Seq. ID no. 12370815
  misc_feature (119)..(194): Pfam Name: Uncharacterized protein family UPF0016 Pfam Description: Uncharacterized protein family UPF0016
  misc_feature (1)..(199): Homolog of NCBI NO: 15420543 NR Description: putative membrane protein [Crithidia fasciculata]
  misc_feature (1)..(198): Homolog of NCBI NO: 21593636 NR Description: transmembrane protein, putative [Arabidopsis
  misc_feature (1)..(198): Homolog of NCBI NO: 15222613 NR Description: transmembrane protein, putative
  misc_feature (87)..(202): Homolog of NCBI NO: 20385488 NR Description: transmembrane protein HTP-1 [Danio rerio]
  misc_feature (1)..(99): Homolog of NCBI NO: 20385488 NR Description: transmembrane protein HTP-1 [Danio rerio]
  misc_feature (1)..(202): Homolog of NCBI NO: 21357589 NR Description: CG4196-PC [Drosophila melanogaster]
  misc_feature (118)..(202): Homolog of NCBI NO: 31240317 NR Description: ENSANGP00000008699 [Anopheles gambiae]
  misc_feature (1)..(108): Homolog of NCBI NO: 31240317 NR Description: ENSANGP00000008699 [Anopheles gambiae]
  misc_feature (1)..(183): Homolog of NCBI NO: 9759042 NR Description: transmembrane protein FT27/PFT27-like
  misc_feature (1)..(203): Homolog of NCBI NO: 18421551 NR Description: transmembrane protein FT27/PFT27-like
MILVTEIGDETFIIAALMAMRHPKATVLSGALSALFVMTILSTGLGRIVPNLISRKHTNSAATVLYAFFGLRLLYIAWRSTDSKSNQKKEMEEVEEKLESGQGKTPFRRLFSRFCTPIFLESFILTFLAEWGDRSQIATIALATHKNAIGVAIGASIGHTVCTSLAVVGGSMLASRISQRTVATVGGLLFLGFSVSSYFYPPL

SEQ ID NO: 25311 - DNA, 1354 bp, Arabidopsis thaliana
  misc_feature (1)..(1354): Ceres Seq. ID no. 12422655
  misc_feature: MA Experiment ID: 108433 Result: Up-regulated in Transcription
  misc_feature: MA Experiment 108433 PARAMETER Experiment Name: At_rhl_Mutant2_cDNA_P Parameter: Age (day) Value: 7
  misc_feature: MA Experiment 108433 PARAMETER Experiment Name: At_rhl_Mutant2_cDNA_P Parameter: Organism Value: A. thaliana
  misc_feature: MA Experiment 108433 PARAMETER Experiment Name: At_rhl_Mutant2_cDNA_P Parameter: Plant Line Value: rhl Mutant vs. wt landsburg
  misc_feature: MA Experiment 108433 PARAMETER Experiment Name: At_rhl_Mutant2_cDNA_P Parameter: Tissue Value: Roots
  misc_feature: MA Experiment ID: 108434 Result: Down-regulated in Transcription
  misc_feature: MA Experiment 108434 PARAMETER Experiment Name: At_Root_Tips_cDNA_P Parameter: Tissue Value: Root Tips
  misc_feature: MA Experiment ID: 108435 Result: Up-regulated in Transcription
  misc_feature: MA Experiment 108435 PARAMETER Experiment Name: At_stm_Mutants_cDNA_P Parameter: Plant Line Value: wt Landsburg vs stm
  misc_feature: MA Experiment 108435 PARAMETER Experiment Name: At_stm_Mutants_cDNA_P Parameter: Tissue Value: Shoot Apical Meristem Region
  misc_feature: MA Experiment ID: 108461 Result: Up-regulated in Transcription
  misc_feature: MA Experiment 108461 PARAMETER Experiment Name: At_Germinating_Seeds_cDNA_P Parameter: Age (day) Value: 1 vs. 0
  misc_feature: MA Experiment 108461 PARAMETER Experiment Name: At_Germinating_Seeds_cDNA_P Parameter: Tissue Value: Germinating Seeds
  misc_feature: MA Experiment ID: 108463 Result: Up-regulated in Transcription
  misc_feature: MA Experiment 108463 PARAMETER Experiment Name: At_Germinating_Seeds_cDNA_P Parameter: Age (day) Value: 3 vs. 0
  misc_feature: MA Experiment 108463 PARAMETER Experiment Name: At_Germinating_Seeds_cDNA_P Parameter: Tissue Value: Germinating Seeds
  misc_feature: MA Experiment ID: 108464 Result: Up-regulated in Transcription
  misc_feature: MA Experiment 108464 PARAMETER Experiment Name: At_Germinating_Seeds_cDNA_P Parameter: Age (day) Value: 4 vs. 0
  misc_feature: MA Experiment 108464 PARAMETER Experiment Name: At_Germinating_Seeds_cDNA_P Parameter: Tissue Value: Germinating Seeds
  misc_feature: MA Experiment ID: 108488 Result: Down-regulated in Transcription
  misc_feature: MA Experiment ID: 108574 Result: Up-regulated in Transcription
  misc_feature: MA Experiment 108574 PARAMETER Experiment Name: At_Wounding__cDNA_P Parameter: Timepoint (hr) Value: 1
  misc_feature: MA Experiment 108574 PARAMETER Experiment Name: At_Wounding__cDNA_P Parameter: Tissue Value: Aerial
  misc_feature: MA Experiment 108574 PARAMETER Experiment Name: At_Wounding__cDNA_P Parameter: Treatment Value: Wounding vs. No Wounding
  misc_feature: MA Experiment ID: 108577 Result: Down-regulated in Transcription
  misc_feature: MA Experiment 108577 PARAMETER Experiment Name: At_42deg_Heat_cDNA_P Parameter: Temperature (deg C) Value: 42 vs. 22
  misc_feature: MA Experiment 108577 PARAMETER Experiment Name: At_42deg_Heat_cDNA_P Parameter: Timepoint (hr) Value: 6
  misc_feature: MA Experiment 108577 PARAMETER Experiment Name: At_42deg_Heat_cDNA_P Parameter: Tissue Value: Aerial
  misc_feature: MA Experiment ID: 108585 Result: Up-regulated in Transcription
  misc_feature: MA Experiment 108585 PARAMETER Experiment Name: At_5mM_NaNP_cDNA_P Parameter: Timepoint (hr) Value: 6
  misc_feature: MA Experiment 108585 PARAMETER Experiment Name: At_5mM_NaNP_cDNA_P Parameter: Tissue Value: Aerial
  misc_feature: MA Experiment 108585 PARAMETER Experiment Name: At_5mM_NaNP_cDNA_P Parameter: Treatment Value: null
  misc_feature: MA Experiment ID: 108595 Result: Up-regulated in Transcription
  misc_feature: MA Experiment 108595 PARAMETER Experiment Name: At_Ler-pi_Ovule_cDNA_P Parameter: Plant Line Value: null
  misc_feature: MA Experiment ID: 108667 Result: Up-regulated in Transcription
  misc_feature: MA Experiment 108667 PARAMETER Experiment Name: At_2mM_SA_cDNA_P Parameter: Plant Line Value: WS
  misc_feature: MA Experiment 108667 PARAMETER Experiment Name: At_2mM_SA_cDNA_P Parameter: Timepoint (hr) Value: 1
  misc_feature: MA Experiment 108667 PARAMETER Experiment Name: At_2mM_SA_cDNA_P Parameter: Treatment Value: 2mM SA vs. No Treatment
  misc_feature: MA Experiment ID: 108668 Result: Up-regulated in Transcription
  misc_feature: MA Experiment 108668 PARAMETER Experiment Name: At_2mM_SA_cDNA_P Parameter: Plant Line Value: WS
  misc_feature: MA Experiment 108668 PARAMETER Experiment Name: At_2mM_SA_cDNA_P Parameter: Timepoint (hr) Value: 6
  misc_feature: MA Experiment 108668 PARAMETER Experiment Name: At_2mM_SA_cDNA_P Parameter: Treatment Value: 2mM SA vs. No Treatment
  misc_feature: MA Experiment ID: 20000069 Result: Up-regulated in Transcription
  misc_feature: MA Experiment 20000069 PARAMETER Experiment Name: At_100uM_ABA_Mutants_cDNA_P Parameter: Plant Line Value: CS23
  misc_feature: MA Experiment 20000069 PARAMETER Experiment Name: At_100uM_ABA_Mutants_cDNA_P Parameter: Timepoint (hr) Value: 6
  misc_feature: MA Experiment 20000069 PARAMETER Experiment Name: At_100uM_ABA_Mutants_cDNA_P Parameter: Tissue Value: Aerial
  misc_feature: MA Experiment 20000069 PARAMETER Experiment Name: At_100uM_ABA_Mutants_cDNA_P Parameter: Treatment Value: 100uM ABA vs. No Treatment
  misc_feature: MA Experiment ID: 20000072 Result: Up-regulated in Transcription
  misc_feature: MA Experiment 20000072 PARAMETER Experiment Name: At_100uM_ABA_Mutants_cDNA_P Parameter: Plant Line Value: CS8105
  misc_feature: MA Experiment 20000072 PARAMETER Experiment Name: At_100uM_ABA_Mutants_cDNA_P Parameter: Timepoint (hr) Value: 6
  misc_feature: MA Experiment 20000072 PARAMETER Experiment Name: At_100uM_ABA_Mutants_cDNA_P Parameter: Tissue Value: Aerial
  misc_feature: MA Experiment 20000072 PARAMETER Experiment Name: At_100uM_ABA_Mutants_cDNA_P Parameter: Treatment Value: 100uM ABA vs. No Treatment
  misc_feature: MA Experiment ID: 20000086 Result: Up-regulated in Transcription
  misc_feature: MA Experiment 20000086 PARAMETER Experiment Name: At_100uM_ABA_Mutants_cDNA_P Parameter: Plant Line Value: CS22
  misc_feature: MA Experiment 20000086 PARAMETER Experiment Name: At_100uM_ABA_Mutants_cDNA_P Parameter: Timepoint (hr) Value: 6
  misc_feature: MA Experiment 20000086 PARAMETER Experiment Name: At_100uM_ABA_Mutants_cDNA_P Parameter: Tissue Value: Aerial
  misc_feature: MA Experiment 20000086 PARAMETER Experiment Name: At_100uM_ABA_Mutants_cDNA_P Parameter: Treatment Value: 100uM ABA vs. No Treatment
  misc_feature: MA Experiment ID: 20000111 Result: Down-regulated in Transcription
  misc_feature: MA Experiment 20000111 PARAMETER Experiment Name: At_42deg_Heat_cDNA_P Parameter: Temperature (deg C) Value: 42 vs. 22
  misc_feature: MA Experiment 20000111 PARAMETER Experiment Name: At_42deg_Heat_cDNA_P Parameter: Timepoint (hr) Value: 6
  misc_feature: MA Experiment 20000111 PARAMETER Experiment Name: At_42deg_Heat_cDNA_P Parameter: Tissue Value: Aerial
  misc_feature: MA Experiment ID: 20000112 Result: Down-regulated in Transcription
  misc_feature: MA Experiment 20000112 PARAMETER Experiment Name: At_42deg_Heat_cDNA_P Parameter: Temperature (deg C) Value: 42 vs. 22
  misc_feature: MA Experiment 20000112 PARAMETER Experiment Name: At_42deg_Heat_cDNA_P Parameter: Timepoint (hr) Value: 2
  misc_feature: MA Experiment 20000112 PARAMETER Experiment Name: At_42deg_Heat_cDNA_P Parameter: Tissue Value: Aerial
acacaacaacaacacatccactcgaattttctatttccgaataacaaaaccgatcggcggagacatgacggcggcacaagggaactctaacgagactctgttttcttcttacaagatgggaagattcgatctctctcatcgagtggttctggcgccgatgacgcggtgcagggcgttgaacggagtaccaaacgcggcgttggcagagtattatgctcaacggaccactcccggcggttttctcatctccgaaggcaccatggtctctcccggatccgcagggttcccacatgtgcctggaatctattcagatgaacaagtagaagcatggaagcaagttgtggaagcagttcacgctaagggaggtttcatcttttgtcaattatggcatgttggacgtgcttctcatgcagtgtatcaacctaatggaggatcaccaatatcgtcaacgaacaaaccaatctcggaaaacaggtggcgagttttgttgcccgatggttcccacgtgaagtacccgaaacctcgggctttagaagcttccgagatacctcgggtggtggaggattattgcctttctgctttgaatgcgattcgagctggtttcgatgggattgagatccacggggcgcatggttacctcattgatcagtttttgaaagacgggatcaatgaccgtactgaccaatacggaggatccattgaaaaccgttgtagattcttgaaacaagtagtggaaggtgtagtttcagccataggagctagtaaagttggtgtgagggtatctccagctatagatcacttggacgcaactgattctaacccattatcactcgggctagccgtggttgatatgctcaataagttacaagatgttaatggcttgaagctcgcttaccttcacgttacacaacctcgctaccacgcctacgggcaaacagagtcgggaaggcaagggagtgatgaggaagaagctaagctaatgaagagcttgagaatggcttataaaggaacctttatgtccagtggaggattcaataaggaactaggcatgcaagctgttcaacaaggtgatgctgatttggtttcatatggcaggctttttatcgcaaacccggatttggtttcgcggttcaagattgatggaaagttgaataaatataatcggaagacgttttacactcaagatccagttgttggctacacggattatcctttcttggctcctttttcccgcctctgagtttgataatcggaggagaaaatgtattgatgttgtataaagacaatatattaatatgtaaaatgacaatgttattgttatccacttaatgaatagtcatgtatcttattgttt

SEQ ID NO: 25312 - protein, 412 aa, Arabidopsis thaliana
  peptide (1)..(412): Ceres Seq. ID no. 12422656
  misc_feature (32)..(384): Pfam Name: NADH:flavin oxidoreductase / NADH oxidase family Pfam Description: NADH:flavin oxidoreductase / NADH oxidase family
  misc_feature (33)..(406): Homolog of NCBI NO: 23495288 NR Description: 12-oxophytodienoic acid reductase [Oryza sativa]
  misc_feature (284)..(406): Homolog of NCBI NO: 7449902 NR Description: probable 12-oxophytodienoate reductase (EC
  misc_feature (24)..(310): Homolog of NCBI NO: 7449902 NR Description: probable 12-oxophytodienoate reductase (EC
  misc_feature (29)..(406): Homolog of NCBI NO: 5701740 NR Description: LEDI-5a protein [Lithospermum erythrorhizon]
  misc_feature (22)..(412): Homolog of NCBI NO: 12056507 NR Description: 12-oxophytodienoate reductase 3 [Lycopersicon
  misc_feature (22)..(412): Homolog of NCBI NO: 15225045 NR Description: 12-oxophytodienoate reductase (OPR3)(DDE1)
  misc_feature (22)..(412): Homolog of NCBI NO: 6707797 NR Description: 12-oxo-phytodienoate reductase [Arabidopsis
  misc_feature (22)..(412): Homolog of NCBI NO: 5059115 NR Description: OPDA-reductase homolog [Arabidopsis thaliana]
  misc_feature (22)..(412): Homolog of NCBI NO: 10242314 NR Description: 12-oxo-phytodienoate reductase [Arabidopsis
  misc_feature (22)..(412): Homolog of NCBI NO: 7688991 NR Description: 12-oxo-phytodienoate reductase [Arabidopsis
HNNNTSTRIFYFRITKPIGGDMTAAQGNSNETLFSSYKMGRFDLSHRVVLAPMTRCRALNGVPNAALAEYYAQRTTPGGFLISEGTMVSPGSAGFPHVPGIYSDEQVEAWKQVVEAVHAKGGFIFCQLWHVGRASHAVYQPNGGSPISSTNKPISENRWRVLLPDGSHVKYPKPRALEASEIPRVVEDYCLSALNAIRAGFDGIEIHGAHGYLIDQFLKDGINDRTDQYGGSIENRCRFLKQVVEGVVSAIGASKVGVRVSPAIDHLDATDSNPLSLGLAVVDMLNKLQDVNGLKLAYLHVTQPRYHAYGQTESGRQGSDEEEAKLMKSLRMAYKGTFMSSGGFNKELGMQAVQQGDADLVSYGRLFIANPDLVSRFKIDGKLNKYNRKTFYTQDPVVGYTDYPFLAPFSRL

SEQ ID NO: 25313 - protein, 391 aa, Arabidopsis thaliana
  peptide (1)..(391): Ceres Seq. ID no. 12422657
  misc_feature (11)..(363): Pfam Name: NADH:flavin oxidoreductase / NADH oxidase family Pfam Description: NADH:flavin oxidoreductase / NADH oxidase family
  misc_feature (12)..(385): Homolog of NCBI NO: 23495288 NR Description: 12-oxophytodienoic acid reductase [Oryza sativa]
  misc_feature (263)..(385): Homolog of NCBI NO: 7449902 NR Description: probable 12-oxophytodienoate reductase (EC
  misc_feature (3)..(289): Homolog of NCBI NO: 7449902 NR Description: probable 12-oxophytodienoate reductase (EC
  misc_feature (8)..(385): Homolog of NCBI NO: 5701740 NR Description: LEDI-5a protein [Lithospermum erythrorhizon]
  misc_feature (1)..(391): Homolog of NCBI NO: 12056507 NR Description: 12-oxophytodienoate reductase 3 [Lycopersicon
  misc_feature (1)..(391): Homolog of NCBI NO: 15225045 NR Description: 12-oxophytodienoate reductase (OPR3)(DDE1)
  misc_feature (1)..(391): Homolog of NCBI NO: 6707797 NR Description: 12-oxo-phytodienoate reductase [Arabidopsis
  misc_feature (1)..(391): Homolog of NCBI NO: 5059115 NR Description: OPDA-reductase homolog [Arabidopsis thaliana]
  misc_feature (1)..(391): Homolog of NCBI NO: 10242314 NR Description: 12-oxo-phytodienoate reductase [Arabidopsis
  misc_feature (1)..(391): Homolog of NCBI NO: 7688991 NR Description: 12-oxo-phytodienoate reductase [Arabidopsis
MTAAQGNSNETLFSSYKMGRFDLSHRVVLAPMTRCRALNGVPNAALAEYYAQRTTPGGFLISEGTMVSPGSAGFPHVPGIYSDEQVEAWKQVVEAVHAKGGFIFCQLWHVGRASHAVYQPNGGSPISSTNKPISENRWRVLLPDGSHVKYPKPRALEASEIPRVVEDYCLSALNAIRAGFDGIEIHGAHGYLIDQFLKDGINDRTDQYGGSIENRCRFLKQVVEGVVSAIGASKVGVRVSPAIDHLDATDSNPLSLGLAVVDMLNKLQDVNGLKLAYLHVTQPRYHAYGQTESGRQGSDEEEAKLMKSLRMAYKGTFMSSGGFNKELGMQAVQQGDADLVSYGRLFIANPDLVSRFKIDGKLNKYNRKTFYTQDPVVGYTDYPFLAPFSRL

SEQ ID NO: 25314 - protein, 374 aa, Arabidopsis thaliana
  peptide (1)..(374): Ceres Seq. ID no. 12422658
  misc_feature (1)..(346): Pfam Name: NADH:flavin oxidoreductase / NADH oxidase family Pfam Description: NADH:flavin oxidoreductase / NADH oxidase family
  misc_feature (1)..(368): Homolog of NCBI NO: 23495288 NR Description: 12-oxophytodienoic acid reductase [Oryza sativa]
  misc_feature (246)..(368): Homolog of NCBI NO: 7449902 NR Description: probable 12-oxophytodienoate reductase (EC
  misc_feature (1)..(272): Homolog of NCBI NO: 7449902 NR Description: probable 12-oxophytodienoate reductase (EC
  misc_feature (1)..(368): Homolog of NCBI NO: 5701740 NR Description: LEDI-5a protein [Lithospermum erythrorhizon]
  misc_feature (1)..(374): Homolog of NCBI NO: 12056507 NR Description: 12-oxophytodienoate reductase 3 [Lycopersicon
  misc_feature (1)..(374): Homolog of NCBI NO: 15225045 NR Description: 12-oxophytodienoate reductase (OPR3)(DDE1)
  misc_feature (1)..(374): Homolog of NCBI NO: 6707797 NR Description: 12-oxo-phytodienoate reductase [Arabidopsis
  misc_feature (1)..(374): Homolog of NCBI NO: 5059115 NR Description: OPDA-reductase homolog [Arabidopsis thaliana]
  misc_feature (1)..(374): Homolog of NCBI NO: 10242314 NR Description: 12-oxo-phytodienoate reductase [Arabidopsis
  misc_feature (1)..(374): Homolog of NCBI NO: 7688991 NR Description: 12-oxo-phytodienoate reductase [Arabidopsis
MGRFDLSHRVVLAPMTRCRALNGVPNAALAEYYAQRTTPGGFLISEGTMVSPGSAGFPHVPGIYSDEQVEAWKQVVEAVHAKGGFIFCQLWHVGRASHAVYQPNGGSPISSTNKPISENRWRVLLPDGSHVKYPKPRALEASEIPRVVEDYCLSALNAIRAGFDGIEIHGAHGYLIDQFLKDGINDRTDQYGGSIENRCRFLKQVVEGVVSAIGASKVGVRVSPAIDHLDATDSNPLSLGLAVVDMLNKLQDVNGLKLAYLHVTQPRYHAYGQTESGRQGSDEEEAKLMKSLRMAYKGTFMSSGGFNKELGMQAVQQGDADLVSYGRLFIANPDLVSRFKIDGKLNKYNRKTFYTQDPVVGYTDYPFLAPFSRL

SEQ ID NO: 25315 - DNA, 927 bp, Arabidopsis thaliana
  misc_feature (1)..(927): Ceres Seq. ID no. 13490882
  misc_feature: MA Experiment ID: 108434 Result: Up-regulated in Transcription
  misc_feature: MA Experiment 108434 PARAMETER Experiment Name: At_Root_Tips_cDNA_P Parameter: Tissue Value: Root Tips
  misc_feature: MA Experiment ID: 108461 Result: Up-regulated in Transcription
  misc_feature: MA Experiment 108461 PARAMETER Experiment Name: At_Germinating_Seeds_cDNA_P Parameter: Age (day) Value: 1 vs. 0
  misc_feature: MA Experiment 108461 PARAMETER Experiment Name: At_Germinating_Seeds_cDNA_P Parameter: Tissue Value: Germinating Seeds
  misc_feature: MA Experiment ID: 108463 Result: Down-regulated in Transcription
  misc_feature: MA Experiment 108463 PARAMETER Experiment Name: At_Germinating_Seeds_cDNA_P Parameter: Age (day) Value: 3 vs. 0
  misc_feature: MA Experiment 108463 PARAMETER Experiment Name: At_Germinating_Seeds_cDNA_P Parameter: Tissue Value: Germinating Seeds
  misc_feature: MA Experiment ID: 108464 Result: Down-regulated in Transcription
  misc_feature: MA Experiment 108464 PARAMETER Experiment Name: At_Germinating_Seeds_cDNA_P Parameter: Age (day) Value: 4 vs. 0
  misc_feature: MA Experiment 108464 PARAMETER Experiment Name: At_Germinating_Seeds_cDNA_P Parameter: Tissue Value: Germinating Seeds
  misc_feature: MA Experiment ID: 108595 Result: Down-regulated in Transcription
  misc_feature: MA Experiment 108595 PARAMETER Experiment Name: At_Ler-pi_Ovule_cDNA_P Parameter: Plant Line Value: null
  misc_feature: MA Experiment ID: 20000069 Result: Down-regulated in Transcription
  misc_feature: MA Experiment 20000069 PARAMETER Experiment Name: At_100uM_ABA_Mutants_cDNA_P Parameter: Plant Line Value: CS23
  misc_feature: MA Experiment 20000069 PARAMETER Experiment Name: At_100uM_ABA_Mutants_cDNA_P Parameter: Timepoint (hr) Value: 6
  misc_feature: MA Experiment 20000069 PARAMETER Experiment Name: At_100uM_ABA_Mutants_cDNA_P Parameter: Tissue Value: Aerial
  misc_feature: MA Experiment 20000069 PARAMETER Experiment Name: At_100uM_ABA_Mutants_cDNA_P Parameter: Treatment Value: 100uM ABA vs. No Treatment
  misc_feature: MA Experiment ID: 20000070 Result: Down-regulated in Transcription
  misc_feature: MA Experiment 20000070 PARAMETER Experiment Name: At_100uM_ABA_Mutants_cDNA_P Parameter: Plant Line Value: CS24
  misc_feature: MA Experiment 20000070 PARAMETER Experiment Name: At_100uM_ABA_Mutants_cDNA_P Parameter: Timepoint (hr) Value: 6
  misc_feature: MA Experiment 20000070 PARAMETER Experiment Name: At_100uM_ABA_Mutants_cDNA_P Parameter: Tissue Value: Aerial
  misc_feature: MA Experiment 20000070 PARAMETER Experiment Name: At_100uM_ABA_Mutants_cDNA_P Parameter: Treatment Value: 100uM ABA vs. No Treatment
  misc_feature: MA Experiment ID: 20000071 Result: Down-regulated in Transcription
  misc_feature: MA Experiment 20000071 PARAMETER Experiment Name: At_100uM_ABA_Mutants_cDNA_P Parameter: Plant Line Value: CS8104
  misc_feature: MA Experiment 20000071 PARAMETER Experiment Name: At_100uM_ABA_Mutants_cDNA_P Parameter: Timepoint (hr) Value: 6
  misc_feature: MA Experiment 20000071 PARAMETER Experiment Name: At_100uM_ABA_Mutants_cDNA_P Parameter: Tissue Value: Aerial
  misc_feature: MA Experiment 20000071 PARAMETER Experiment Name: At_100uM_ABA_Mutants_cDNA_P Parameter: Treatment Value: 100uM ABA vs. No Treatment
  misc_feature: MA Experiment ID: 20000072 Result: Down-regulated in Transcription
  misc_feature: MA Experiment 20000072 PARAMETER Experiment Name: At_100uM_ABA_Mutants_cDNA_P Parameter: Plant Line Value: CS8105
  misc_feature: MA Experiment 20000072 PARAMETER Experiment Name: At_100uM_ABA_Mutants_cDNA_P Parameter: Timepoint (hr) Value: 6
  misc_feature: MA Experiment 20000072 PARAMETER Experiment Name: At_100uM_ABA_Mutants_cDNA_P Parameter: Tissue Value: Aerial
  misc_feature: MA Experiment 20000072 PARAMETER Experiment Name: At_100uM_ABA_Mutants_cDNA_P Parameter: Treatment Value: 100uM ABA vs. No Treatment
  misc_feature: MA Experiment ID: 20000087 Result: Down-regulated in Transcription
  misc_feature: MA Experiment 20000087 PARAMETER Experiment Name: At_100uM_ABA_Mutants_cDNA_P Parameter: Plant Line Value: WS
  misc_feature: MA Experiment 20000087 PARAMETER Experiment Name: At_100uM_ABA_Mutants_cDNA_P Parameter: Timepoint (hr) Value: 6
  misc_feature: MA Experiment 20000087 PARAMETER Experiment Name: At_100uM_ABA_Mutants_cDNA_P Parameter: Tissue Value: Aerial
  misc_feature: MA Experiment 20000087 PARAMETER Experiment Name: At_100uM_ABA_Mutants_cDNA_P Parameter: Treatment Value: 100uM ABA vs. No Treatment
  misc_feature: MA Experiment ID: 20000117 Result: Down-regulated in Transcription
  misc_feature: MA Experiment 20000117 PARAMETER Experiment Name: At_100uM_ABA_Mutants_cDNA_P Parameter: Plant Line Value: Columbia
  misc_feature: MA Experiment 20000117 PARAMETER Experiment Name: At_100uM_ABA_Mutants_cDNA_P Parameter: Timepoint (hr) Value: 6
  misc_feature: MA Experiment 20000117 PARAMETER Experiment Name: At_100uM_ABA_Mutants_cDNA_P Parameter: Tissue Value: Aerial
  misc_feature: MA Experiment 20000117 PARAMETER Experiment Name: At_100uM_ABA_Mutants_cDNA_P Parameter: Treatment Value: 100uM ABA vs. No Treatment
  misc_feature: MA Experiment ID: 20000179 Result: Up-regulated in Transcription
  misc_feature: MA Experiment 20000179 PARAMETER Experiment Name: At_Germinating_Seeds_P Parameter: Age (hr) Value: 6 vs. 0
  misc_feature: MA Experiment 20000179 PARAMETER Experiment Name: At_Germinating_Seeds_P Parameter: Tissue Value: Germinating Seeds
  misc_feature: MA Experiment ID: 20000180 Result: Up-regulated in Transcription
  misc_feature: MA Experiment 20000180 PARAMETER Experiment Name: At_Germinating_Seeds_P Parameter: Age (hr) Value: 24 vs. 0
  misc_feature: MA Experiment 20000180 PARAMETER Experiment Name: At_Germinating_Seeds_P Parameter: Tissue Value: Germinating Seeds
  misc_feature: MA Experiment ID: 20000184 Result: Up-regulated in Transcription
  misc_feature: MA Experiment 20000184 PARAMETER Experiment Name: At_Shoots__P Parameter: Age (day) Value: 7
  misc_feature: MA Experiment 20000184 PARAMETER Experiment Name: At_Shoots__P Parameter: Tissue Value: Shoots vs. Whole Plant
  misc_feature: MA Experiment ID: 20000185 Result: Down-regulated in Transcription
  misc_feature: MA Experiment 20000185 PARAMETER Experiment Name: At_Roots__P Parameter: Age (day) Value: 7 vs. 21
  misc_feature: MA Experiment 20000185 PARAMETER Experiment Name: At_Roots__P Parameter: Organism Value: A. thaliana
  misc_feature: MA Experiment 20000185 PARAMETER Experiment Name: At_Roots__P Parameter: Tissue Value: Roots vs. Whole Plant
  misc_feature: MA Experiment ID: 20000234 Result: Up-regulated in Transcription
  misc_feature: MA Experiment 20000234 PARAMETER Experiment Name: At_Siliques_P Parameter: Age (day) Value: 21
  misc_feature: MA Experiment 20000234 PARAMETER Experiment Name: At_Siliques_P Parameter: Organism Value: A. thaliana
  misc_feature: MA Experiment 20000234 PARAMETER Experiment Name: At_Siliques_P Parameter: Plant Line Value: WS
  misc_feature: MA Experiment 20000234 PARAMETER Experiment Name: At_Siliques_P Parameter: Tissue Value: Less Than 5mm Siliques vs. Whole Plant
  misc_feature: MA Experiment ID: 20000235 Result: Up-regulated in Transcription
  misc_feature: MA Experiment 20000235 PARAMETER Experiment Name: At_Siliques_P Parameter: Age (day) Value: 21
  misc_feature: MA Experiment 20000235 PARAMETER Experiment Name: At_Siliques_P Parameter: Organism Value: A. thaliana
  misc_feature: MA Experiment 20000235 PARAMETER Experiment Name: At_Siliques_P Parameter: Plant Line Value: WS
  misc_feature: MA Experiment 20000235 PARAMETER Experiment Name: At_Siliques_P Parameter: Tissue Value: 5-10mm Siliques vs. Whole Plant
  misc_feature: MA Experiment ID: 20000437 Result: Down-regulated in Transcription
  misc_feature: MA Experiment 20000437 PARAMETER Experiment Name: At_Drought_P Parameter: Age (day) Value: 8
  misc_feature: MA Experiment 20000437 PARAMETER Experiment Name: At_Drought_P Parameter: Organism Value: A. thaliana
  misc_feature: MA Experiment 20000437 PARAMETER Experiment Name: At_Drought_P Parameter: Plant Line Value: WS
  misc_feature: MA Experiment 20000437 PARAMETER Experiment Name: At_Drought_P Parameter: Timepoint (hr) Value: 24
  misc_feature: MA Experiment 20000437 PARAMETER Experiment Name: At_Drought_P Parameter: Tissue Value: Whole Plant
  misc_feature: MA Experiment 20000437 PARAMETER Experiment Name: At_Drought_P Parameter: Treatment Value: Drought vs. No Drought
  misc_feature: MA Experiment ID: 20000439 Result: Down-regulated in Transcription
  misc_feature: MA Experiment 20000439 PARAMETER Experiment Name: At_Roots__P Parameter: Age (day) Value: 14 vs. 21
  misc_feature: MA Experiment 20000439 PARAMETER Experiment Name: At_Roots__P Parameter: Organism Value: A. thaliana
  misc_feature: MA Experiment 20000439 PARAMETER Experiment Name: At_Roots__P Parameter: Tissue Value: Roots vs. Whole Plant
  misc_feature: MA Experiment ID: 20000527 Result: Up-regulated in Transcription
  misc_feature: MA Experiment 20000527 PARAMETER Experiment Name: At_10percent_PEG_P Parameter: Age (day) Value: 20
  misc_feature: MA Experiment 20000527 PARAMETER Experiment Name: At_10percent_PEG_P Parameter: Organism Value: A. thaliana
  misc_feature: MA Experiment 20000527 PARAMETER Experiment Name: At_10percent_PEG_P Parameter: Plant Line Value: WS
  misc_feature: MA Experiment 20000527 PARAMETER Experiment Name: At_10percent_PEG_P Parameter: Timepoint (day) Value: 20
  misc_feature: MA Experiment 20000527 PARAMETER Experiment Name: At_10percent_PEG_P Parameter: Tissue Value: Whole Plant
  misc_feature: MA Experiment 20000527 PARAMETER Experiment Name: At_10percent_PEG_P Parameter: Treatment Value: 10percent PEG vs. No Treatment
  misc_feature: MA Experiment ID: 20000794 Result: Down-regulated in Transcription
  misc_feature: MA Experiment 20000794 PARAMETER Experiment Name: At_Petals_P Parameter: Age (day) Value: 23-25 days
  misc_feature: MA Experiment 20000794 PARAMETER Experiment Name: At_Petals_P Parameter: Plant Line Value: WS
  misc_feature: MA Experiment 20000794 PARAMETER Experiment Name: At_Petals_P Parameter: Tissue Value: Petals vs. Whole plant
  misc_feature: MA Experiment ID: 20001248 Result: Down-regulated in Transcription
  misc_feature: MA Experiment 20001248 PARAMETER Experiment Name: At_Far-red-induction_P Parameter: Age (day) Value: 7
  misc_feature: MA Experiment 20001248 PARAMETER Experiment Name: At_Far-red-induction_P Parameter: Light Value: Far-red vs. White
  misc_feature: MA Experiment 20001248 PARAMETER Experiment Name: At_Far-red-induction_P Parameter: Organism Value: A. thaliana
  misc_feature: MA Experiment 20001248 PARAMETER Experiment Name: At_Far-red-induction_P Parameter: Plant Line Value: Columbia
  misc_feature: MA Experiment 20001248 PARAMETER Experiment Name: At_Far-red-induction_P Parameter: Timepoint (hr) Value: 4
  misc_feature: MA Experiment 20001248 PARAMETER Experiment Name: At_Far-red-induction_P Parameter: Tissue Value: Whole Plant
  misc_feature: MA Experiment ID: 20001450 Result: Down-regulated in Transcription
  misc_feature: MA Experiment 20001450 PARAMETER Experiment Name: At_Far-red-induction_P Parameter: Age (day) Value: 7
  misc_feature: MA Experiment 20001450 PARAMETER Experiment Name: At_Far-red-induction_P Parameter: Light Value: Far-red vs. White
  misc_feature: MA Experiment 20001450 PARAMETER Experiment Name: At_Far-red-induction_P Parameter: Organism Value: A. thaliana
  misc_feature: MA Experiment 20001450 PARAMETER Experiment Name: At_Far-red-induction_P Parameter: Plant Line Value: Columbia
  misc_feature: MA Experiment 20001450 PARAMETER Experiment Name: At_Far-red-induction_P Parameter: Timepoint (hr) Value: 8
  misc_feature: MA Experiment 20001450 PARAMETER Experiment Name: At_Far-red-induction_P Parameter: Tissue Value: Whole Plant
  misc_feature: MA Experiment ID: 20001451 Result: Down-regulated in Transcription
  misc_feature: MA Experiment 20001451 PARAMETER Experiment Name: At_Far-red-induction_P Parameter: Age (day) Value: 7
  misc_feature: MA Experiment 20001451 PARAMETER Experiment Name: At_Far-red-induction_P Parameter: Light Value: Far-red vs. White
  misc_feature: MA Experiment 20001451 PARAMETER Experiment Name: At_Far-red-induction_P Parameter: Organism Value: A. thaliana
  misc_feature: MA Experiment 20001451 PARAMETER Experiment Name: At_Far-red-induction_P Parameter: Plant Line Value: Columbia
  misc_feature: MA Experiment 20001451 PARAMETER Experiment Name: At_Far-red-induction_P Parameter: Timepoint (hr) Value: 24
  misc_feature: MA Experiment 20001451 PARAMETER Experiment Name: At_Far-red-induction_P Parameter: Tissue Value: Whole Plant
  misc_feature: MA Experiment ID: 20001558 Result: Up-regulated in Transcription
  misc_feature: MA Experiment 20001558 PARAMETER Experiment Name: At_Drought_Soil_Dry_P Parameter: Age (day) Value: 27
  misc_feature: MA Experiment 20001558 PARAMETER Experiment Name: At_Drought_Soil_Dry_P Parameter: Organism Value: A. thaliana
  misc_feature: MA Experiment 20001558 PARAMETER Experiment Name: At_Drought_Soil_Dry_P Parameter: Plant Line Value: WS
  misc_feature: MA Experiment 20001558 PARAMETER Experiment Name: At_Drought_Soil_Dry_P Parameter: Post Timepoint (hr) Value: 6
  misc_feature: MA Experiment 20001558 PARAMETER Experiment Name: At_Drought_Soil_Dry_P Parameter: Post-Treatment Value: Re-Water vs. No Drought
  misc_feature: MA Experiment 20001558 PARAMETER Experiment Name: At_Drought_Soil_Dry_P Parameter: Timepoint (day) Value: 13
  misc_feature: MA Experiment 20001558 PARAMETER Experiment Name: At_Drought_Soil_Dry_P Parameter: Treatment Value: Drought vs. No Drought
  misc_feature: MA Experiment ID: 20001560 Result: Up-regulated in Transcription
  misc_feature: MA Experiment 20001560 PARAMETER Experiment Name: At_Drought_Soil_Dry_P Parameter: Age (day) Value: 28
  misc_feature: MA Experiment 20001560 PARAMETER Experiment Name: At_Drought_Soil_Dry_P Parameter: Organism Value: A. thaliana
  misc_feature: MA Experiment 20001560 PARAMETER Experiment Name: At_Drought_Soil_Dry_P Parameter: Plant Line Value: WS
  misc_feature: MA Experiment 20001560 PARAMETER Experiment Name: At_Drought_Soil_Dry_P Parameter: Post Timepoint (hr) Value: None
  misc_feature: MA Experiment 20001560 PARAMETER Experiment Name: At_Drought_Soil_Dry_P Parameter: Post-Treatment Value: None
  misc_feature: MA Experiment 20001560 PARAMETER Experiment Name: At_Drought_Soil_Dry_P Parameter: Timepoint (day) Value: 14
  misc_feature: MA Experiment 20001560 PARAMETER Experiment Name: At_Drought_Soil_Dry_P Parameter: Treatment Value: Drought vs. No Drought
  misc_feature: MA Experiment ID: 20001757 Result: Up-regulated in Transcription
  misc_feature: MA Experiment 20001757 PARAMETER Experiment Name: At_50mM_NH4NO3_L-to-H_P Parameter: Timepoint (hr) Value: 6
  misc_feature: MA Experiment 20001757 PARAMETER Experiment Name: At_50mM_NH4NO3_L-to-H_P Parameter: Tissue Value: Leaf
  misc_feature: MA Experiment 20001757 PARAMETER Experiment Name: At_50mM_NH4NO3_L-to-H_P Parameter: Treatment Value: 50mM NH4NO3 vs 100mM Mannitol
  misc_feature: MA Experiment ID: 20001906 Result: Down-regulated in Transcription
  misc_feature: MA Experiment 20001906 PARAMETER Experiment Name: At_Drought_Reproduction_P Parameter: Age (day) Value: 35
  misc_feature: MA Experiment 20001906 PARAMETER Experiment Name: At_Drought_Reproduction_P Parameter: Organism Value: A. thaliana
  misc_feature: MA Experiment 20001906 PARAMETER Experiment Name: At_Drought_Reproduction_P Parameter: Plant Line Value: WS
  misc_feature: MA Experiment 20001906 PARAMETER Experiment Name: At_Drought_Reproduction_P Parameter: Timepoint (day) Value: 5
  misc_feature: MA Experiment 20001906 PARAMETER Experiment Name: At_Drought_Reproduction_P Parameter: Tissue Value: Siliques
  misc_feature: MA Experiment 20001906 PARAMETER Experiment Name: At_Drought_Reproduction_P Parameter: Treatment Value: Drought vs. No Drought
tgaagacaaagcgcagaaaatggtgggagcgactgtagttagtaaatggactcccctatgtgtggcttcgccgccggagagaaactcggcaagtctcaatccacactgttctccagccagggttaattttagaacagcgttggccgcatttcgtcctcagttccgtcttttctctcgcaattccgcgtctcgccgccgtcttcgcgcttccagctccgccgaatcgggaatcttccttcctcaccttgtagcttctatggaggacgttgaggagacttacattatggtgaaacctgatggcatacaacgaggccttgtaggagaaatcatttctcgctttgagaaaaaggggtttaaacttattgggctcaagatgtttcagtgcccaaaagaattggctgaggagcattataaggatcttagtgctaaatcattctttcctaacctgattgagtacatcacttcaggtccagttgtgtgtatggcttgggaaggtgttggtgttgttgcttcagccaggaagctaatagggaaaacagatccgcttcaagctgaacctggtactataagaggagatcttgctgtgcaaaccggaaggaacattgtgcatggtagtgacagccctgaaaacggcaagcgtgagattggtctgtggttcaaagagggcgagctatgcaagtgggattcggctctagctacatggctaagggagtgatccttgagaagacagagtcaattataatggtgtccttacttgttttcttgttaccgatgatgagctttggtgttttgttcctgattttgggcggcaatataatataactgccaatctatggcttgattcttctcatatctgtgatcacttgtcatgtaatcaaaactagttacagattcatctgcatttggttctacgttacagacacctcc

SEQ ID NO: 25316 - protein, 237 aa, Arabidopsis thaliana
  peptide (1)..(237): Ceres Seq. ID no. 13490883
  misc_feature (90)..(227): Pfam Name: Nucleoside diphosphate kinase Pfam Description: Nucleoside diphosphate kinase
  misc_feature (90)..(237): Homolog of NCBI NO: 9652119 NR Description: nucleoside diphosphate kinase [Lolium perenne]
  misc_feature (89)..(237): Homolog of NCBI NO: 20138835 NR Description: Nucleoside diphosphate kinase (NDK) (NDP kinase)
  misc_feature (89)..(237): Homolog of NCBI NO: 22297811 NR Description: nucleoside diphosphate kinase
  misc_feature (47)..(237): Homolog of NCBI NO: 1346673 NR Description: Nucleoside diphosphate kinase II, chloroplast
  misc_feature (21)..(237): Homolog of NCBI NO: 27807824 NR Description: nucleoside diphosphate kinase [Nicotiana tabacum]
  misc_feature (20)..(237): Homolog of NCBI NO: 266607 NR Description: Nucleoside diphosphate kinase II, chloroplast
  misc_feature (86)..(237): Homolog of NCBI NO: 11260887 NR Description: nucleoside-diphosphate kinase (EC 2.7.4.6) Ia
  misc_feature (7)..(237): Homolog of NCBI NO: 21832064 NR Description: nucloside diphosphate kinase 2 [Brassica rapa]
  misc_feature (7)..(237): Homolog of NCBI NO: 3093480 NR Description: nucleoside diphosphate kinase type 2 [Arabidopsis
  misc_feature (7)..(237): Homolog of NCBI NO: 30697820 NR Description: nucleotide diphosphate kinase Ia (emb|CAB58230.1)
EDKAQKMVGATVVSKWTPLCVASPPERNSASLNPHCSPARVNFRTALAAFRPQFRLFSRNSASRRRLRASSSAESGIFLPHLVASMEDVEETYIMVKPDGIQRGLVGEIISRFEKKGFKLIGLKMFQCPKELAEEHYKDLSAKSFFPNLIEYITSGPVVCMAWEGVGVVASARKLIGKTDPLQAEPGTIRGDLAVQTGRNIVHGSDSPENGKREIGLWFKEGELCKWDSALATWLRE

SEQ ID NO: 25317 - protein, 231 aa, Arabidopsis thaliana
  peptide (1)..(231): Ceres Seq. ID no. 13490884
  misc_feature (84)..(221): Pfam Name: Nucleoside diphosphate kinase Pfam Description: Nucleoside diphosphate kinase
  misc_feature (83)..(231): Homolog of NCBI NO: 22297811 NR Description: nucleoside diphosphate kinase
  misc_feature (41)..(231): Homolog of NCBI NO: 1346673 NR Description: Nucleoside diphosphate kinase II, chloroplast
  misc_feature (15)..(231): Homolog of NCBI NO: 27807824 NR Description: nucleoside diphosphate kinase [Nicotiana tabacum]
  misc_feature (14)..(231): Homolog of NCBI NO: 266607 NR Description: Nucleoside diphosphate kinase II, chloroplast
  misc_feature (84)..(231): Homolog of NCBI NO: 9652119 NR Description: nucleoside diphosphate kinase [Lolium perenne]
  misc_feature (83)..(231): Homolog of NCBI NO: 20138835 NR Description: Nucleoside diphosphate kinase (NDK) (NDP kinase)
  misc_feature (80)..(231): Homolog of NCBI NO: 11260887 NR Description: nucleoside-diphosphate kinase (EC 2.7.4.6) Ia
  misc_feature (1)..(231): Homolog of NCBI NO: 21832064 NR Description: nucloside diphosphate kinase 2 [Brassica rapa]
  misc_feature (1)..(231): Homolog of NCBI NO: 3093480 NR Description: nucleoside diphosphate kinase type 2 [Arabidopsis
  misc_feature (1)..(231): Homolog of NCBI NO: 30697820 NR Description: nucleotide diphosphate kinase Ia (emb|CAB58230.1)
MVGATVVSKWTPLCVASPPERNSASLNPHCSPARVNFRTALAAFRPQFRLFSRNSASRRRLRASSSAESGIFLPHLVASMEDVEETYIMVKPDGIQRGLVGEIISRFEKKGFKLIGLKMFQCPKELAEEHYKDLSAKSFFPNLIEYITSGPVVCMAWEGVGVVASARKLIGKTDPLQAEPGTIRGDLAVQTGRNIVHGSDSPENGKREIGLWFKEGELCKWDSALATWLRE

SEQ ID NO: 25318 - protein, 152 aa, Arabidopsis thaliana
  peptide (1)..(152): Ceres Seq. ID no. 13490885
  misc_feature (5)..(142): Pfam Name: Nucleoside diphosphate kinase Pfam Description: Nucleoside diphosphate kinase
  misc_feature (5)..(152): Homolog of NCBI NO: 9652119 NR Description: nucleoside diphosphate kinase [Lolium perenne]
  misc_feature (4)..(152): Homolog of NCBI NO: 20138835 NR Description: Nucleoside diphosphate kinase (NDK) (NDP kinase)
  misc_feature (4)..(152): Homolog of NCBI NO: 22297811 NR Description: nucleoside diphosphate kinase
  misc_feature (1)..(152): Homolog of NCBI NO: 1346673 NR Description: Nucleoside diphosphate kinase II, chloroplast
  misc_feature (1)..(152): Homolog of NCBI NO: 27807824 NR Description: nucleoside diphosphate kinase [Nicotiana tabacum]
  misc_feature (1)..(152): Homolog of NCBI NO: 266607 NR Description: Nucleoside diphosphate kinase II, chloroplast
  misc_feature (1)..(152): Homolog of NCBI NO: 11260887 NR Description: nucleoside-diphosphate kinase (EC 2.7.4.6) Ia
  misc_feature (1)..(152): Homolog of NCBI NO: 21832064 NR Description: nucloside diphosphate kinase 2 [Brassica rapa]
  misc_feature (1)..(152): Homolog of NCBI NO: 3093480 NR Description: nucleoside diphosphate kinase type 2 [Arabidopsis
  misc_feature (1)..(152): Homolog of NCBI NO: 30697820 NR Description: nucleotide diphosphate kinase Ia (emb|CAB58230.1)
MEDVEETYIMVKPDGIQRGLVGEIISRFEKKGFKLIGLKMFQCPKELAEEHYKDLSAKSFFPNLIEYITSGPVVCMAWEGVGVVASARKLIGKTDPLQAEPGTIRGDLAVQTGRNIVHGSDSPENGKREIGLWFKEGELCKWDSALATWLRE

SEQ ID NO: 25319 - DNA, 1165 bp, Arabidopsis thaliana
  misc_feature (1)..(1165): Ceres Seq. ID no. 12321592
  misc_feature: MA Experiment ID: 108461 Result: Up-regulated in Transcription
  misc_feature: MA Experiment 108461 PARAMETER Experiment Name: At_Germinating_Seeds_cDNA_P Parameter: Age (day) Value: 1 vs. 0
  misc_feature: MA Experiment 108461 PARAMETER Experiment Name: At_Germinating_Seeds_cDNA_P Parameter: Tissue Value: Germinating Seeds
  misc_feature: MA Experiment ID: 108463 Result: Up-regulated in Transcription
  misc_feature: MA Experiment 108463 PARAMETER Experiment Name: At_Germinating_Seeds_cDNA_P Parameter: Age (day) Value: 3 vs. 0
  misc_feature: MA Experiment 108463 PARAMETER Experiment Name: At_Germinating_Seeds_cDNA_P Parameter: Tissue Value: Germinating Seeds
  misc_feature: MA Experiment ID: 108464 Result: Up-regulated in Transcription
  misc_feature: MA Experiment 108464 PARAMETER Experiment Name: At_Germinating_Seeds_cDNA_P Parameter: Age (day) Value: 4 vs. 0
  misc_feature: MA Experiment 108464 PARAMETER Experiment Name: At_Germinating_Seeds_cDNA_P Parameter: Tissue Value: Germinating Seeds
  misc_feature: MA Experiment ID: 108488 Result: Down-regulated in Transcription
  misc_feature: MA Experiment ID: 108607 Result: Up-regulated in Transcription
  misc_feature: MA Experiment 108607 PARAMETER Experiment Name: At_100uM_ABA_cDNA_P Parameter: Timepoint (hr) Value: 4
  misc_feature: MA Experiment 108607 PARAMETER Experiment Name: At_100uM_ABA_cDNA_P Parameter: Tissue Value: Aerial
  misc_feature: MA Experiment 108607 PARAMETER Experiment Name: At_100uM_ABA_cDNA_P Parameter: Treatment Value: 100uM ABA vs. No Treatment
  misc_feature: MA Experiment ID: 108668 Result: Up-regulated in Transcription
  misc_feature: MA Experiment 108668 PARAMETER Experiment Name: At_2mM_SA_cDNA_P Parameter: Plant Line Value: WS
  misc_feature: MA Experiment 108668 PARAMETER Experiment Name: At_2mM_SA_cDNA_P Parameter: Timepoint (hr) Value: 6
  misc_feature: MA Experiment 108668 PARAMETER Experiment Name: At_2mM_SA_cDNA_P Parameter: Treatment Value: 2mM SA vs. No Treatment
  misc_feature: MA Experiment ID: 20000089 Result: Down-regulated in Transcription
  misc_feature: MA Experiment ID: 20000182 Result: Up-regulated in Transcription
  misc_feature: MA Experiment 20000182 PARAMETER Experiment Name: At_2mM_SA_P Parameter: Age (day) Value: 14
  misc_feature: MA Experiment 20000182 PARAMETER Experiment Name: At_2mM_SA_P Parameter: Organism Value: A. thaliana
  misc_feature: MA Experiment 20000182 PARAMETER Experiment Name: At_2mM_SA_P Parameter: Plant Line Value: WS
  misc_feature: MA Experiment 20000182 PARAMETER Experiment Name: At_2mM_SA_P Parameter: Timepoint (hr) Value: 6
  misc_feature: MA Experiment 20000182 PARAMETER Experiment Name: At_2mM_SA_P Parameter: Tissue Value: Aerial
  misc_feature: MA Experiment 20000182 PARAMETER Experiment Name: At_2mM_SA_P Parameter: Treatment Value: 2mM SA vs. No Treatment
  misc_feature: MA Experiment ID: 20000437 Result: Up-regulated in Transcription
  misc_feature: MA Experiment 20000437 PARAMETER Experiment Name: At_Drought_P Parameter: Age (day) Value: 8
  misc_feature: MA Experiment 20000437 PARAMETER Experiment Name: At_Drought_P Parameter: Organism Value: A. thaliana
  misc_feature: MA Experiment 20000437 PARAMETER Experiment Name: At_Drought_P Parameter: Plant Line Value: WS
  misc_feature: MA Experiment 20000437 PARAMETER Experiment Name: At_Drought_P Parameter: Timepoint (hr) Value: 24
  misc_feature: MA Experiment 20000437 PARAMETER Experiment Name: At_Drought_P Parameter: Tissue Value: Whole Plant
  misc_feature: MA Experiment 20000437 PARAMETER Experiment Name: At_Drought_P Parameter: Treatment Value: Drought vs. No Drought
  misc_feature: MA Experiment ID: 20001248 Result: Down-regulated in Transcription
  misc_feature: MA Experiment 20001248 PARAMETER Experiment Name: At_Far-red-induction_P Parameter: Age (day) Value: 7
  misc_feature: MA Experiment 20001248 PARAMETER Experiment Name: At_Far-red-induction_P Parameter: Light Value: Far-red vs. White
  misc_feature: MA Experiment 20001248 PARAMETER Experiment Name: At_Far-red-induction_P Parameter: Organism Value: A. thaliana
  misc_feature: MA Experiment 20001248 PARAMETER Experiment Name: At_Far-red-induction_P Parameter: Plant Line Value: Columbia
  misc_feature: MA Experiment 20001248 PARAMETER Experiment Name: At_Far-red-induction_P Parameter: Timepoint (hr) Value: 4
  misc_feature: MA Experiment 20001248 PARAMETER Experiment Name: At_Far-red-induction_P Parameter: Tissue Value: Whole Plant
  misc_feature: MA Experiment ID: 20001905 Result: Up-regulated in Transcription
  misc_feature: MA Experiment 20001905 PARAMETER Experiment Name: At_Drought_Reproduction_P Parameter: Age (day) Value: 40
  misc_feature: MA Experiment 20001905 PARAMETER Experiment Name: At_Drought_Reproduction_P Parameter: Organism Value: A. thaliana
  misc_feature: MA Experiment 20001905 PARAMETER Experiment Name: At_Drought_Reproduction_P Parameter: Plant Line Value: WS
  misc_feature: MA Experiment 20001905 PARAMETER Experiment Name: At_Drought_Reproduction_P Parameter: Timepoint (day) Value: 10
  misc_feature: MA Experiment 20001905 PARAMETER Experiment Name: At_Drought_Reproduction_P Parameter: Tissue Value: Rosettes
  misc_feature: MA Experiment 20001905 PARAMETER Experiment Name: At_Drought_Reproduction_P Parameter: Treatment Value: Drought vs. No Drought
gtttttgtcctcttaacaaaatattcttcaaactctctctgttgtttgtttgttgacaaatctctcaaaaccatttgttttgcaatcgcagatccgtttttcttcgggtctcatcacaatgaatggcttctctgatcttaatccttctgagagcaaaccttctctgtcacaactagctccattagaagccattctgtttgatgttgatggaacactctgtgactcagatcccatccaccttattgccttccaagaactgcttcaagagattggttttaacaatggtgtcccaatcgatgagaaattctttgttgagaacattgctggaaaacacaattctgaaattgctctacttctgttccctgatgatgtttcaagagggttaaaattctgtgatgaaaaggaagctctttaccgcaaaattgttgcagagaagataaagccacttgatgggcttataaaactgaccaaatggatcgaagatcgtggattgaaacgagctgcggtaacaaacgctccaaaagaaaacgcagagctcatgatatcgaaacttggtctgactgatttctttcaagcagtgattcttggctctgaatgtgaatttcccaaaccacaccctggaccttacttgaaggctcttgaagtgcttaacgtgtcaaaggagcacacgctagttttcgaagactcgatctctgggataaaagctggagttgcagctggaatgccagtgattggactgactacagggaatccagcaagcctgcttatgcaagcaaaacccgcttttctcatcgagaactatgcggatccaaaactgtgggctgtgttggaagaacttgataacaagtcttaagtctcacttgtttggcttatggaaacccacacatgcatgagcagcctctgaagtttaccttatgtcttagatgatcattgttgaataattcattgggagtttatgacaatgggagctttcaaatatctgattattttgtattgatacatgcacaatgctagatttgtatccaggagatagttgcataaaccaatatactataccctcggatcttagcttattttcattgatatcttgttgttttgtgctgtaaacatatcagcttttgaatacatttggtccatggcgcaaaataagacttttttttttttt

SEQ ID NO: 25320 - protein, 244 aa, Arabidopsis thaliana
  peptide (1)..(244): Ceres Seq. ID no. 12321593
  misc_feature (22)..(210): Pfam Name: haloacid dehalogenase-like hydrolase Pfam Description: haloacid dehalogenase-like hydrolase
  misc_feature (24)..(237): Homolog of NCBI NO: 27377543 NR Description: blr2432 [Bradyrhizobium japonicum]
  misc_feature (22)..(233): Homolog of NCBI NO: 23042473 NR Description: hypothetical protein [Trichodesmium erythraeum
  misc_feature (22)..(237): Homolog of NCBI NO: 37521914 NR Description: hypothetical protein glr2345 [Gloeobacter
  misc_feature (22)..(240): Homolog of NCBI NO: 17228223 NR Description: hypothetical protein [Nostoc sp. PCC 7120]
  misc_feature (22)..(240): Homolog of NCBI NO: 23127812 NR Description: hypothetical protein [Nostoc punctiforme]
  misc_feature (85)..(241): Homolog of NCBI NO: 37700485 NR Description: putative beta-phosphoglucomutase [Oryza sativa]
  misc_feature (15)..(240): Homolog of NCBI NO: 34897820 NR Description: P0514G12.30 [Oryza sativa (japonica
  misc_feature (12)..(241): Homolog of NCBI NO: 37536998 NR Description: putative beta-phosphoglucomutase
  misc_feature (39)..(244): Homolog of NCBI NO: 25408616 NR Description: hypothetical protein At2g38740 [imported] -
  misc_feature (1)..(244): Homolog of NCBI NO: 18404847 NR Description: expressed protein
MNGFSDLNPSESKPSLSQLAPLEAILFDVDGTLCDSDPIHLIAFQELLQEIGFNNGVPIDEKFFVENIAGKHNSEIALLLFPDDVSRGLKFCDEKEALYRKIVAEKIKPLDGLIKLTKWIEDRGLKRAAVTNAPKENAELMISKLGLTDFFQAVILGSECEFPKPHPGPYLKALEVLNVSKEHTLVFEDSISGIKAGVAAGMPVIGLTTGNPASLLMQAKPAFLIENYADPKLWAVLEELDNKS

SEQ ID NO: 25321 - DNA, 1129 bp, Arabidopsis thaliana
  misc_feature (1)..(1129): Ceres Seq. ID no. 12329373
  misc_feature: MA Experiment ID: 108488 Result: Down-regulated in Transcription
  misc_feature: MA Experiment ID: 108489 Result: Up-regulated in Transcription
  misc_feature: MA Experiment ID: 20000072 Result: Up-regulated in Transcription
  misc_feature: MA Experiment 20000072 PARAMETER Experiment Name: At_100uM_ABA_Mutants_cDNA_P Parameter: Plant Line Value: CS8105
  misc_feature: MA Experiment 20000072 PARAMETER Experiment Name: At_100uM_ABA_Mutants_cDNA_P Parameter: Timepoint (hr) Value: 6
  misc_feature: MA Experiment 20000072 PARAMETER Experiment Name: At_100uM_ABA_Mutants_cDNA_P Parameter: Tissue Value: Aerial
  misc_feature: MA Experiment 20000072 PARAMETER Experiment Name: At_100uM_ABA_Mutants_cDNA_P Parameter: Treatment Value: 100uM ABA vs. No Treatment
  misc_feature: MA Experiment ID: 20000088 Result: Up-regulated in Transcription
  misc_feature: MA Experiment 20000088 PARAMETER Experiment Name: At_100uM_ABA_Mutants_cDNA_P Parameter: Plant Line Value: Landsberg
  misc_feature: MA Experiment 20000088 PARAMETER Experiment Name: At_100uM_ABA_Mutants_cDNA_P Parameter: Timepoint (hr) Value: 6
  misc_feature: MA Experiment 20000088 PARAMETER Experiment Name: At_100uM_ABA_Mutants_cDNA_P Parameter: Tissue Value: Aerial
  misc_feature: MA Experiment 20000088 PARAMETER Experiment Name: At_100uM_ABA_Mutants_cDNA_P Parameter: Treatment Value: 100uM ABA vs. No Treatment
  misc_feature: MA Experiment ID: 20000144 Result: Up-regulated in Transcription
  misc_feature: MA Experiment 20000144 PARAMETER Experiment Name: At_42deg_Heat_cDNA_P Parameter: Temperature (deg C) Value: 42 vs. 22
  misc_feature: MA Experiment 20000144 PARAMETER Experiment Name: At_42deg_Heat_cDNA_P Parameter: Timepoint (hr) Value: 1
  misc_feature: MA Experiment 20000144 PARAMETER Experiment Name: At_42deg_Heat_cDNA_P Parameter: Tissue Value: Aerial
  misc_feature: MA Experiment ID: 20000179 Result: Up-regulated in Transcription
  misc_feature: MA Experiment 20000179 PARAMETER Experiment Name: At_Germinating_Seeds_P Parameter: Age (hr) Value: 6 vs. 0
  misc_feature: MA Experiment 20000179 PARAMETER Experiment Name: At_Germinating_Seeds_P Parameter: Tissue Value: Germinating Seeds
  misc_feature: MA Experiment ID: 20000227 Result: Up-regulated in Transcription
  misc_feature: MA Experiment 20000227 PARAMETER Experiment Name: At_Root-Tips-vs-Tops_P Parameter: Tissue Value: Root Tips vs. Root Tops
  misc_feature: MA Experiment ID: 20000235 Result: Down-regulated in Transcription
  misc_feature: MA Experiment 20000235 PARAMETER Experiment Name: At_Siliques_P Parameter: Age (day) Value: 21
  misc_feature: MA Experiment 20000235 PARAMETER Experiment Name: At_Siliques_P Parameter: Organism Value: A. thaliana
  misc_feature: MA Experiment 20000235 PARAMETER Experiment Name: At_Siliques_P Parameter: Plant Line Value: WS
  misc_feature: MA Experiment 20000235 PARAMETER Experiment Name: At_Siliques_P Parameter: Tissue Value: 5-10mm Siliques vs. Whole Plant
  misc_feature: MA Experiment ID: 20000268 Result: Down-regulated in Transcription
  misc_feature: MA Experiment 20000268 PARAMETER Experiment Name: At_100mM_NaCl__P Parameter: Age (day) Value: 14
  misc_feature: MA Experiment 20000268 PARAMETER Experiment Name: At_100mM_NaCl__P Parameter: Organism Value: A. thaliana
  misc_feature: MA Experiment 20000268 PARAMETER Experiment Name: At_100mM_NaCl__P Parameter: Plant Line Value: WS
  misc_feature: MA Experiment 20000268 PARAMETER Experiment Name: At_100mM_NaCl__P Parameter: Timepoint (hr) Value: 6
  misc_feature: MA Experiment 20000268 PARAMETER Experiment Name: At_100mM_NaCl__P Parameter: Tissue Value: Whole Plant
  misc_feature: MA Experiment 20000268 PARAMETER Experiment Name: At_100mM_NaCl__P Parameter: Treatment Value: 100mM NaCl vs. No Treatment
  misc_feature: MA Experiment ID: 20000574 Result: Down-regulated in Transcription
  misc_feature: MA Experiment 20000574 PARAMETER Experiment Name: At_100uM_ABA_Mutants__P Parameter: Organism Value: A. thaliana
  misc_feature: MA Experiment 20000574 PARAMETER Experiment Name: At_100uM_ABA_Mutants__P Parameter: Plant Line Value: CS23 vs. Ler wt
  misc_feature: MA Experiment 20000574 PARAMETER Experiment Name: At_100uM_ABA_Mutants__P Parameter: Timepoint (hr) Value: N/A
  misc_feature: MA Experiment 20000574 PARAMETER Experiment Name: At_100uM_ABA_Mutants__P Parameter: Tissue Value: Whole Plant
  misc_feature: MA Experiment 20000574 PARAMETER Experiment Name: At_100uM_ABA_Mutants__P Parameter: Treatment Value: None
  misc_feature: MA Experiment ID: 20001247 Result: Up-regulated in Transcription
  misc_feature: MA Experiment 20001247 PARAMETER Experiment Name: At_Far-red-induction_P Parameter: Age (day) Value: 7
  misc_feature: MA Experiment 20001247 PARAMETER Experiment Name: At_Far-red-induction_P Parameter: Light Value: Far-red vs. White
  misc_feature: MA Experiment 20001247 PARAMETER Experiment Name: At_Far-red-induction_P Parameter: Organism Value: A. thaliana
  misc_feature: MA Experiment 20001247 PARAMETER Experiment Name: At_Far-red-induction_P Parameter: Plant Line Value: Columbia
  misc_feature: MA Experiment 20001247 PARAMETER Experiment Name: At_Far-red-induction_P Parameter: Timepoint (hr) Value: 1
  misc_feature: MA Experiment 20001247 PARAMETER Experiment Name: At_Far-red-induction_P Parameter: Tissue Value: Whole Plant
  misc_feature: MA Experiment ID: 20001451 Result: Up-regulated in Transcription
  misc_feature: MA Experiment 20001451 PARAMETER Experiment Name: At_Far-red-induction_P Parameter: Age (day) Value: 7
  misc_feature: MA Experiment 20001451 PARAMETER Experiment Name: At_Far-red-induction_P Parameter: Light Value: Far-red vs. White
  misc_feature: MA Experiment 20001451 PARAMETER Experiment Name: At_Far-red-induction_P Parameter: Organism Value: A. thaliana
  misc_feature: MA Experiment 20001451 PARAMETER Experiment Name: At_Far-red-induction_P Parameter: Plant Line Value: Columbia
  misc_feature: MA Experiment 20001451 PARAMETER Experiment Name: At_Far-red-induction_P Parameter: Timepoint (hr) Value: 24
  misc_feature: MA Experiment 20001451 PARAMETER Experiment Name: At_Far-red-induction_P Parameter: Tissue Value: Whole Plant
  misc_feature: MA Experiment ID: 20001554 Result: Down-regulated in Transcription
  misc_feature: MA Experiment 20001554 PARAMETER Experiment Name: At_Drought_Soil_Dry_P Parameter: Age (day) Value: 21
  misc_feature: MA Experiment 20001554 PARAMETER Experiment Name: At_Drought_Soil_Dry_P Parameter: Organism Value: A. thaliana
  misc_feature: MA Experiment 20001554 PARAMETER Experiment Name: At_Drought_Soil_Dry_P Parameter: Plant Line Value: WS
  misc_feature: MA Experiment 20001554 PARAMETER Experiment Name: At_Drought_Soil_Dry_P Parameter: Post Timepoint (hr) Value: None
  misc_feature: MA Experiment 20001554 PARAMETER Experiment Name: At_Drought_Soil_Dry_P Parameter: Post-Treatment Value: None
  misc_feature: MA Experiment 20001554 PARAMETER Experiment Name: At_Drought_Soil_Dry_P Parameter: Timepoint (day) Value: 7
  misc_feature: MA Experiment 20001554 PARAMETER Experiment Name: At_Drought_Soil_Dry_P Parameter: Treatment Value: Drought vs. No Drought
  misc_feature: MA Experiment ID: 20001555 Result: Down-regulated in Transcription
  misc_feature: MA Experiment 20001555 PARAMETER Experiment Name: At_Drought_Soil_Dry_P Parameter: Age (day) Value: 24
  misc_feature: MA Experiment 20001555 PARAMETER Experiment Name: At_Drought_Soil_Dry_P Parameter: Organism Value: A. thaliana
  misc_feature: MA Experiment 20001555 PARAMETER Experiment Name: At_Drought_Soil_Dry_P Parameter: Plant Line Value: WS
  misc_feature: MA Experiment 20001555 PARAMETER Experiment Name: At_Drought_Soil_Dry_P Parameter: Post Timepoint (hr) Value: None
  misc_feature: MA Experiment 20001555 PARAMETER Experiment Name: At_Drought_Soil_Dry_P Parameter: Post-Treatment Value: None
  misc_feature: MA Experiment 20001555 PARAMETER Experiment Name: At_Drought_Soil_Dry_P Parameter: Timepoint (day) Value: 10
  misc_feature: MA Experiment 20001555 PARAMETER Experiment Name: At_Drought_Soil_Dry_P Parameter: Treatment Value: Drought vs. No Drought
  misc_feature: MA Experiment ID: 20001556 Result: Down-regulated in Transcription
  misc_feature: MA Experiment 20001556 PARAMETER Experiment Name: At_Drought_Soil_Dry_P Parameter: Age (day) Value: 26
  misc_feature: MA Experiment 20001556 PARAMETER Experiment Name: At_Drought_Soil_Dry_P Parameter: Organism Value: A. thaliana
  misc_feature: MA Experiment 20001556 PARAMETER Experiment Name: At_Drought_Soil_Dry_P Parameter: Plant Line Value: WS
  misc_feature: MA Experiment 20001556 PARAMETER Experiment Name: At_Drought_Soil_Dry_P Parameter: Post Timepoint (hr) Value: None
  misc_feature: MA Experiment 20001556 PARAMETER Experiment Name: At_Drought_Soil_Dry_P Parameter: Post-Treatment Value: None
  misc_feature: MA Experiment 20001556 PARAMETER Experiment Name: At_Drought_Soil_Dry_P Parameter: Timepoint (day) Value: 12
  misc_feature: MA Experiment 20001556 PARAMETER Experiment Name: At_Drought_Soil_Dry_P Parameter: Treatment Value: Drought vs. No Drought
  misc_feature: MA Experiment ID: 20001558 Result: Up-regulated in Transcription
  misc_feature: MA Experiment 20001558 PARAMETER Experiment Name: At_Drought_Soil_Dry_P Parameter: Age (day) Value: 27
  misc_feature: MA Experiment 20001558 PARAMETER Experiment Name: At_Drought_Soil_Dry_P Parameter: Organism Value: A. thaliana
  misc_feature: MA Experiment 20001558 PARAMETER Experiment Name: At_Drought_Soil_Dry_P Parameter: Plant Line Value: WS
  misc_feature: MA Experiment 20001558 PARAMETER Experiment Name: At_Drought_Soil_Dry_P Parameter: Post Timepoint (hr) Value: 6
  misc_feature: MA Experiment 20001558 PARAMETER Experiment Name: At_Drought_Soil_Dry_P Parameter: Post-Treatment Value: Re-Water vs. No Drought
  misc_feature: MA Experiment 20001558 PARAMETER Experiment Name: At_Drought_Soil_Dry_P Parameter: Timepoint (day) Value: 13
  misc_feature: MA Experiment 20001558 PARAMETER Experiment Name: At_Drought_Soil_Dry_P Parameter: Treatment Value: Drought vs. No Drought
  misc_feature: MA Experiment ID: 20001560 Result: Up-regulated in Transcription
  misc_feature: MA Experiment 20001560 PARAMETER Experiment Name: At_Drought_Soil_Dry_P Parameter: Age (day) Value: 28
  misc_feature: MA Experiment 20001560 PARAMETER Experiment Name: At_Drought_Soil_Dry_P Parameter: Organism Value: A. thaliana
  misc_feature: MA Experiment 20001560 PARAMETER Experiment Name: At_Drought_Soil_Dry_P Parameter: Plant Line Value: WS
  misc_feature: MA Experiment 20001560 PARAMETER Experiment Name: At_Drought_Soil_Dry_P Parameter: Post Timepoint (hr) Value: None
  misc_feature: MA Experiment 20001560 PARAMETER Experiment Name: At_Drought_Soil_Dry_P Parameter: Post-Treatment Value: None
  misc_feature: MA Experiment 20001560 PARAMETER Experiment Name: At_Drought_Soil_Dry_P Parameter: Timepoint (day) Value: 14
  misc_feature: MA Experiment 20001560 PARAMETER Experiment Name: At_Drought_Soil_Dry_P Parameter: Treatment Value: Drought vs. No Drought
  misc_feature: MA Experiment ID: 20001757 Result: Down-regulated in Transcription
  misc_feature: MA Experiment 20001757 PARAMETER Experiment Name: At_50mM_NH4NO3_L-to-H_P Parameter: Timepoint (hr) Value: 6
  misc_feature: MA Experiment 20001757 PARAMETER Experiment Name: At_50mM_NH4NO3_L-to-H_P Parameter: Tissue Value: Leaf
  misc_feature: MA Experiment 20001757 PARAMETER Experiment Name: At_50mM_NH4NO3_L-to-H_P Parameter: Treatment Value: 50mM NH4NO3 vs 100mM Mannitol
  misc_feature: MA Experiment ID: 20001772 Result: Up-regulated in Transcription
  misc_feature: MA Experiment 20001772 PARAMETER Experiment Name: At_Far-red-enriched-adult_P Parameter: Age (day) Value: 29
  misc_feature: MA Experiment 20001772 PARAMETER Experiment Name: At_Far-red-enriched-adult_P Parameter: Light Value: Far-red enriched vs. White
  misc_feature: MA Experiment 20001772 PARAMETER Experiment Name: At_Far-red-enriched-adult_P Parameter: Organism Value: A. thaliana
  misc_feature: MA Experiment 20001772 PARAMETER Experiment Name: At_Far-red-enriched-adult_P Parameter: Plant Line Value: Columbia
  misc_feature: MA Experiment 20001772 PARAMETER Experiment Name: At_Far-red-enriched-adult_P Parameter: Timepoint (hr) Value: 24
  misc_feature: MA Experiment 20001772 PARAMETER Experiment Name: At_Far-red-enriched-adult_P Parameter: Tissue Value: Aerial
  misc_feature: MA Experiment ID: 20001904 Result: Down-regulated in Transcription
  misc_feature: MA Experiment 20001904 PARAMETER Experiment Name: At_Drought_Reproduction_P Parameter: Age (day) Value: 37
  misc_feature: MA Experiment 20001904 PARAMETER Experiment Name: At_Drought_Reproduction_P Parameter: Organism Value: A. thaliana
  misc_feature: MA Experiment 20001904 PARAMETER Experiment Name: At_Drought_Reproduction_P Parameter: Plant Line Value: WS
  misc_feature: MA Experiment 20001904 PARAMETER Experiment Name: At_Drought_Reproduction_P Parameter: Timepoint (day) Value: 7
  misc_feature: MA Experiment 20001904 PARAMETER Experiment Name: At_Drought_Reproduction_P Parameter: Tissue Value: Rosettes
  misc_feature: MA Experiment 20001904 PARAMETER Experiment Name: At_Drought_Reproduction_P Parameter: Treatment Value: Drought vs. No Drought
  misc_feature: MA Experiment ID: 20001905 Result: Down-regulated in Transcription
  misc_feature: MA Experiment 20001905 PARAMETER Experiment Name: At_Drought_Reproduction_P Parameter: Age (day) Value: 40
  misc_feature: MA Experiment 20001905 PARAMETER Experiment Name: At_Drought_Reproduction_P Parameter: Organism Value: A. thaliana
  misc_feature: MA Experiment 20001905 PARAMETER Experiment Name: At_Drought_Reproduction_P Parameter: Plant Line Value: WS
  misc_feature: MA Experiment 20001905 PARAMETER Experiment Name: At_Drought_Reproduction_P Parameter: Timepoint (day) Value: 10
  misc_feature: MA Experiment 20001905 PARAMETER Experiment Name: At_Drought_Reproduction_P Parameter: Tissue Value: Rosettes
  misc_feature: MA Experiment 20001905 PARAMETER Experiment Name: At_Drought_Reproduction_P Parameter: Treatment Value: Drought vs. No Drought
aaacaaaaattttcttttccaaaatccccaaacaatagaaacgcgttttaaacgatttgattagttttaaattaaaaagaagatccgagcgatgtctggttcgacccggaaagaaatggatcggatcaaaggaccatggagtcctgaagaagacgatctgttacaatcgttggttcagaagcacggaccaaggaactggtctctgataagcaaatcaatccctggacgttccggtaaatcttgccgtctccgttggtgtaatcagctttctccggaggtagagcaccgtggattcacggcggaggaagatgatacgattatactagcgcacgctcggtttggtaacaagtgggcgacgattgcacggcttctcaatggtcgcactgataacgcgattaagaatcactggaactcaacgctgaagcggaaatgtagcggcggaggcggcggaggagaggaagggcagagttgtgatttcggtggtaatggagggtatgatggtaatttaacagatgaaaaaccgttaaaacggacggcgagtggtggaggaggagttgttgtggtgacggcgttaagtcnaacgggatctgacgtcagcgagcaatcgcaatctagtggatctgttttaccggtttcttcttcttgtcatgtttttaaaccgacggcgagagctggtggagtggtgattgagtcatcatcgtcggaggaggaggagaaagatccgatgacttgtttgagtttgtctttgccttgggtcaatgagtcaacaactccggtggagttgtttccggtgaagagagaagaagaagaagagaaggaaagagagatttctggacttggtggagattttatgacggtggtgcaggagatgattaagacggaggttaggagttacatggcggatttacagctaggaaacggcggaggagctggaggaggagcaagttcgtgtatggtgcaaggaactaatggtcgtaatgtagggtttagagagtttattggattaggtaggatcgagtagtgagtgagaaaagagaagaattgtgtagcaaatgcagagaaagagccaatttcatgatttgagatttgattcattcgaaaaaaaaactgaataaatgtattgattttg

SEQ ID NO: 25322 - protein, 309 aa, Arabidopsis thaliana
  peptide (1)..(309): Ceres Seq. ID no. 12329374
  misc_feature (13)..(59): Pfam Name: Myb-like DNA-binding domain Pfam Description: Myb-like DNA-binding domain
  misc_feature (10)..(301): Homolog of NCBI NO: 15229664 NR Description: myb DNA-binding protein (MYB77)
  misc_feature (9)..(223): Homolog of NCBI NO: 9954112 NR Description: tuber-specific and sucrose-responsive element
  misc_feature (10)..(309): Homolog of NCBI NO: 21592897 NR Description: myb-related protein, 33.3K [Arabidopsis thaliana]
  misc_feature (10)..(309): Homolog of NCBI NO: 2129648 NR Description: myb-related protein, 33.3K - Arabidopsis thaliana
  misc_feature (10)..(309): Homolog of NCBI NO: 15450393 NR Description: AT5g67300/K8K14_2 [Arabidopsis thaliana]
  misc_feature (10)..(309): Homolog of NCBI NO: 15240708 NR Description: myb family transcription factor
  misc_feature (53)..(309): Homolog of NCBI NO: 11358558 NR Description: myb-related transcription factor MYB73
  misc_feature (1)..(309): Homolog of NCBI NO: 15235484 NR Description: myb DNA-binding protein (AtMYB73)
  misc_feature (1)..(309): Homolog of NCBI NO: 15227806 NR Description: MYB family transcription factor
  misc_feature (1)..(309): Homolog of NCBI NO: 21593586 NR Description: putative MYB family transcription factor
  misc_feature (163)..(163): Xaa is any aa, unknown or other
MSGSTRKEMDRIKGPWSPEEDDLLQSLVQKHGPRNWSLISKSIPGRSGKSCRLRWCNQLSPEVEHRGFTAEEDDTIILAHARFGNKWATIARLLNGRTDNAIKNHWNSTLKRKCSGGGGGGEEGQSCDFGGNGGYDGNLTDEKPLKRTASGGGGVVVVTALSXTGSDVSEQSQSSGSVLPVSSSCHVFKPTARAGGVVIESSSSEEEEKDPMTCLSLSLPWVNESTTPVELFPVKREEEEEKEREISGLGGDFMTVVQEMIKTEVRSYMADLQLGNGGGAGGGASSCMVQGTNGRNVGFREFIGLGRIE

SEQ ID NO: 25323 - protein, 301 aa, Arabidopsis thaliana
  peptide (1)..(301): Ceres Seq. ID no. 12329375
  misc_feature (5)..(51): Pfam Name: Myb-like DNA-binding domain Pfam Description: Myb-like DNA-binding domain
  misc_feature (2)..(293): Homolog of NCBI NO: 15229664 NR Description: myb DNA-binding protein (MYB77)
  misc_feature (1)..(215): Homolog of NCBI NO: 9954112 NR Description: tuber-specific and sucrose-responsive element
  misc_feature (2)..(301): Homolog of NCBI NO: 21592897 NR Description: myb-related protein, 33.3K [Arabidopsis thaliana]
  misc_feature (2)..(301): Homolog of NCBI NO: 2129648 NR Description: myb-related protein, 33.3K - Arabidopsis thaliana
  misc_feature (2)..(301): Homolog of NCBI NO: 15450393 NR Description: AT5g67300/K8K14_2 [Arabidopsis thaliana]
  misc_feature (2)..(301): Homolog of NCBI NO: 15240708 NR Description: myb family transcription factor
  misc_feature (45)..(301): Homolog of NCBI NO: 11358558 NR Description: myb-related transcription factor MYB73
  misc_feature (1)..(301): Homolog of NCBI NO: 15235484 NR Description: myb DNA-binding protein (AtMYB73)
  misc_feature (1)..(301): Homolog of NCBI NO: 15227806 NR Description: MYB family transcription factor
  misc_feature (1)..(301): Homolog of NCBI NO: 21593586 NR Description: putative MYB family transcription factor
  misc_feature (155)..(155): Xaa is any aa, unknown or other
MDRIKGPWSPEEDDLLQSLVQKHGPRNWSLISKSIPGRSGKSCRLRWCNQLSPEVEHRGFTAEEDDTIILAHARFGNKWATIARLLNGRTDNAIKNHWNSTLKRKCSGGGGGGEEGQSCDFGGNGGYDGNLTDEKPLKRTASGGGGVVVVTALSXTGSDVSEQSQSSGSVLPVSSSCHVFKPTARAGGVVIESSSSEEEEKDPMTCLSLSLPWVNESTTPVELFPVKREEEEEKEREISGLGGDFMTVVQEMIKTEVRSYMADLQLGNGGGAGGGASSCMVQGTNGRNVGFREFIGLGRIE

SEQ ID NO: 25324 - DNA, 1051 bp, Arabidopsis thaliana
  misc_feature (1)..(1051): Ceres Seq. ID no. 12337374
  misc_feature: MA Experiment ID: 108434 Result: Up-regulated in Transcription
  misc_feature: MA Experiment 108434 PARAMETER Experiment Name: At_Root_Tips_cDNA_P Parameter: Tissue Value: Root Tips
  misc_feature: MA Experiment ID: 20000234 Result: Up-regulated in Transcription
  misc_feature: MA Experiment 20000234 PARAMETER Experiment Name: At_Siliques_P Parameter: Age (day) Value: 21
  misc_feature: MA Experiment 20000234 PARAMETER Experiment Name: At_Siliques_P Parameter: Organism Value: A. thaliana
  misc_feature: MA Experiment 20000234 PARAMETER Experiment Name: At_Siliques_P Parameter: Plant Line Value: WS
  misc_feature: MA Experiment 20000234 PARAMETER Experiment Name: At_Siliques_P Parameter: Tissue Value: Less Than 5mm Siliques vs. Whole Plant
aaaaaacagaaaaaattcgtggaaacgccattaacgagatctagcacaaactcgtagtgtggtgtagaagaagacaaaagcaaggagcttcataataaaaccctagagatatttgtttctccaatttcaaaagacgagacgtgaagaagacgatcgaagatgaacattttcagattagctggtgatatgactcacctagccagtgttcttgtcttgcttctcaagatccacaccatcaaatcctgcgctggtgtttcattgaagactcaagaactctatgccattgtctttgcgacgcgttatttggatattttcacgagttttgtgtctctgtacaacacctctatgaagttggtgttcttaggaagttctttttcgattgtgtggtacatgaagtatcataaggccgtccacaggacttacgacagagagcaagatacgtttcgtcattggttccttgtgcttccttgctttctcttagctcttctgattcatgaaaagtttacctttcttgaggtattgtggacgttttcattgtacttggaggctgttgccatattacctcagcttgtcttgttgcaaaggactagaaatattgacaacttgaccggacaatatatatttctccttggggggtaccgtggattatacatcctcaactggatctaccgttacttcactgagccgcactttgttcactggataacatggatcgccgggtttgttcaaacactgctctatgccgacttcttctattattatttcctaagctggaagaacaacaaaaagctccaattaccagcttaatttctaaagtttcaatgctcgggaaccctacggattcgatttggtgcccgacaaaacatctaccggaatgttaccaatttactctgttggtggttattagaggagaacgagcatagatgtgtaaactccagcaatctaacttattacactttctttagactttctcgtctctcatctttttttttggtcgacttagtgttactaaatatttcgacgcgacagtaatatattcaccacaattcgc

SEQ ID NO: 25325 - protein, 215 aa, Arabidopsis thaliana
  peptide (1)..(215): Ceres Seq. ID no. 12337375
  misc_feature (1)..(205): Pfam Name: ER lumen protein retaining receptor Pfam Description: ER lumen protein retaining receptor
  misc_feature (1)..(214): Homolog of NCBI NO: 22656361 NR Description: endoplasmic reticulum retention receptor
  misc_feature (1)..(215): Homolog of NCBI NO: 17137442 NR Description: KDEL receptor CG5183-PA [Drosophila melanogaster]
  misc_feature (1)..(215): Homolog of NCBI NO: 31196307 NR Description: ENSANGP00000012108 [Anopheles gambiae]
  misc_feature (1)..(215): Homolog of NCBI NO: 18397049 NR Description: ER lumen protein retaining receptor
  misc_feature (1)..(215): Homolog of NCBI NO: 14285310 NR Description: ERD2 protein [Scherffelia dubia]
  misc_feature (1)..(214): Homolog of NCBI NO: 21743051 NR Description: OSJNBa0083D01.1 [Oryza sativa (japonica
  misc_feature (1)..(215): Homolog of NCBI NO: 6685428 NR Description: ER lumen protein retaining receptor (HDEL
  misc_feature (1)..(215): Homolog of NCBI NO: 9293986 NR Description: ER lumen protein-retaining receptor-like protein
  misc_feature (1)..(215): Homolog of NCBI NO: 18404390 NR Description: ER lumen retaining receptor (HDEL receptor),
  misc_feature (1)..(215): Homolog of NCBI NO: 21592401 NR Description: ER lumen retaining receptor (HDEL receptor),
MNIFRLAGDMTHLASVLVLLLKIHTIKSCAGVSLKTQELYAIVFATRYLDIFTSFVSLYNTSMKLVFLGSSFSIVWYMKYHKAVHRTYDREQDTFRHWFLVLPCFLLALLIHEKFTFLEVLWTFSLYLEAVAILPQLVLLQRTRNIDNLTGQYIFLLGGYRGLYILNWIYRYFTEPHFVHWITWIAGFVQTLLYADFFYYYFLSWKNNKKLQLPA

SEQ ID NO: 25326 - protein, 206 aa, Arabidopsis thaliana
  peptide (1)..(206): Ceres Seq. ID no. 12337376
  misc_feature (1)..(196): Pfam Name: ER lumen protein retaining receptor Pfam Description: ER lumen protein retaining receptor
  misc_feature (1)..(205): Homolog of NCBI NO: 22656361 NR Description: endoplasmic reticulum retention receptor
  misc_feature (1)..(206): Homolog of NCBI NO: 17137442 NR Description: KDEL receptor CG5183-PA [Drosophila melanogaster]
  misc_feature (1)..(206): Homolog of NCBI NO: 31196307 NR Description: ENSANGP00000012108 [Anopheles gambiae]
  misc_feature (1)..(206): Homolog of NCBI NO: 18397049 NR Description: ER lumen protein retaining receptor
  misc_feature (1)..(206): Homolog of NCBI NO: 14285310 NR Description: ERD2 protein [Scherffelia dubia]
  misc_feature (1)..(205): Homolog of NCBI NO: 21743051 NR Description: OSJNBa0083D01.1 [Oryza sativa (japonica
  misc_feature (1)..(206): Homolog of NCBI NO: 6685428 NR Description: ER lumen protein retaining receptor (HDEL
  misc_feature (1)..(206): Homolog of NCBI NO: 9293986 NR Description: ER lumen protein-retaining receptor-like protein
  misc_feature (1)..(206): Homolog of NCBI NO: 18404390 NR Description: ER lumen retaining receptor (HDEL receptor),
  misc_feature (1)..(206): Homolog of NCBI NO: 21592401 NR Description: ER lumen retaining receptor (HDEL receptor),
MTHLASVLVLLLKIHTIKSCAGVSLKTQELYAIVFATRYLDIFTSFVSLYNTSMKLVFLGSSFSIVWYMKYHKAVHRTYDREQDTFRHWFLVLPCFLLALLIHEKFTFLEVLWTFSLYLEAVAILPQLVLLQRTRNIDNLTGQYIFLLGGYRGLYILNWIYRYFTEPHFVHWITWIAGFVQTLLYADFFYYYFLSWKNNKKLQLPA

SEQ ID NO: 25327 - protein, 153 aa, Arabidopsis thaliana
  peptide (1)..(153): Ceres Seq. ID no. 12337377
  misc_feature (1)..(143): Pfam Name: ER lumen protein retaining receptor Pfam Description: ER lumen protein retaining receptor
  misc_feature (1)..(152): Homolog of NCBI NO: 22656361 NR Description: endoplasmic reticulum retention receptor
  misc_feature (1)..(153): Homolog of NCBI NO: 17137442 NR Description: KDEL receptor CG5183-PA [Drosophila melanogaster]
  misc_feature (1)..(153): Homolog of NCBI NO: 31196307 NR Description: ENSANGP00000012108 [Anopheles gambiae]
  misc_feature (1)..(153): Homolog of NCBI NO: 18397049 NR Description: ER lumen protein retaining receptor
  misc_feature (1)..(153): Homolog of NCBI NO: 14285310 NR Description: ERD2 protein [Scherffelia dubia]
  misc_feature (1)..(152): Homolog of NCBI NO: 21743051 NR Description: OSJNBa0083D01.1 [Oryza sativa (japonica
  misc_feature (1)..(153): Homolog of NCBI NO: 6685428 NR Description: ER lumen protein retaining receptor (HDEL
  misc_feature (1)..(153): Homolog of NCBI NO: 9293986 NR Description: ER lumen protein-retaining receptor-like protein
  misc_feature (1)..(153): Homolog of NCBI NO: 18404390 NR Description: ER lumen retaining receptor (HDEL receptor),
  misc_feature (1)..(153): Homolog of NCBI NO: 21592401 NR Description: ER lumen retaining receptor (HDEL receptor),
MKLVFLGSSFSIVWYMKYHKAVHRTYDREQDTFRHWFLVLPCFLLALLIHEKFTFLEVLWTFSLYLEAVAILPQLVLLQRTRNIDNLTGQYIFLLGGYRGLYILNWIYRYFTEPHFVHWITWIAGFVQTLLYADFFYYYFLSWKNNKKLQLPA

SEQ ID NO: 25328 - DNA, 908 bp, Arabidopsis thaliana
  misc_feature (1)..(908): Ceres Seq. ID no. 12466432
  misc_feature: MA Experiment ID: 108434 Result: Down-regulated in Transcription
  misc_feature: MA Experiment 108434 PARAMETER Experiment Name: At_Root_Tips_cDNA_P Parameter: Tissue Value: Root Tips
  misc_feature: MA Experiment ID: 108435 Result: Down-regulated in Transcription
  misc_feature: MA Experiment 108435 PARAMETER Experiment Name: At_stm_Mutants_cDNA_P Parameter: Plant Line Value: wt Landsburg vs stm
  misc_feature: MA Experiment 108435 PARAMETER Experiment Name: At_stm_Mutants_cDNA_P Parameter: Tissue Value: Shoot Apical Meristem Region
  misc_feature: MA Experiment ID: 108461 Result: Up-regulated in Transcription
  misc_feature: MA Experiment 108461 PARAMETER Experiment Name: At_Germinating_Seeds_cDNA_P Parameter: Age (day) Value: 1 vs. 0
  misc_feature: MA Experiment 108461 PARAMETER Experiment Name: At_Germinating_Seeds_cDNA_P Parameter: Tissue Value: Germinating Seeds
  misc_feature: MA Experiment ID: 108462 Result: Up-regulated in Transcription
  misc_feature: MA Experiment 108462 PARAMETER Experiment Name: At_Germinating_Seeds_cDNA_P Parameter: Age (day) Value: 2 vs. 0
  misc_feature: MA Experiment 108462 PARAMETER Experiment Name: At_Germinating_Seeds_cDNA_P Parameter: Tissue Value: Germinating Seeds
  misc_feature: MA Experiment ID: 108464 Result: Up-regulated in Transcription
  misc_feature: MA Experiment 108464 PARAMETER Experiment Name: At_Germinating_Seeds_cDNA_P Parameter: Age (day) Value: 4 vs. 0
  misc_feature: MA Experiment 108464 PARAMETER Experiment Name: At_Germinating_Seeds_cDNA_P Parameter: Tissue Value: Germinating Seeds
  misc_feature: MA Experiment ID: 108488 Result: Up-regulated in Transcription
  misc_feature: MA Experiment ID: 108573 Result: Down-regulated in Transcription
  misc_feature: MA Experiment 108573 PARAMETER Experiment Name: At_Drought_cDNA_P Parameter: Timepoint (hr) Value: 6
  misc_feature: MA Experiment 108573 PARAMETER Experiment Name: At_Drought_cDNA_P Parameter: Tissue Value: Aerial
  misc_feature: MA Experiment 108573 PARAMETER Experiment Name: At_Drought_cDNA_P Parameter: Treatment Value: Drought vs. No Drought
  misc_feature: MA Experiment ID: 108594 Result: Down-regulated in Transcription
  misc_feature: MA Experiment 108594 PARAMETER Experiment Name: At_Ler-rhl_Root_cDNA_P Parameter: Plant Line Value: null
  misc_feature: MA Experiment ID: 108595 Result: Down-regulated in Transcription
  misc_feature: MA Experiment 108595 PARAMETER Experiment Name: At_Ler-pi_Ovule_cDNA_P Parameter: Plant Line Value: null
  misc_feature: MA Experiment ID: 20000087 Result: Down-regulated in Transcription
  misc_feature: MA Experiment 20000087 PARAMETER Experiment Name: At_100uM_ABA_Mutants_cDNA_P Parameter: Plant Line Value: WS
  misc_feature: MA Experiment 20000087 PARAMETER Experiment Name: At_100uM_ABA_Mutants_cDNA_P Parameter: Timepoint (hr) Value: 6
  misc_feature: MA Experiment 20000087 PARAMETER Experiment Name: At_100uM_ABA_Mutants_cDNA_P Parameter: Tissue Value: Aerial
  misc_feature: MA Experiment 20000087 PARAMETER Experiment Name: At_100uM_ABA_Mutants_cDNA_P Parameter: Treatment Value: 100uM ABA vs. No Treatment
  misc_feature: MA Experiment ID: 20000180 Result: Up-regulated in Transcription
  misc_feature: MA Experiment 20000180 PARAMETER Experiment Name: At_Germinating_Seeds_P Parameter: Age (hr) Value: 24 vs. 0
  misc_feature: MA Experiment 20000180 PARAMETER Experiment Name: At_Germinating_Seeds_P Parameter: Tissue Value: Germinating Seeds
  misc_feature: MA Experiment ID: 20000185 Result: Down-regulated in Transcription
  misc_feature: MA Experiment 20000185 PARAMETER Experiment Name: At_Roots__P Parameter: Age (day) Value: 7 vs. 21
  misc_feature: MA Experiment 20000185 PARAMETER Experiment Name: At_Roots__P Parameter: Organism Value: A. thaliana
  misc_feature: MA Experiment 20000185 PARAMETER Experiment Name: At_Roots__P Parameter: Tissue Value: Roots vs. Whole Plant
  misc_feature: MA Experiment ID: 20000264 Result: Down-regulated in Transcription
  misc_feature: MA Experiment 20000264 PARAMETER Experiment Name: At_Open_Flower_P Parameter: Age (day) Value: 21
  misc_feature: MA Experiment 20000264 PARAMETER Experiment Name: At_Open_Flower_P Parameter: Plant Line Value: WS
  misc_feature: MA Experiment 20000264 PARAMETER Experiment Name: At_Open_Flower_P Parameter: Tissue Value: Open Flower vs. Whole Plant
  misc_feature: MA Experiment ID: 20000265 Result: Down-regulated in Transcription
  misc_feature: MA Experiment 20000265 PARAMETER Experiment Name: At_Open_Flower_P Parameter: Age (day) Value: 21
  misc_feature: MA Experiment 20000265 PARAMETER Experiment Name: At_Open_Flower_P Parameter: Plant Line Value: WS
  misc_feature: MA Experiment 20000265 PARAMETER Experiment Name: At_Open_Flower_P Parameter: Tissue Value: Closed Flower vs. Whole Plant
  misc_feature: MA Experiment ID: 20000286 Result: Down-regulated in Transcription
  misc_feature: MA Experiment 20000286 PARAMETER Experiment Name: At_Open_Flower_P Parameter: Age (day) Value: 21
  misc_feature: MA Experiment 20000286 PARAMETER Experiment Name: At_Open_Flower_P Parameter: Plant Line Value: WS
  misc_feature: MA Experiment 20000286 PARAMETER Experiment Name: At_Open_Flower_P Parameter: Tissue Value: Half Open vs. Whole Plant
  misc_feature: MA Experiment ID: 20000437 Result: Down-regulated in Transcription
  misc_feature: MA Experiment 20000437 PARAMETER Experiment Name: At_Drought_P Parameter: Age (day) Value: 8
  misc_feature: MA Experiment 20000437 PARAMETER Experiment Name: At_Drought_P Parameter: Organism Value: A. thaliana
  misc_feature: MA Experiment 20000437 PARAMETER Experiment Name: At_Drought_P Parameter: Plant Line Value: WS
  misc_feature: MA Experiment 20000437 PARAMETER Experiment Name: At_Drought_P Parameter: Timepoint (hr) Value: 24
  misc_feature: MA Experiment 20000437 PARAMETER Experiment Name: At_Drought_P Parameter: Tissue Value: Whole Plant
  misc_feature: MA Experiment 20000437 PARAMETER Experiment Name: At_Drought_P Parameter: Treatment Value: Drought vs. No Drought
  misc_feature: MA Experiment ID: 20000438 Result: Up-regulated in Transcription
  misc_feature: MA Experiment 20000438 PARAMETER Experiment Name: At_Shoots__P Parameter: Age (day) Value: 14
  misc_feature: MA Experiment 20000438 PARAMETER Experiment Name: At_Shoots__P Parameter: Tissue Value: Shoots vs. Whole Plant
  misc_feature: MA Experiment ID: 20000439 Result: Down-regulated in Transcription
  misc_feature: MA Experiment 20000439 PARAMETER Experiment Name: At_Roots__P Parameter: Age (day) Value: 14 vs. 21
  misc_feature: MA Experiment 20000439 PARAMETER Experiment Name: At_Roots__P Parameter: Organism Value: A. thaliana
  misc_feature: MA Experiment 20000439 PARAMETER Experiment Name: At_Roots__P Parameter: Tissue Value: Roots vs. Whole Plant
  misc_feature: MA Experiment ID: 20000527 Result: Down-regulated in Transcription
  misc_feature: MA Experiment 20000527 PARAMETER Experiment Name: At_10percent_PEG_P Parameter: Age (day) Value: 20
  misc_feature: MA Experiment 20000527 PARAMETER Experiment Name: At_10percent_PEG_P Parameter: Organism Value: A. thaliana
  misc_feature: MA Experiment 20000527 PARAMETER Experiment Name: At_10percent_PEG_P Parameter: Plant Line Value: WS
  misc_feature: MA Experiment 20000527 PARAMETER Experiment Name: At_10percent_PEG_P Parameter: Timepoint (day) Value: 20
  misc_feature: MA Experiment 20000527 PARAMETER Experiment Name: At_10percent_PEG_P Parameter: Tissue Value: Whole Plant
  misc_feature: MA Experiment 20000527 PARAMETER Experiment Name: At_10percent_PEG_P Parameter: Treatment Value: 10percent PEG vs. No Treatment
  misc_feature: MA Experiment ID: 20000573 Result: Down-regulated in Transcription
  misc_feature: MA Experiment 20000573 PARAMETER Experiment Name: At_100uM_ABA_Mutants__P Parameter: Organism Value: A. thaliana
  misc_feature: MA Experiment 20000573 PARAMETER Experiment Name: At_100uM_ABA_Mutants__P Parameter: Plant Line Value: CS22 vs. Ler wt
  misc_feature: MA Experiment 20000573 PARAMETER Experiment Name: At_100uM_ABA_Mutants__P Parameter: Timepoint (hr) Value: N/A
  misc_feature: MA Experiment 20000573 PARAMETER Experiment Name: At_100uM_ABA_Mutants__P Parameter: Tissue Value: Whole Plant
  misc_feature: MA Experiment 20000573 PARAMETER Experiment Name: At_100uM_ABA_Mutants__P Parameter: Treatment Value: None
  misc_feature: MA Experiment ID: 20000574 Result: Down-regulated in Transcription
  misc_feature: MA Experiment 20000574 PARAMETER Experiment Name: At_100uM_ABA_Mutants__P Parameter: Organism Value: A. thaliana
  misc_feature: MA Experiment 20000574 PARAMETER Experiment Name: At_100uM_ABA_Mutants__P Parameter: Plant Line Value: CS23 vs. Ler wt
  misc_feature: MA Experiment 20000574 PARAMETER Experiment Name: At_100uM_ABA_Mutants__P Parameter: Timepoint (hr) Value: N/A
  misc_feature: MA Experiment 20000574 PARAMETER Experiment Name: At_100uM_ABA_Mutants__P Parameter: Tissue Value: Whole Plant
  misc_feature: MA Experiment 20000574 PARAMETER Experiment Name: At_100uM_ABA_Mutants__P Parameter: Treatment Value: None
  misc_feature: MA Experiment ID: 20000794 Result: Down-regulated in Transcription
  misc_feature: MA Experiment 20000794 PARAMETER Experiment Name: At_Petals_P Parameter: Age (day) Value: 23-25 days
  misc_feature: MA Experiment 20000794 PARAMETER Experiment Name: At_Petals_P Parameter: Plant Line Value: WS
  misc_feature: MA Experiment 20000794 PARAMETER Experiment Name: At_Petals_P Parameter: Tissue Value: Petals vs. Whole plant
  misc_feature: MA Experiment ID: 20001556 Result: Down-regulated in Transcription
  misc_feature: MA Experiment 20001556 PARAMETER Experiment Name: At_Drought_Soil_Dry_P Parameter: Age (day) Value: 26
  misc_feature: MA Experiment 20001556 PARAMETER Experiment Name: At_Drought_Soil_Dry_P Parameter: Organism Value: A. thaliana
  misc_feature: MA Experiment 20001556 PARAMETER Experiment Name: At_Drought_Soil_Dry_P Parameter: Plant Line Value: WS
  misc_feature: MA Experiment 20001556 PARAMETER Experiment Name: At_Drought_Soil_Dry_P Parameter: Post Timepoint (hr) Value: None
  misc_feature: MA Experiment 20001556 PARAMETER Experiment Name: At_Drought_Soil_Dry_P Parameter: Post-Treatment Value: None
  misc_feature: MA Experiment 20001556 PARAMETER Experiment Name: At_Drought_Soil_Dry_P Parameter: Timepoint (day) Value: 12
  misc_feature: MA Experiment 20001556 PARAMETER Experiment Name: At_Drought_Soil_Dry_P Parameter: Treatment Value: Drought vs. No Drought
  misc_feature: MA Experiment ID: 20001557 Result: Down-regulated in Transcription
  misc_feature: MA Experiment 20001557 PARAMETER Experiment Name: At_Drought_Soil_Dry_P Parameter: Age (day) Value: 27
  misc_feature: MA Experiment 20001557 PARAMETER Experiment Name: At_Drought_Soil_Dry_P Parameter: Organism Value: A. thaliana
  misc_feature: MA Experiment 20001557 PARAMETER Experiment Name: At_Drought_Soil_Dry_P Parameter: Plant Line Value: WS
  misc_feature: MA Experiment 20001557 PARAMETER Experiment Name: At_Drought_Soil_Dry_P Parameter: Post Timepoint (hr) Value: 3
  misc_feature: MA Experiment 20001557 PARAMETER Experiment Name: At_Drought_Soil_Dry_P Parameter: Post-Treatment Value: Re-Water vs. No Drought
  misc_feature: MA Experiment 20001557 PARAMETER Experiment Name: At_Drought_Soil_Dry_P Parameter: Timepoint (day) Value: 13
  misc_feature: MA Experiment 20001557 PARAMETER Experiment Name: At_Drought_Soil_Dry_P Parameter: Treatment Value: Drought vs. No Drought
  misc_feature: MA Experiment ID: 20001558 Result: Down-regulated in Transcription
  misc_feature: MA Experiment 20001558 PARAMETER Experiment Name: At_Drought_Soil_Dry_P Parameter: Age (day) Value: 27
  misc_feature: MA Experiment 20001558 PARAMETER Experiment Name: At_Drought_Soil_Dry_P Parameter: Organism Value: A. thaliana
  misc_feature: MA Experiment 20001558 PARAMETER Experiment Name: At_Drought_Soil_Dry_P Parameter: Plant Line Value: WS
  misc_feature: MA Experiment 20001558 PARAMETER Experiment Name: At_Drought_Soil_Dry_P Parameter: Post Timepoint (hr) Value: 6
  misc_feature: MA Experiment 20001558 PARAMETER Experiment Name: At_Drought_Soil_Dry_P Parameter: Post-Treatment Value: Re-Water vs. No Drought
  misc_feature: MA Experiment 20001558 PARAMETER Experiment Name: At_Drought_Soil_Dry_P Parameter: Timepoint (day) Value: 13
  misc_feature: MA Experiment 20001558 PARAMETER Experiment Name: At_Drought_Soil_Dry_P Parameter: Treatment Value: Drought vs. No Drought
  misc_feature: MA Experiment ID: 20001757 Result: Up-regulated in Transcription
  misc_feature: MA Experiment 20001757 PARAMETER Experiment Name: At_50mM_NH4NO3_L-to-H_P Parameter: Timepoint (hr) Value: 6
  misc_feature: MA Experiment 20001757 PARAMETER Experiment Name: At_50mM_NH4NO3_L-to-H_P Parameter: Tissue Value: Leaf
  misc_feature: MA Experiment 20001757 PARAMETER Experiment Name: At_50mM_NH4NO3_L-to-H_P Parameter: Treatment Value: 50mM NH4NO3 vs 100mM Mannitol
  misc_feature: MA Experiment ID: 20001905 Result: Down-regulated in Transcription
  misc_feature: MA Experiment 20001905 PARAMETER Experiment Name: At_Drought_Reproduction_P Parameter: Age (day) Value: 40
  misc_feature: MA Experiment 20001905 PARAMETER Experiment Name: At_Drought_Reproduction_P Parameter: Organism Value: A. thaliana
  misc_feature: MA Experiment 20001905 PARAMETER Experiment Name: At_Drought_Reproduction_P Parameter: Plant Line Value: WS
  misc_feature: MA Experiment 20001905 PARAMETER Experiment Name: At_Drought_Reproduction_P Parameter: Timepoint (day) Value: 10
  misc_feature: MA Experiment 20001905 PARAMETER Experiment Name: At_Drought_Reproduction_P Parameter: Tissue Value: Rosettes
  misc_feature: MA Experiment 20001905 PARAMETER Experiment Name: At_Drought_Reproduction_P Parameter: Treatment Value: Drought vs. No Drought
  misc_feature: MA Experiment ID: 20001906 Result: Down-regulated in Transcription
  misc_feature: MA Experiment 20001906 PARAMETER Experiment Name: At_Drought_Reproduction_P Parameter: Age (day) Value: 35
  misc_feature: MA Experiment 20001906 PARAMETER Experiment Name: At_Drought_Reproduction_P Parameter: Organism Value: A. thaliana
  misc_feature: MA Experiment 20001906 PARAMETER Experiment Name: At_Drought_Reproduction_P Parameter: Plant Line Value: WS
  misc_feature: MA Experiment 20001906 PARAMETER Experiment Name: At_Drought_Reproduction_P Parameter: Timepoint (day) Value: 5
  misc_feature: MA Experiment 20001906 PARAMETER Experiment Name: At_Drought_Reproduction_P Parameter: Tissue Value: Siliques
  misc_feature: MA Experiment 20001906 PARAMETER Experiment Name: At_Drought_Reproduction_P Parameter: Treatment Value: Drought vs. No Drought
  misc_feature: MA Experiment ID: 20001908 Result: Down-regulated in Transcription
  misc_feature: MA Experiment 20001908 PARAMETER Experiment Name: At_Drought_Reproduction_P Parameter: Age (day) Value: 40
  misc_feature: MA Experiment 20001908 PARAMETER Experiment Name: At_Drought_Reproduction_P Parameter: Organism Value: A. thaliana
  misc_feature: MA Experiment 20001908 PARAMETER Experiment Name: At_Drought_Reproduction_P Parameter: Plant Line Value: WS
  misc_feature: MA Experiment 20001908 PARAMETER Experiment Name: At_Drought_Reproduction_P Parameter: Timepoint (day) Value: 10
  misc_feature: MA Experiment 20001908 PARAMETER Experiment Name: At_Drought_Reproduction_P Parameter: Tissue Value: Siliques
  misc_feature: MA Experiment 20001908 PARAMETER Experiment Name: At_Drought_Reproduction_P Parameter: Treatment Value: Drought vs. No Drought
  misc_feature: MA Experiment ID: 20001911 Result: Down-regulated in Transcription
  misc_feature: MA Experiment 20001911 PARAMETER Experiment Name: At_Drought_Reproduction_P Parameter: Age (day) Value: 40
  misc_feature: MA Experiment 20001911 PARAMETER Experiment Name: At_Drought_Reproduction_P Parameter: Organism Value: A. thaliana
  misc_feature: MA Experiment 20001911 PARAMETER Experiment Name: At_Drought_Reproduction_P Parameter: Plant Line Value: WS
  misc_feature: MA Experiment 20001911 PARAMETER Experiment Name: At_Drought_Reproduction_P Parameter: Timepoint (day) Value: 10
  misc_feature: MA Experiment 20001911 PARAMETER Experiment Name: At_Drought_Reproduction_P Parameter: Tissue Value: Flowers
  misc_feature: MA Experiment 20001911 PARAMETER Experiment Name: At_Drought_Reproduction_P Parameter: Treatment Value: Drought vs. No Drought
accaaaaattataactcaacacttcactaatcaattattcaaagcagataaaaaaaaaatggctcaagcagtgacttcgatggctggcttacgtggagcatctcaggctgtccttgaaggaagtttacagatcaacggctcaaaccgtttgaacatctcaagagtctcggttgggtctcagagaaccggacttgtgatcagggctcagcagaacgtgtcagtaccagaaagtagtcgccggtcagtgattggactcgtggcggctggtttagccggtggttcattcgttaaagctgttttcgccgaagctattccgatcaaagttggtggtcctccacttccttccggtggcctacctggaacagataactcagaccaagcaagagacttttcattggcattgaaagatagattttacatacaaccattgtcaccaacagaagctgcagctagagccaaagattctgctaaagagatcatcaacgttaagtcatttatcgacaaaaaagcttggccctatgttcagaacgatctccgtttaagagcatcgtacctccgttacgatctcaacaccgttatctccgctaagcctaaggaagagaagcaaagccttaaagatctcaccgcaaagcttttccaaaccattgacaacttggactatgcggcgagatcaaagagtagcccagatgctgagaagtattactcagaaactgtctcgagtttgaacaatgttcttgccaagctcggttaatgaagaaagacttgcgttgtaatctgttgatgtcgatgttattataattactgctatccaagtactttgtctttctccttctcttcttgtctgatcaaatcggttatctctaatttcagtttcaagttttaaccaatatattggctggctctttagc

SEQ ID NO: 25329 - protein, 249 aa, Arabidopsis thaliana
  peptide (1)..(249): Ceres Seq. ID no. 12466433
  misc_feature (49)..(249): Pfam Name: Oxygen evolving enhancer protein 3 (PsbQ) Pfam Description: Oxygen evolving enhancer protein 3 (PsbQ)
  misc_feature (20)..(248): Homolog of NCBI NO: 31096349 NR Description: oxygen-evolving enhancer protein 3 precursor
  misc_feature (20)..(249): Homolog of NCBI NO: 131397 NR Description: Oxygen-evolving enhancer protein 3, chloroplast (OEE3) (16 kDa subunit of oxygen evolving system of photosystem
  misc_feature (24)..(249): Homolog of NCBI NO: 4583542 NR Description: 16 kDa polypeptide of oxygen-evolving complex
  misc_feature (97)..(249): Homolog of NCBI NO: 11134066 NR Description: Oxygen-evolving enhancer protein 3-2, chloroplast (OEE3) (16 kDa subunit of oxygen evolving system of photosystem (OEC 16 kDa subunit) (Ferredoxin-NADP reductase binding protein)
  misc_feature (20)..(249): Homolog of NCBI NO: 11134057 NR Description: Oxygen-evolving enhancer protein 3-1, chloroplast (OEE3) (16 kDa subunit of oxygen evolving system of photosystem
  misc_feature (34)..(249): Homolog of NCBI NO: 11133850 NR Description: Oxygen-evolving enhancer protein 3, chloroplast (OEE3) (16 kDa subunit of oxygen evolving system of photosystem
  misc_feature (65)..(249): Homolog of NCBI NO: 34393258 NR Description: putative Oxygen-evolving enhancer protein 3-1,
  misc_feature (102)..(249): Homolog of NCBI NO: 34810268 NR Description: Chain A, Crystal Structure Of Psbq Polypeptide Of
  misc_feature (24)..(249): Homolog of NCBI NO: 15233587 NR Description: oxygen-evolving complex protein 16, chloroplast
  misc_feature (20)..(249): Homolog of NCBI NO: 15234637 NR Description: oxygen-evolving complex protein 16, chloroplast
PKIITQHFTNQLFKADKKKMAQAVTSMAGLRGASQAVLEGSLQINGSNRLNISRVSVGSQRTGLVIRAQQNVSVPESSRRSVIGLVAAGLAGGSFVKAVFAEAIPIKVGGPPLPSGGLPGTDNSDQARDFSLALKDRFYIQPLSPTEAAARAKDSAKEIINVKSFIDKKAWPYVQNDLRLRASYLRYDLNTVISAKPKEEKQSLKDLTAKLFQTIDNLDYAARSKSSPDAEKYYSETVSSLNNVLAKLG

SEQ ID NO: 25330 - protein, 230 aa, Arabidopsis thaliana
  peptide (1)..(230): Ceres Seq. ID no. 12466434
  misc_feature (30)..(230): Pfam Name: Oxygen evolving enhancer protein 3 (PsbQ) Pfam Description: Oxygen evolving enhancer protein 3 (PsbQ)
  misc_feature (83)..(230): Homolog of NCBI NO: 34810268 NR Description: Chain A, Crystal Structure Of Psbq Polypeptide Of
  misc_feature (78)..(230): Homolog of NCBI NO: 11134066 NR Description: Oxygen-evolving enhancer protein 3-2, chloroplast (OEE3) (16 kDa subunit of oxygen evolving system of photosystem (OEC 16 kDa subunit) (Ferredoxin-NADP reductase binding protein)
  misc_feature (46)..(230): Homolog of NCBI NO: 34393258 NR Description: putative Oxygen-evolving enhancer protein 3-1,
  misc_feature (1)..(230): Homolog of NCBI NO: 11134057 NR Description: Oxygen-evolving enhancer protein 3-1, chloroplast (OEE3) (16 kDa subunit of oxygen evolving system of photosystem
  misc_feature (15)..(230): Homolog of NCBI NO: 11133850 NR Description: Oxygen-evolving enhancer protein 3, chloroplast (OEE3) (16 kDa subunit of oxygen evolving system of photosystem
  misc_feature (1)..(229): Homolog of NCBI NO: 31096349 NR Description: oxygen-evolving enhancer protein 3 precursor
  misc_feature (1)..(230): Homolog of NCBI NO: 131397 NR Description: Oxygen-evolving enhancer protein 3, chloroplast (OEE3) (16 kDa subunit of oxygen evolving system of photosystem
  misc_feature (5)..(230): Homolog of NCBI NO: 4583542 NR Description: 16 kDa polypeptide of oxygen-evolving complex
  misc_feature (5)..(230): Homolog of NCBI NO: 15233587 NR Description: oxygen-evolving complex protein 16, chloroplast
  misc_feature (1)..(230): Homolog of NCBI NO: 15234637 NR Description: oxygen-evolving complex protein 16, chloroplast
MAQAVTSMAGLRGASQAVLEGSLQINGSNRLNISRVSVGSQRTGLVIRAQQNVSVPESSRRSVIGLVAAGLAGGSFVKAVFAEAIPIKVGGPPLPSGGLPGTDNSDQARDFSLALKDRFYIQPLSPTEAAARAKDSAKEIINVKSFIDKKAWPYVQNDLRLRASYLRYDLNTVISAKPKEEKQSLKDLTAKLFQTIDNLDYAARSKSSPDAEKYYSETVSSLNNVLAKLG

SEQ ID NO: 25331 - protein, 223 aa, Arabidopsis thaliana
  peptide (1)..(223): Ceres Seq. ID no. 12466435
  misc_feature (23)..(223): Pfam Name: Oxygen evolving enhancer protein 3 (PsbQ) Pfam Description: Oxygen evolving enhancer protein 3 (PsbQ)
  misc_feature (76)..(223): Homolog of NCBI NO: 34810268 NR Description: Chain A, Crystal Structure Of Psbq Polypeptide Of
  misc_feature (71)..(223): Homolog of NCBI NO: 11134066 NR Description: Oxygen-evolving enhancer protein 3-2, chloroplast (OEE3) (16 kDa subunit of oxygen evolving system of photosystem (OEC 16 kDa subunit) (Ferredoxin-NADP reductase binding protein)
  misc_feature (39)..(223): Homolog of NCBI NO: 34393258 NR Description: putative Oxygen-evolving enhancer protein 3-1,
  misc_feature (1)..(223): Homolog of NCBI NO: 11134057 NR Description: Oxygen-evolving enhancer protein 3-1, chloroplast (OEE3) (16 kDa subunit of oxygen evolving system of photosystem
  misc_feature (8)..(223): Homolog of NCBI NO: 11133850 NR Description: Oxygen-evolving enhancer protein 3, chloroplast (OEE3) (16 kDa subunit of oxygen evolving system of photosystem
  misc_feature (1)..(222): Homolog of NCBI NO: 31096349 NR Description: oxygen-evolving enhancer protein 3 precursor
  misc_feature (1)..(223): Homolog of NCBI NO: 131397 NR Description: Oxygen-evolving enhancer protein 3, chloroplast (OEE3) (16 kDa subunit of oxygen evolving system of photosystem
  misc_feature (1)..(223): Homolog of NCBI NO: 4583542 NR Description: 16 kDa polypeptide of oxygen-evolving complex
  misc_feature (1)..(223): Homolog of NCBI NO: 15233587 NR Description: oxygen-evolving complex protein 16, chloroplast
  misc_feature (1)..(223): Homolog of NCBI NO: 15234637 NR Description: oxygen-evolving complex protein 16, chloroplast
MAGLRGASQAVLEGSLQINGSNRLNISRVSVGSQRTGLVIRAQQNVSVPESSRRSVIGLVAAGLAGGSFVKAVFAEAIPIKVGGPPLPSGGLPGTDNSDQARDFSLALKDRFYIQPLSPTEAAARAKDSAKEIINVKSFIDKKAWPYVQNDLRLRASYLRYDLNTVISAKPKEEKQSLKDLTAKLFQTIDNLDYAARSKSSPDAEKYYSETVSSLNNVLAKLG

SEQ ID NO: 25332 - DNA, 803 bp, Arabidopsis thaliana
  misc_feature (1)..(803): Ceres Seq. ID no. 12396544
  misc_feature: MA Experiment ID: 108595 Result: Down-regulated in Transcription
  misc_feature: MA Experiment 108595 PARAMETER Experiment Name: At_Ler-pi_Ovule_cDNA_P Parameter: Plant Line Value: null
  misc_feature: MA Experiment ID: 20000179 Result: Up-regulated in Transcription
  misc_feature: MA Experiment 20000179 PARAMETER Experiment Name: At_Germinating_Seeds_P Parameter: Age (hr) Value: 6 vs. 0
  misc_feature: MA Experiment 20000179 PARAMETER Experiment Name: At_Germinating_Seeds_P Parameter: Tissue Value: Germinating Seeds
  misc_feature: MA Experiment ID: 20000180 Result: Up-regulated in Transcription
  misc_feature: MA Experiment 20000180 PARAMETER Experiment Name: At_Germinating_Seeds_P Parameter: Age (hr) Value: 24 vs. 0
  misc_feature: MA Experiment 20000180 PARAMETER Experiment Name: At_Germinating_Seeds_P Parameter: Tissue Value: Germinating Seeds
  misc_feature: MA Experiment ID: 20000185 Result: Down-regulated in Transcription
  misc_feature: MA Experiment 20000185 PARAMETER Experiment Name: At_Roots__P Parameter: Age (day) Value: 7 vs. 21
  misc_feature: MA Experiment 20000185 PARAMETER Experiment Name: At_Roots__P Parameter: Organism Value: A. thaliana
  misc_feature: MA Experiment 20000185 PARAMETER Experiment Name: At_Roots__P Parameter: Tissue Value: Roots vs. Whole Plant
  misc_feature: MA Experiment ID: 20000269 Result: Down-regulated in Transcription
  misc_feature: MA Experiment 20000269 PARAMETER Experiment Name: At_1mM_KNO3_L-vs-H_Roots_P Parameter: Age (day) Value: 7,10,12
  misc_feature: MA Experiment 20000269 PARAMETER Experiment Name: At_1mM_KNO3_L-vs-H_Roots_P Parameter: Organism Value: A. thaliana
  misc_feature: MA Experiment 20000269 PARAMETER Experiment Name: At_1mM_KNO3_L-vs-H_Roots_P Parameter: Plant Line Value: WS
  misc_feature: MA Experiment 20000269 PARAMETER Experiment Name: At_1mM_KNO3_L-vs-H_Roots_P Parameter: Timepoint (day) Value: 7,10,12
  misc_feature: MA Experiment 20000269 PARAMETER Experiment Name: At_1mM_KNO3_L-vs-H_Roots_P Parameter: Tissue Value: Roots
  misc_feature: MA Experiment 20000269 PARAMETER Experiment Name: At_1mM_KNO3_L-vs-H_Roots_P Parameter: Treatment Value: 1mM KNO3 vs. 50mM KNO3
  misc_feature: MA Experiment ID: 20000439 Result: Down-regulated in Transcription
  misc_feature: MA Experiment 20000439 PARAMETER Experiment Name: At_Roots__P Parameter: Age (day) Value: 14 vs. 21
  misc_feature: MA Experiment 20000439 PARAMETER Experiment Name: At_Roots__P Parameter: Organism Value: A. thaliana
  misc_feature: MA Experiment 20000439 PARAMETER Experiment Name: At_Roots__P Parameter: Tissue Value: Roots vs. Whole Plant
  misc_feature: MA Experiment ID: 20000794 Result: Down-regulated in Transcription
  misc_feature: MA Experiment 20000794 PARAMETER Experiment Name: At_Petals_P Parameter: Age (day) Value: 23-25 days
  misc_feature: MA Experiment 20000794 PARAMETER Experiment Name: At_Petals_P Parameter: Plant Line Value: WS
  misc_feature: MA Experiment 20000794 PARAMETER Experiment Name: At_Petals_P Parameter: Tissue Value: Petals vs. Whole plant
  misc_feature: MA Experiment ID: 20001905 Result: Down-regulated in Transcription
  misc_feature: MA Experiment 20001905 PARAMETER Experiment Name: At_Drought_Reproduction_P Parameter: Age (day) Value: 40
  misc_feature: MA Experiment 20001905 PARAMETER Experiment Name: At_Drought_Reproduction_P Parameter: Organism Value: A. thaliana
  misc_feature: MA Experiment 20001905 PARAMETER Experiment Name: At_Drought_Reproduction_P Parameter: Plant Line Value: WS
  misc_feature: MA Experiment 20001905 PARAMETER Experiment Name: At_Drought_Reproduction_P Parameter: Timepoint (day) Value: 10
  misc_feature: MA Experiment 20001905 PARAMETER Experiment Name: At_Drought_Reproduction_P Parameter: Tissue Value: Rosettes
  misc_feature: MA Experiment 20001905 PARAMETER Experiment Name: At_Drought_Reproduction_P Parameter: Treatment Value: Drought vs. No Drought
agaaccctagaattcgaaatctcccaagaacccgaaaaagcgccatgtcgctcactatcccgacgaatctcgttctcaacccgagatctaacaaatctctcactcaatccgtacctaaatcctccgcaagattcgtctgctccgatgacaaatcctcctcctccgcacctcaatccatgaaagctttctccgccgccgtcgccctctcttccatcctcctctctgctcctatgccagctgtcgctgatatctcaggtttgactccttgcaaggactcaaaacagttcgctaaaagagagaagcaacagatcaagaagcttgaatcttctcttaagctctacgctcctgaatctgcccctgctcttgctctcaatgctcagatcgagaaaaccaaacgcaggttcgacaactacgggaagtacggattgttatgcgggtcagacgggttaccgcacttgatagtgaacggagaccagcggcattggggagagttcattactccagggattcttttcctctacattgctggatggattgggtgggttggaagaagctacttaatagctattagtggtgagaagaaacccgcgatgaaagagatcatcatcgatgttcctttggctagtcggatcatcttccgtggtttcatttggcccgttgctgcctacagagagtttctcaatggtgatctcattgctaaggatgtttaaaaagggaacttgttttctgcttttgtgttactctctctaatctctttgttttccattgtacttattgaaaaacaatgcattgtcgaaaacctt

SEQ ID NO: 25333 - protein, 235 aa, Arabidopsis thaliana
  peptide (1)..(235): Ceres Seq. ID no. 12396545
  misc_feature (61)..(235): Pfam Name: Photosystem I reaction centre subunit III Pfam Description: Photosystem I reaction centre subunit III
  misc_feature (52)..(234): Homolog of NCBI NO: 34897038 NR Description: photosystem-1 F subunit precursor
  misc_feature (52)..(234): Homolog of NCBI NO: 3885892 NR Description: photosystem-1 F subunit precursor [Oryza sativa]
  misc_feature (15)..(231): Homolog of NCBI NO: 131187 NR Description: Photosystem I reaction centre subunit III,
  misc_feature (14)..(234): Homolog of NCBI NO: 548604 NR Description: Photosystem I reaction centre subunit III,
  misc_feature (15)..(231): Homolog of NCBI NO: 1172664 NR Description: Photosystem I reaction centre subunit III,
  misc_feature (15)..(231): Homolog of NCBI NO: 30013659 NR Description: putative photosystem I subunit III precursor
  misc_feature (15)..(235): Homolog of NCBI NO: 8954295 NR Description: photosystem I reaction center subunit III [Vigna
  misc_feature (15)..(235): Homolog of NCBI NO: 15450361 NR Description: At1g31330/T19E23_1 [Arabidopsis thaliana]
  misc_feature (15)..(235): Homolog of NCBI NO: 15221681 NR Description: photosystem I subunit III precursor, putative
  misc_feature (15)..(235): Homolog of NCBI NO: 5734518 NR Description: photosystem I subunit III precursor [Arabidopsis
NPRIRNLPRTRKSAMSLTIPTNLVLNPRSNKSLTQSVPKSSARFVCSDDKSSSSAPQSMKAFSAAVALSSILLSAPMPAVADISGLTPCKDSKQFAKREKQQIKKLESSLKLYAPESAPALALNAQIEKTKRRFDNYGKYGLLCGSDGLPHLIVNGDQRHWGEFITPGILFLYIAGWIGWVGRSYLIAISGEKKPAMKEIIIDVPLASRIIFRGFIWPVAAYREFLNGDLIAKDV

SEQ ID NO: 25334 - protein, 221 aa, Arabidopsis thaliana
  peptide (1)..(221): Ceres Seq. ID no. 12396546
  misc_feature (47)..(221): Pfam Name: Photosystem I reaction centre subunit III Pfam Description: Photosystem I reaction centre subunit III
  misc_feature (38)..(220): Homolog of NCBI NO: 34897038 NR Description: photosystem-1 F subunit precursor
  misc_feature (38)..(220): Homolog of NCBI NO: 3885892 NR Description: photosystem-1 F subunit precursor [Oryza sativa]
  misc_feature (1)..(217): Homolog of NCBI NO: 131187 NR Description: Photosystem I reaction centre subunit III,
  misc_feature (1)..(220): Homolog of NCBI NO: 548604 NR Description: Photosystem I reaction centre subunit III,
  misc_feature (1)..(217): Homolog of NCBI NO: 1172664 NR Description: Photosystem I reaction centre subunit III,
  misc_feature (1)..(217): Homolog of NCBI NO: 30013659 NR Description: putative photosystem I subunit III precursor
  misc_feature (1)..(221): Homolog of NCBI NO: 8954295 NR Description: photosystem I reaction center subunit III [Vigna
  misc_feature (1)..(221): Homolog of NCBI NO: 15450361 NR Description: At1g31330/T19E23_1 [Arabidopsis thaliana]
  misc_feature (1)..(221): Homolog of NCBI NO: 15221681 NR Description: photosystem I subunit III precursor, putative
  misc_feature (1)..(221): Homolog of NCBI NO: 5734518 NR Description: photosystem I subunit III precursor [Arabidopsis
MSLTIPTNLVLNPRSNKSLTQSVPKSSARFVCSDDKSSSSAPQSMKAFSAAVALSSILLSAPMPAVADISGLTPCKDSKQFAKREKQQIKKLESSLKLYAPESAPALALNAQIEKTKRRFDNYGKYGLLCGSDGLPHLIVNGDQRHWGEFITPGILFLYIAGWIGWVGRSYLIAISGEKKPAMKEIIIDVPLASRIIFRGFIWPVAAYREFLNGDLIAKDV

SEQ ID NO: 25335 - protein, 177 aa, Arabidopsis thaliana
  peptide (1)..(177): Ceres Seq. ID no. 12396547
  misc_feature (3)..(177): Pfam Name: Photosystem I reaction centre subunit III Pfam Description: Photosystem I reaction centre subunit III
  misc_feature (1)..(176): Homolog of NCBI NO: 34897038 NR Description: photosystem-1 F subunit precursor
  misc_feature (1)..(176): Homolog of NCBI NO: 3885892 NR Description: photosystem-1 F subunit precursor [Oryza sativa]
  misc_feature (1)..(173): Homolog of NCBI NO: 131187 NR Description: Photosystem I reaction centre subunit III,
  misc_feature (1)..(176): Homolog of NCBI NO: 548604 NR Description: Photosystem I reaction centre subunit III,
  misc_feature (1)..(173): Homolog of NCBI NO: 1172664 NR Description: Photosystem I reaction centre subunit III,
  misc_feature (1)..(173): Homolog of NCBI NO: 30013659 NR Description: putative photosystem I subunit III precursor
  misc_feature (1)..(177): Homolog of NCBI NO: 8954295 NR Description: photosystem I reaction center subunit III [Vigna
  misc_feature (1)..(177): Homolog of NCBI NO: 15450361 NR Description: At1g31330/T19E23_1 [Arabidopsis thaliana]
  misc_feature (1)..(177): Homolog of NCBI NO: 15221681 NR Description: photosystem I subunit III precursor, putative
  misc_feature (1)..(177): Homolog of NCBI NO: 5734518 NR Description: photosystem I subunit III precursor [Arabidopsis
MKAFSAAVALSSILLSAPMPAVADISGLTPCKDSKQFAKREKQQIKKLESSLKLYAPESAPALALNAQIEKTKRRFDNYGKYGLLCGSDGLPHLIVNGDQRHWGEFITPGILFLYIAGWIGWVGRSYLIAISGEKKPAMKEIIIDVPLASRIIFRGFIWPVAAYREFLNGDLIAKDV

SEQ ID NO: 25336 - DNA, 1226 bp, Arabidopsis thaliana
  misc_feature (1)..(1226): Ceres Seq. ID no. 12700607
  misc_feature: MA Experiment ID: 108594 Result: Down-regulated in Transcription
  misc_feature: MA Experiment 108594 PARAMETER Experiment Name: At_Ler-rhl_Root_cDNA_P Parameter: Plant Line Value: null
  misc_feature: MA Experiment ID: 20000185 Result: Up-regulated in Transcription
  misc_feature: MA Experiment 20000185 PARAMETER Experiment Name: At_Roots__P Parameter: Age (day) Value: 7 vs. 21
  misc_feature: MA Experiment 20000185 PARAMETER Experiment Name: At_Roots__P Parameter: Organism Value: A. thaliana
  misc_feature: MA Experiment 20000185 PARAMETER Experiment Name: At_Roots__P Parameter: Tissue Value: Roots vs. Whole Plant
  misc_feature: MA Experiment ID: 20000227 Result: Up-regulated in Transcription
  misc_feature: MA Experiment 20000227 PARAMETER Experiment Name: At_Root-Tips-vs-Tops_P Parameter: Tissue Value: Root Tips vs. Root Tops
  misc_feature: MA Experiment ID: 20000439 Result: Up-regulated in Transcription
  misc_feature: MA Experiment 20000439 PARAMETER Experiment Name: At_Roots__P Parameter: Age (day) Value: 14 vs. 21
  misc_feature: MA Experiment 20000439 PARAMETER Experiment Name: At_Roots__P Parameter: Organism Value: A. thaliana
  misc_feature: MA Experiment 20000439 PARAMETER Experiment Name: At_Roots__P Parameter: Tissue Value: Roots vs. Whole Plant
  misc_feature: MA Experiment ID: 20000451 Result: Down-regulated in Transcription
  misc_feature: MA Experiment 20000451 PARAMETER Experiment Name: At_CS6879_Shoots-Roots_P Parameter: Age (day) Value: 14
  misc_feature: MA Experiment 20000451 PARAMETER Experiment Name: At_CS6879_Shoots-Roots_P Parameter: Organism Value: A. thaliana
  misc_feature: MA Experiment 20000451 PARAMETER Experiment Name: At_CS6879_Shoots-Roots_P Parameter: Plant Line Value: CS6879 vs. WS
  misc_feature: MA Experiment 20000451 PARAMETER Experiment Name: At_CS6879_Shoots-Roots_P Parameter: Tissue Value: Roots
atggaggtcccaaaatcctcattgctaatgataatttttgtggtagcttcatgtttcttgcatgtcaaggcttggcatggtcagacttattgtggtggcaatgcgactccccgatgccagctccggtacatcgactgtcctgaagagtgccctaccgaaatgttccccaactctcagaacaaaatttgttgggttgattgctttaaacccctttgcgaggccgtgtgtcgggcggtaaaacccaactgcgaatcctatggatcaatttgtctagatccgaggttcataggtggtgatggaattgtgttctacttccatggaaagagcaatgaacattttagcattgtctcggaccctgactttcagatcaatgctaggttcactggtcatagacctgctggccgcactagagactttacatggatccaagctctcggcttcctctttaactcccacaaattctcccttgagaccaccaaagtcgccacttgggacagcaaccttgatcacctcaagttcactatcgacggccaagatttaattatccctcaagaaactttatccacttggtactcatccgacaaagacatcaagattgaaaggttgacagagaagaacagtgtgatcgtgactatcaaagacaaagctgagatcatggtcaacgtggttccagtgaccaaagaagatgatagaatccacaactacaaattacctgtagatgactgttttgcccattttgaggtccagttcaagtttattaatctgtccccaaaagtcgatggaatcttgggacgcacttatagacccgattttaagaatccggctaaaccaggagtcgtaatgccagtggtgggaggtgaagatagctttaggacatcttctctgctctctcatgtttgcaaaacttgtttgttctctgaagatcccgccgttgcgagtggctctgtcaagcccaaaagtacatacgcattgttagattgcagccgtggtgcgtcttccggctatggactcgtctgcagaaagtagttaccaatacaaactcagtttgctaagaattacagatattaaaagtatattgttatgttttgtgtacgtataaaatttatatgtttgtcaaaataaaacagaggaataaggtaattaagaaccaaattctaaagaaagtaattgtaactcagttatttacatgtaccagattatctaatccttaagaaaaccattatatt

SEQ ID NO: 25337 - protein, 341 aa, Arabidopsis thaliana
  peptide (1)..(341): Ceres Seq. ID no. 12700608
  misc_feature (49)..(341): Homolog of NCBI NO: 4514637 NR Description: root cap protein 2 [Zea mays]
  misc_feature (46)..(341): Homolog of NCBI NO: 30685319 NR Description: late embryogenesis abundant protein -related
  misc_feature (46)..(341): Homolog of NCBI NO: 11994465 NR Description: contains similarity to late embryogenesis
  misc_feature (9)..(341): Homolog of NCBI NO: 7484468 NR Description: late embryonic abundant protein EMB7 - white
  misc_feature (28)..(316): Homolog of NCBI NO: 15809990 NR Description: AT5g60530/muf9_180 [Arabidopsis thaliana]
  misc_feature (39)..(312): Homolog of NCBI NO: 15239359 NR Description: late embryonic abundant protein - like; protein
  misc_feature (28)..(316): Homolog of NCBI NO: 15239360 NR Description: late embryonic abundant protein - like
  misc_feature (11)..(341): Homolog of NCBI NO: 15221921 NR Description: late embryogenesis protein, putative; protein id:
  misc_feature (1)..(341): Homolog of NCBI NO: 15239629 NR Description: root cap protein 2-like protein; protein id:
  misc_feature (1)..(341): Homolog of NCBI NO: 15234120 NR Description: putative protein; protein id: At4g27400.1
MEVPKSSLLMIIFVVASCFLHVKAWHGQTYCGGNATPRCQLRYIDCPEECPTEMFPNSQNKICWVDCFKPLCEAVCRAVKPNCESYGSICLDPRFIGGDGIVFYFHGKSNEHFSIVSDPDFQINARFTGHRPAGRTRDFTWIQALGFLFNSHKFSLETTKVATWDSNLDHLKFTIDGQDLIIPQETLSTWYSSDKDIKIERLTEKNSVIVTIKDKAEIMVNVVPVTKEDDRIHNYKLPVDDCFAHFEVQFKFINLSPKVDGILGRTYRPDFKNPAKPGVVMPVVGGEDSFRTSSLLSHVCKTCLFSEDPAVASGSVKPKSTYALLDCSRGASSGYGLVCRK

SEQ ID NO: 25338 - protein, 332 aa, Arabidopsis thaliana
  peptide (1)..(332): Ceres Seq. ID no. 12700609
  misc_feature (1)..(332): Homolog of NCBI NO: 7484468 NR Description: late embryonic abundant protein EMB7 - white
  misc_feature (19)..(307): Homolog of NCBI NO: 15809990 NR Description: AT5g60530/muf9_180 [Arabidopsis thaliana]
  misc_feature (30)..(303): Homolog of NCBI NO: 15239359 NR Description: late embryonic abundant protein - like; protein
  misc_feature (19)..(307): Homolog of NCBI NO: 15239360 NR Description: late embryonic abundant protein - like
  misc_feature (2)..(332): Homolog of NCBI NO: 15221921 NR Description: late embryogenesis protein, putative; protein id:
  misc_feature (1)..(332): Homolog of NCBI NO: 15239629 NR Description: root cap protein 2-like protein; protein id:
  misc_feature (1)..(332): Homolog of NCBI NO: 15234120 NR Description: putative protein; protein id: At4g27400.1
  misc_feature (40)..(332): Homolog of NCBI NO: 4514637 NR Description: root cap protein 2 [Zea mays]
  misc_feature (37)..(332): Homolog of NCBI NO: 30685319 NR Description: late embryogenesis abundant protein -related
  misc_feature (37)..(332): Homolog of NCBI NO: 11994465 NR Description: contains similarity to late embryogenesis
MIIFVVASCFLHVKAWHGQTYCGGNATPRCQLRYIDCPEECPTEMFPNSQNKICWVDCFKPLCEAVCRAVKPNCESYGSICLDPRFIGGDGIVFYFHGKSNEHFSIVSDPDFQINARFTGHRPAGRTRDFTWIQALGFLFNSHKFSLETTKVATWDSNLDHLKFTIDGQDLIIPQETLSTWYSSDKDIKIERLTEKNSVIVTIKDKAEIMVNVVPVTKEDDRIHNYKLPVDDCFAHFEVQFKFINLSPKVDGILGRTYRPDFKNPAKPGVVMPVVGGEDSFRTSSLLSHVCKTCLFSEDPAVASGSVKPKSTYALLDCSRGASSGYGLVCRK

SEQ ID NO: 25339 - protein, 288 aa, Arabidopsis thaliana
  peptide (1)..(288): Ceres Seq. ID no. 12700610
  misc_feature (1)..(288): Homolog of NCBI NO: 4514637 NR Description: root cap protein 2 [Zea mays]
  misc_feature (1)..(288): Homolog of NCBI NO: 30685319 NR Description: late embryogenesis abundant protein -related
  misc_feature (1)..(288): Homolog of NCBI NO: 11994465 NR Description: contains similarity to late embryogenesis
  misc_feature (1)..(288): Homolog of NCBI NO: 7484468 NR Description: late embryonic abundant protein EMB7 - white
  misc_feature (1)..(263): Homolog of NCBI NO: 15809990 NR Description: AT5g60530/muf9_180 [Arabidopsis thaliana]
  misc_feature (1)..(259): Homolog of NCBI NO: 15239359 NR Description: late embryonic abundant protein - like; protein
  misc_feature (1)..(263): Homolog of NCBI NO: 15239360 NR Description: late embryonic abundant protein - like
  misc_feature (1)..(288): Homolog of NCBI NO: 15221921 NR Description: late embryogenesis protein, putative; protein id:
  misc_feature (1)..(288): Homolog of NCBI NO: 15239629 NR Description: root cap protein 2-like protein; protein id:
  misc_feature (1)..(288): Homolog of NCBI NO: 15234120 NR Description: putative protein; protein id: At4g27400.1
MFPNSQNKICWVDCFKPLCEAVCRAVKPNCESYGSICLDPRFIGGDGIVFYFHGKSNEHFSIVSDPDFQINARFTGHRPAGRTRDFTWIQALGFLFNSHKFSLETTKVATWDSNLDHLKFTIDGQDLIIPQETLSTWYSSDKDIKIERLTEKNSVIVTIKDKAEIMVNVVPVTKEDDRIHNYKLPVDDCFAHFEVQFKFINLSPKVDGILGRTYRPDFKNPAKPGVVMPVVGGEDSFRTSSLLSHVCKTCLFSEDPAVASGSVKPKSTYALLDCSRGASSGYGLVCRK

SEQ ID NO: 25340 - DNA, 1324 bp, Arabidopsis thaliana
  misc_feature (1)..(1324): Ceres Seq. ID no. 12395186
  misc_feature: MA Experiment ID: 108595 Result: Down-regulated in Transcription
  misc_feature: MA Experiment 108595 PARAMETER Experiment Name: At_Ler-pi_Ovule_cDNA_P Parameter: Plant Line Value: null
  misc_feature: MA Experiment ID: 108668 Result: Up-regulated in Transcription
  misc_feature: MA Experiment 108668 PARAMETER Experiment Name: At_2mM_SA_cDNA_P Parameter: Plant Line Value: WS
  misc_feature: MA Experiment 108668 PARAMETER Experiment Name: At_2mM_SA_cDNA_P Parameter: Timepoint (hr) Value: 6
  misc_feature: MA Experiment 108668 PARAMETER Experiment Name: At_2mM_SA_cDNA_P Parameter: Treatment Value: 2mM SA vs. No Treatment
  misc_feature: MA Experiment ID: 20000093 Result: Up-regulated in Transcription
  misc_feature: MA Experiment 20000093 PARAMETER Experiment Name: At_42deg_Heat_cDNA_P Parameter: Temperature (deg C) Value: 42 vs. 22
  misc_feature: MA Experiment 20000093 PARAMETER Experiment Name: At_42deg_Heat_cDNA_P Parameter: Timepoint (hr) Value: 0.5
  misc_feature: MA Experiment 20000093 PARAMETER Experiment Name: At_42deg_Heat_cDNA_P Parameter: Tissue Value: Aerial
  misc_feature: MA Experiment ID: 20000182 Result: Up-regulated in Transcription
  misc_feature: MA Experiment 20000182 PARAMETER Experiment Name: At_2mM_SA_P Parameter: Age (day) Value: 14
  misc_feature: MA Experiment 20000182 PARAMETER Experiment Name: At_2mM_SA_P Parameter: Organism Value: A. thaliana
  misc_feature: MA Experiment 20000182 PARAMETER Experiment Name: At_2mM_SA_P Parameter: Plant Line Value: WS
  misc_feature: MA Experiment 20000182 PARAMETER Experiment Name: At_2mM_SA_P Parameter: Timepoint (hr) Value: 6
  misc_feature: MA Experiment 20000182 PARAMETER Experiment Name: At_2mM_SA_P Parameter: Tissue Value: Aerial
  misc_feature: MA Experiment 20000182 PARAMETER Experiment Name: At_2mM_SA_P Parameter: Treatment Value: 2mM SA vs. No Treatment
  misc_feature: MA Experiment ID: 20000184 Result: Down-regulated in Transcription
  misc_feature: MA Experiment 20000184 PARAMETER Experiment Name: At_Shoots__P Parameter: Age (day) Value: 7
  misc_feature: MA Experiment 20000184 PARAMETER Experiment Name: At_Shoots__P Parameter: Tissue Value: Shoots vs. Whole Plant
  misc_feature: MA Experiment ID: 20001451 Result: Up-regulated in Transcription
  misc_feature: MA Experiment 20001451 PARAMETER Experiment Name: At_Far-red-induction_P Parameter: Age (day) Value: 7
  misc_feature: MA Experiment 20001451 PARAMETER Experiment Name: At_Far-red-induction_P Parameter: Light Value: Far-red vs. White
  misc_feature: MA Experiment 20001451 PARAMETER Experiment Name: At_Far-red-induction_P Parameter: Organism Value: A. thaliana
  misc_feature: MA Experiment 20001451 PARAMETER Experiment Name: At_Far-red-induction_P Parameter: Plant Line Value: Columbia
  misc_feature: MA Experiment 20001451 PARAMETER Experiment Name: At_Far-red-induction_P Parameter: Timepoint (hr) Value: 24
  misc_feature: MA Experiment 20001451 PARAMETER Experiment Name: At_Far-red-induction_P Parameter: Tissue Value: Whole Plant
ctatcgaaactctctctgacttgtttgtgttctctcaaatcctctgataagaatcaatggcgaaggaattagcagagaaagctaaagaagcttttctagatgatgacttcgatgttgctgttgacttatactccaaagccattgacttggatcccaattgcgccgccttcttcgccgatcgtgctcaggccaacatcaaaatcgataacttcactgaagctgttgtagatgcgaacaaagccattgagttggagccaacgttggcaaaagcctatctcagaaagggcactgcttgtatgaagctagaagaatatagtactgctaaagcagccctggaaaagggagcttctgttgcaccgaatgaaccaaagtttaagaagatgatagatgaatgcgatcttcgtattgcagaagaagagaaagatttggttcagccgatgccaccgagtttgccttcaagctctacaacaccactagcaacggaagctgatgctcctcctgttccaattcctgcagcacctgccaaaccgatgttcaggcacgagttctaccagaaaccagaagaagcggtggtgacaattttcgccaaaaaagtacctaaggagaacgtaactgtcgagtttggtgagcagattctgagtgttgtcattgatgttgctggagaggaagcttatcatctccagccgagattgttcgggaagataataccagagaagtgcagatttgaagtattgtcgaccaaagttgagatccgtcttgcgaaagcagagataatcacctgggcctcccttgaatatggtaaagggcaaagtgttttgcccaaacccaatgtctcatcagcgctgtcgcagagaccagtgtacccatcttctaagccagcaaaagactgggacaagttggaagctgaagtgaagaaacaggagaaggatgagaagcttgatggagatgcagctatgaacaaatttttcagcgacatatactcgagtgcagatgaagacatgaggcgggcaatgaacaaatcatttgcagagtcgaatgggacggtactgtcgacaaactggaaagaagttgggactaagaaagtggagagcactccaccagatggcatggagctcaagaagtgggagtattgatcttcttaaaatccccttttctggtttttgttaaaaaaaagtctgacaaatcttttgaacttttaaggtgtttttttttttggtttctgctcgaatttgtctctctccattcttgcgttgtggtctcaaagaacgttctgatactttgattttgtattagaaaactaaaactcgcaagtctgttgttttgg

SEQ ID NO: 25341 - protein, 358 aa, Arabidopsis thaliana
  peptide (1)..(358): Ceres Seq. ID no. 12395187
  misc_feature (158)..(245): Pfam Name: CS domain Pfam Description: CS domain
  misc_feature (78)..(357): Homolog of NCBI NO: 30524966 NR Description: SGT1-like protein [Arabidopsis thaliana]
  misc_feature (2)..(358): Homolog of NCBI NO: 6581058 NR Description: Sgt1 [Oryza sativa]
  misc_feature (2)..(358): Homolog of NCBI NO: 34912836 NR Description: Sgt1 [Oryza sativa (japonica cultivar-group)]
  misc_feature (2)..(358): Homolog of NCBI NO: 17017306 NR Description: SGT1 [Hordeum vulgare]
  misc_feature (1)..(357): Homolog of NCBI NO: 29468339 NR Description: SGT1 [Nicotiana benthamiana]
  misc_feature (1)..(357): Homolog of NCBI NO: 15236528 NR Description: phosphatase like protein
  misc_feature (1)..(357): Homolog of NCBI NO: 17017308 NR Description: SGT1a [Arabidopsis thaliana]
  misc_feature (1)..(358): Homolog of NCBI NO: 40974917 NR Description: SGT1-like protein [Brassica oleracea]
  misc_feature (1)..(358): Homolog of NCBI NO: 40974915 NR Description: SGT1-like protein [Brassica oleracea]
  misc_feature (1)..(358): Homolog of NCBI NO: 15237122 NR Description: putative protein
MAKELAEKAKEAFLDDDFDVAVDLYSKAIDLDPNCAAFFADRAQANIKIDNFTEAVVDANKAIELEPTLAKAYLRKGTACMKLEEYSTAKAALEKGASVAPNEPKFKKMIDECDLRIAEEEKDLVQPMPPSLPSSSTTPLATEADAPPVPIPAAPAKPMFRHEFYQKPEEAVVTIFAKKVPKENVTVEFGEQILSVVIDVAGEEAYHLQPRLFGKIIPEKCRFEVLSTKVEIRLAKAEIITWASLEYGKGQSVLPKPNVSSALSQRPVYPSSKPAKDWDKLEAEVKKQEKDEKLDGDAAMNKFFSDIYSSADEDMRRAMNKSFAESNGTVLSTNWKEVGTKKVESTPPDGMELKKWEY

SEQ ID NO: 25342 - protein, 278 aa, Arabidopsis thaliana
  peptide (1)..(278): Ceres Seq. ID no. 12395188
  misc_feature (78)..(165): Pfam Name: CS domain Pfam Description: CS domain
  misc_feature (1)..(277): Homolog of NCBI NO: 30524966 NR Description: SGT1-like protein [Arabidopsis thaliana]
  misc_feature (1)..(278): Homolog of NCBI NO: 6581058 NR Description: Sgt1 [Oryza sativa]
  misc_feature (1)..(278): Homolog of NCBI NO: 34912836 NR Description: Sgt1 [Oryza sativa (japonica cultivar-group)]
  misc_feature (1)..(278): Homolog of NCBI NO: 17017306 NR Description: SGT1 [Hordeum vulgare]
  misc_feature (1)..(277): Homolog of NCBI NO: 29468339 NR Description: SGT1 [Nicotiana benthamiana]
  misc_feature (1)..(277): Homolog of NCBI NO: 15236528 NR Description: phosphatase like protein
  misc_feature (1)..(277): Homolog of NCBI NO: 17017308 NR Description: SGT1a [Arabidopsis thaliana]
  misc_feature (1)..(278): Homolog of NCBI NO: 40974917 NR Description: SGT1-like protein [Brassica oleracea]
  misc_feature (1)..(278): Homolog of NCBI NO: 40974915 NR Description: SGT1-like protein [Brassica oleracea]
  misc_feature (1)..(278): Homolog of NCBI NO: 15237122 NR Description: putative protein
MKLEEYSTAKAALEKGASVAPNEPKFKKMIDECDLRIAEEEKDLVQPMPPSLPSSSTTPLATEADAPPVPIPAAPAKPMFRHEFYQKPEEAVVTIFAKKVPKENVTVEFGEQILSVVIDVAGEEAYHLQPRLFGKIIPEKCRFEVLSTKVEIRLAKAEIITWASLEYGKGQSVLPKPNVSSALSQRPVYPSSKPAKDWDKLEAEVKKQEKDEKLDGDAAMNKFFSDIYSSADEDMRRAMNKSFAESNGTVLSTNWKEVGTKKVESTPPDGMELKKWEY

SEQ ID NO: 25343 - protein, 250 aa, Arabidopsis thaliana
  peptide (1)..(250): Ceres Seq. ID no. 12395189
  misc_feature (50)..(137): Pfam Name: CS domain Pfam Description: CS domain
  misc_feature (1)..(249): Homolog of NCBI NO: 30524966 NR Description: SGT1-like protein [Arabidopsis thaliana]
  misc_feature (1)..(250): Homolog of NCBI NO: 6581058 NR Description: Sgt1 [Oryza sativa]
  misc_feature (1)..(250): Homolog of NCBI NO: 34912836 NR Description: Sgt1 [Oryza sativa (japonica cultivar-group)]
  misc_feature (1)..(250): Homolog of NCBI NO: 17017306 NR Description: SGT1 [Hordeum vulgare]
  misc_feature (1)..(249): Homolog of NCBI NO: 29468339 NR Description: SGT1 [Nicotiana benthamiana]
  misc_feature (1)..(249): Homolog of NCBI NO: 15236528 NR Description: phosphatase like protein
  misc_feature (1)..(249): Homolog of NCBI NO: 17017308 NR Description: SGT1a [Arabidopsis thaliana]
  misc_feature (1)..(250): Homolog of NCBI NO: 40974917 NR Description: SGT1-like protein [Brassica oleracea]
  misc_feature (1)..(250): Homolog of NCBI NO: 40974915 NR Description: SGT1-like protein [Brassica oleracea]
  misc_feature (1)..(250): Homolog of NCBI NO: 15237122 NR Description: putative protein
MIDECDLRIAEEEKDLVQPMPPSLPSSSTTPLATEADAPPVPIPAAPAKPMFRHEFYQKPEEAVVTIFAKKVPKENVTVEFGEQILSVVIDVAGEEAYHLQPRLFGKIIPEKCRFEVLSTKVEIRLAKAEIITWASLEYGKGQSVLPKPNVSSALSQRPVYPSSKPAKDWDKLEAEVKKQEKDEKLDGDAAMNKFFSDIYSSADEDMRRAMNKSFAESNGTVLSTNWKEVGTKKVESTPPDGMELKKWEY

SEQ ID NO: 25344 - DNA, 1519 bp, Arabidopsis thaliana
  misc_feature (1)..(1519): Ceres Seq. ID no. 12322059
  misc_feature: MA Experiment ID: 108462 Result: Up-regulated in Transcription
  misc_feature: MA Experiment 108462 PARAMETER Experiment Name: At_Germinating_Seeds_cDNA_P Parameter: Age (day) Value: 2 vs. 0
  misc_feature: MA Experiment 108462 PARAMETER Experiment Name: At_Germinating_Seeds_cDNA_P Parameter: Tissue Value: Germinating Seeds
  misc_feature: MA Experiment ID: 108464 Result: Up-regulated in Transcription
  misc_feature: MA Experiment 108464 PARAMETER Experiment Name: At_Germinating_Seeds_cDNA_P Parameter: Age (day) Value: 4 vs. 0
  misc_feature: MA Experiment 108464 PARAMETER Experiment Name: At_Germinating_Seeds_cDNA_P Parameter: Tissue Value: Germinating Seeds
  misc_feature: MA Experiment ID: 108488 Result: Up-regulated in Transcription
  misc_feature: MA Experiment ID: 108489 Result: Up-regulated in Transcription
  misc_feature: MA Experiment ID: 108594 Result: Down-regulated in Transcription
  misc_feature: MA Experiment 108594 PARAMETER Experiment Name: At_Ler-rhl_Root_cDNA_P Parameter: Plant Line Value: null
  misc_feature: MA Experiment ID: 20000111 Result: Down-regulated in Transcription
  misc_feature: MA Experiment 20000111 PARAMETER Experiment Name: At_42deg_Heat_cDNA_P Parameter: Temperature (deg C) Value: 42 vs. 22
  misc_feature: MA Experiment 20000111 PARAMETER Experiment Name: At_42deg_Heat_cDNA_P Parameter: Timepoint (hr) Value: 6
  misc_feature: MA Experiment 20000111 PARAMETER Experiment Name: At_42deg_Heat_cDNA_P Parameter: Tissue Value: Aerial
  misc_feature: MA Experiment ID: 20000113 Result: Down-regulated in Transcription
  misc_feature: MA Experiment 20000113 PARAMETER Experiment Name: At_42deg_Heat_cDNA_P Parameter: Temperature (deg C) Value: 42 vs. 22
  misc_feature: MA Experiment 20000113 PARAMETER Experiment Name: At_42deg_Heat_cDNA_P Parameter: Timepoint (hr) Value: 8
  misc_feature: MA Experiment 20000113 PARAMETER Experiment Name: At_42deg_Heat_cDNA_P Parameter: Tissue Value: Aerial
  misc_feature: MA Experiment ID: 20000306 Result: Up-regulated in Transcription
  misc_feature: MA Experiment 20000306 PARAMETER Experiment Name: At_Germinating_Seeds_Sub_P Parameter: Age (hr) Value: 6 vs. 0
  misc_feature: MA Experiment 20000306 PARAMETER Experiment Name: At_Germinating_Seeds_Sub_P Parameter: Organism Value: A. thaliana
  misc_feature: MA Experiment 20000306 PARAMETER Experiment Name: At_Germinating_Seeds_Sub_P Parameter: Plant Line Value: WS
  misc_feature: MA Experiment 20000306 PARAMETER Experiment Name: At_Germinating_Seeds_Sub_P Parameter: Tissue Value: Germinating Seeds
  misc_feature: MA Experiment ID: 20000307 Result: Up-regulated in Transcription
  misc_feature: MA Experiment 20000307 PARAMETER Experiment Name: At_Germinating_Seeds_Sub_P Parameter: Age (hr) Value: 24 vs. 0
  misc_feature: MA Experiment 20000307 PARAMETER Experiment Name: At_Germinating_Seeds_Sub_P Parameter: Organism Value: A. thaliana
  misc_feature: MA Experiment 20000307 PARAMETER Experiment Name: At_Germinating_Seeds_Sub_P Parameter: Plant Line Value: WS
  misc_feature: MA Experiment 20000307 PARAMETER Experiment Name: At_Germinating_Seeds_Sub_P Parameter: Tissue Value: Germinating Seeds
  misc_feature: MA Experiment ID: 20000314 Result: Up-regulated in Transcription
  misc_feature: MA Experiment 20000314 PARAMETER Experiment Name: At_14day_Shoots-Roots_Sub_P Parameter: Age (day) Value: 14
  misc_feature: MA Experiment 20000314 PARAMETER Experiment Name: At_14day_Shoots-Roots_Sub_P Parameter: Organism Value: A. thaliana
  misc_feature: MA Experiment 20000314 PARAMETER Experiment Name: At_14day_Shoots-Roots_Sub_P Parameter: Plant Line Value: WS
  misc_feature: MA Experiment 20000314 PARAMETER Experiment Name: At_14day_Shoots-Roots_Sub_P Parameter: Tissue Value: Roots vs. Whole Plant
  misc_feature: MA Experiment ID: 20000327 Result: Down-regulated in Transcription
  misc_feature: MA Experiment 20000327 PARAMETER Experiment Name: At_42deg_Heat_Sub_P Parameter: Age (day) Value: 14
  misc_feature: MA Experiment 20000327 PARAMETER Experiment Name: At_42deg_Heat_Sub_P Parameter: Organism Value: A. thaliana
  misc_feature: MA Experiment 20000327 PARAMETER Experiment Name: At_42deg_Heat_Sub_P Parameter: Plant Line Value: WS
  misc_feature: MA Experiment 20000327 PARAMETER Experiment Name: At_42deg_Heat_Sub_P Parameter: Temperature (deg C) Value: 42 vs. 22
  misc_feature: MA Experiment 20000327 PARAMETER Experiment Name: At_42deg_Heat_Sub_P Parameter: Timepoint (hr) Value: 1
  misc_feature: MA Experiment 20000327 PARAMETER Experiment Name: At_42deg_Heat_Sub_P Parameter: Tissue Value: Aerial
  misc_feature: MA Experiment ID: 20001806 Result: Up-regulated in Transcription
  misc_feature: MA Experiment 20001806 PARAMETER Experiment Name: At_50mM_NH4NO3_L-to-H_Sub_P Parameter: Timepoint (hr) Value: 4
  misc_feature: MA Experiment 20001806 PARAMETER Experiment Name: At_50mM_NH4NO3_L-to-H_Sub_P Parameter: Tissue Value: Leaf
  misc_feature: MA Experiment 20001806 PARAMETER Experiment Name: At_50mM_NH4NO3_L-to-H_Sub_P Parameter: Treatment Value: 50mM NH4NO3 vs 100mM Mannitol
  misc_feature: MA Experiment ID: 20001807 Result: Up-regulated in Transcription
  misc_feature: MA Experiment 20001807 PARAMETER Experiment Name: At_50mM_NH4NO3_L-to-H_Sub_P Parameter: Timepoint (hr) Value: 6
  misc_feature: MA Experiment 20001807 PARAMETER Experiment Name: At_50mM_NH4NO3_L-to-H_Sub_P Parameter: Tissue Value: Leaf
  misc_feature: MA Experiment 20001807 PARAMETER Experiment Name: At_50mM_NH4NO3_L-to-H_Sub_P Parameter: Treatment Value: 50mM NH4NO3 vs 100mM Mannitol
aattaattaattaagaagtctgagagcgtcagttggaggagtccaaaagaggagaagaaggaagcttggcctttgaggagattcaaaggatcgtgttgcttactgtatttaaaaaccctagagttcatcatcatcttcctctcattattgattgctctaatcaggttccgacgagactaataatcctttctcagatcgataacaatgtctcactctgctgtttctcaggctggtgctgtctcagtttcaattgaaaaccaacgttctcttagaagatccgtcttcaagcagaacaatagcataagcttcaacagcaagtcatggtcatcttctttagcattgaaccagaagacaacaagcataagagatgggaaacggtacccgagcacgacaatatgtatgtcggttcaacaaacaagtagttccaaggttactgtctctcctatagagttggaagaccctaaggatcctcctttgaacttgtacaaacccaaggagtcttacaccgctaagattgtctctgtggagcgagtagttggcccgaaagcccctggagaaacttgtcatatcgtcatcgatcatgatggtaaccttccttactgggaaggacagagttacggtgtgattcctccaggtgagaacccgaagaaaccgggagcgccacacaatgtgcgcctttactcaattgcatcaacaaggtacggagatttctttgacggtaaaacagcgagtttgtgtgtacgtagagctgtttattacgaccctgagactggaaaagaagatccttcaaagaacggagtctgcagcaacttcctatgtgattcaaagcccggtgacaagattcaaatcaccggtccatctgggaaggtaatgctattacccgagagtgatccaaacgcgacacacataatgatagccacgggaacaggagtggctccatacagaggctacttacgtcgaatgttcatggaaaacgtcccaaacaagacatttagcggcttagcttggctcttcttaggcgtggccaacaccgatagccttctctatgacgaagagtttaccaagtacctaaaagaccatccagacaactttaggttcgacaaggcattgagcagagaggagaagaacaagaaaggtggaaagatgtacgtgcaggacaagattgaagaatatagtgatgagatcttcaagcttttggacaatggagctcatatttacttctgtgggcttaaaggaatgatgcctgggattcaagatacacttaagagagttgcagaagagagaggtgagagctgggacttgaagctttctcagctcaggaagaacaagcagtggcacgttgaagtctattgagctctttatttgtatttgctgtttttgatttttgatttaagaatcgtaataaatttgaatttggtgtttttctacttttcaaacatgatatgatgataatatctgaaatttgttggttttgagaagagaatattctcagagaataatcaatatatcatttatgtaa

SEQ ID NO: 25345 - protein, 382 aa, Arabidopsis thaliana
  peptide (1)..(382): Ceres Seq. ID no. 12322060
  misc_feature (231)..(352): Pfam Name: Oxidoreductase NAD-binding domain Pfam Description: Oxidoreductase NAD-binding domain
  misc_feature (24)..(382): Homolog of NCBI NO: 22530948 NR Description: ferredoxin--NADP+ reductase-like protein
  misc_feature (24)..(382): Homolog of NCBI NO: 21592875 NR Description: ferredoxin--NADP+ reductase-like protein
  misc_feature (29)..(382): Homolog of NCBI NO: 25285860 NR Description: ferredoxin-NADP+ reductase-like protein
  misc_feature (1)..(382): Homolog of NCBI NO: 3913650 NR Description: Ferredoxin--NADP reductase, root-type isozyme,
  misc_feature (24)..(382): Homolog of NCBI NO: 18412939 NR Description: ferredoxin--NADP+ reductase - like protein
  misc_feature (1)..(382): Homolog of NCBI NO: 3913648 NR Description: Ferredoxin--NADP reductase, root isozyme,
  misc_feature (1)..(382): Homolog of NCBI NO: 7433380 NR Description: ferredoxin-NADP reductase (EC 1.18.1.2) - garden
  misc_feature (1)..(382): Homolog of NCBI NO: 21593597 NR Description: ferrodoxin NADP oxidoreductase, putative
  misc_feature (1)..(382): Homolog of NCBI NO: 18397542 NR Description: ferrodoxin NADP oxidoreductase, putative
  misc_feature (1)..(382): Homolog of NCBI NO: 30691910 NR Description: ferredoxin--NADP(+) reductase (adrenodoxin
MSHSAVSQAGAVSVSIENQRSLRRSVFKQNNSISFNSKSWSSSLALNQKTTSIRDGKRYPSTTICMSVQQTSSSKVTVSPIELEDPKDPPLNLYKPKESYTAKIVSVERVVGPKAPGETCHIVIDHDGNLPYWEGQSYGVIPPGENPKKPGAPHNVRLYSIASTRYGDFFDGKTASLCVRRAVYYDPETGKEDPSKNGVCSNFLCDSKPGDKIQITGPSGKVMLLPESDPNATHIMIATGTGVAPYRGYLRRMFMENVPNKTFSGLAWLFLGVANTDSLLYDEEFTKYLKDHPDNFRFDKALSREEKNKKGGKMYVQDKIEEYSDEIFKLLDNGAHIYFCGLKGMMPGIQDTLKRVAEERGESWDLKLSQLRKNKQWHVEVY

SEQ ID NO: 25346 - protein, 317 aa, Arabidopsis thaliana
  peptide (1)..(317): Ceres Seq. ID no. 12322061
  misc_feature (166)..(287): Pfam Name: Oxidoreductase NAD-binding domain Pfam Description: Oxidoreductase NAD-binding domain
  misc_feature (1)..(317): Homolog of NCBI NO: 22530948 NR Description: ferredoxin--NADP+ reductase-like protein
  misc_feature (1)..(317): Homolog of NCBI NO: 21592875 NR Description: ferredoxin--NADP+ reductase-like protein
  misc_feature (1)..(317): Homolog of NCBI NO: 25285860 NR Description: ferredoxin-NADP+ reductase-like protein
  misc_feature (1)..(317): Homolog of NCBI NO: 3913650 NR Description: Ferredoxin--NADP reductase, root-type isozyme,
  misc_feature (1)..(317): Homolog of NCBI NO: 18412939 NR Description: ferredoxin--NADP+ reductase - like protein
  misc_feature (1)..(317): Homolog of NCBI NO: 3913648 NR Description: Ferredoxin--NADP reductase, root isozyme,
  misc_feature (1)..(317): Homolog of NCBI NO: 7433380 NR Description: ferredoxin-NADP reductase (EC 1.18.1.2) - garden
  misc_feature (1)..(317): Homolog of NCBI NO: 21593597 NR Description: ferrodoxin NADP oxidoreductase, putative
  misc_feature (1)..(317): Homolog of NCBI NO: 18397542 NR Description: ferrodoxin NADP oxidoreductase, putative
  misc_feature (1)..(317): Homolog of NCBI NO: 30691910 NR Description: ferredoxin--NADP(+) reductase (adrenodoxin
MSVQQTSSSKVTVSPIELEDPKDPPLNLYKPKESYTAKIVSVERVVGPKAPGETCHIVIDHDGNLPYWEGQSYGVIPPGENPKKPGAPHNVRLYSIASTRYGDFFDGKTASLCVRRAVYYDPETGKEDPSKNGVCSNFLCDSKPGDKIQITGPSGKVMLLPESDPNATHIMIATGTGVAPYRGYLRRMFMENVPNKTFSGLAWLFLGVANTDSLLYDEEFTKYLKDHPDNFRFDKALSREEKNKKGGKMYVQDKIEEYSDEIFKLLDNGAHIYFCGLKGMMPGIQDTLKRVAEERGESWDLKLSQLRKNKQWHVEVY

SEQ ID NO: 25347 - DNA, 980 bp, Arabidopsis thaliana
  misc_feature (1)..(980): Ceres Seq. ID no. 13497471
  misc_feature: MA Experiment ID: 108435 Result: Up-regulated in Transcription
  misc_feature: MA Experiment 108435 PARAMETER Experiment Name: At_stm_Mutants_cDNA_P Parameter: Plant Line Value: wt Landsburg vs stm
  misc_feature: MA Experiment 108435 PARAMETER Experiment Name: At_stm_Mutants_cDNA_P Parameter: Tissue Value: Shoot Apical Meristem Region
  misc_feature: MA Experiment ID: 108461 Result: Up-regulated in Transcription
  misc_feature: MA Experiment 108461 PARAMETER Experiment Name: At_Germinating_Seeds_cDNA_P Parameter: Age (day) Value: 1 vs. 0
  misc_feature: MA Experiment 108461 PARAMETER Experiment Name: At_Germinating_Seeds_cDNA_P Parameter: Tissue Value: Germinating Seeds
  misc_feature: MA Experiment ID: 108462 Result: Up-regulated in Transcription
  misc_feature: MA Experiment 108462 PARAMETER Experiment Name: At_Germinating_Seeds_cDNA_P Parameter: Age (day) Value: 2 vs. 0
  misc_feature: MA Experiment 108462 PARAMETER Experiment Name: At_Germinating_Seeds_cDNA_P Parameter: Tissue Value: Germinating Seeds
  misc_feature: MA Experiment ID: 108463 Result: Up-regulated in Transcription
  misc_feature: MA Experiment 108463 PARAMETER Experiment Name: At_Germinating_Seeds_cDNA_P Parameter: Age (day) Value: 3 vs. 0
  misc_feature: MA Experiment 108463 PARAMETER Experiment Name: At_Germinating_Seeds_cDNA_P Parameter: Tissue Value: Germinating Seeds
  misc_feature: MA Experiment ID: 108464 Result: Up-regulated in Transcription
  misc_feature: MA Experiment 108464 PARAMETER Experiment Name: At_Germinating_Seeds_cDNA_P Parameter: Age (day) Value: 4 vs. 0
  misc_feature: MA Experiment 108464 PARAMETER Experiment Name: At_Germinating_Seeds_cDNA_P Parameter: Tissue Value: Germinating Seeds
  misc_feature: MA Experiment ID: 108489 Result: Down-regulated in Transcription
  misc_feature: MA Experiment ID: 108573 Result: Down-regulated in Transcription
  misc_feature: MA Experiment 108573 PARAMETER Experiment Name: At_Drought_cDNA_P Parameter: Timepoint (hr) Value: 6
  misc_feature: MA Experiment 108573 PARAMETER Experiment Name: At_Drought_cDNA_P Parameter: Tissue Value: Aerial
  misc_feature: MA Experiment 108573 PARAMETER Experiment Name: At_Drought_cDNA_P Parameter: Treatment Value: Drought vs. No Drought
  misc_feature: MA Experiment ID: 108579 Result: Up-regulated in Transcription
  misc_feature: MA Experiment 108579 PARAMETER Experiment Name: At_4deg_Cold_cDNA_P Parameter: Temperature (deg C) Value: 4 vs. 22
  misc_feature: MA Experiment 108579 PARAMETER Experiment Name: At_4deg_Cold_cDNA_P Parameter: Timepoint (hr) Value: 6
  misc_feature: MA Experiment 108579 PARAMETER Experiment Name: At_4deg_Cold_cDNA_P Parameter: Tissue Value: Aerial
  misc_feature: MA Experiment ID: 108595 Result: Up-regulated in Transcription
  misc_feature: MA Experiment 108595 PARAMETER Experiment Name: At_Ler-pi_Ovule_cDNA_P Parameter: Plant Line Value: null
  misc_feature: MA Experiment ID: 108607 Result: Up-regulated in Transcription
  misc_feature: MA Experiment 108607 PARAMETER Experiment Name: At_100uM_ABA_cDNA_P Parameter: Timepoint (hr) Value: 4
  misc_feature: MA Experiment 108607 PARAMETER Experiment Name: At_100uM_ABA_cDNA_P Parameter: Tissue Value: Aerial
  misc_feature: MA Experiment 108607 PARAMETER Experiment Name: At_100uM_ABA_cDNA_P Parameter: Treatment Value: 100uM ABA vs. No Treatment
  misc_feature: MA Experiment ID: 20000069 Result: Down-regulated in Transcription
  misc_feature: MA Experiment 20000069 PARAMETER Experiment Name: At_100uM_ABA_Mutants_cDNA_P Parameter: Plant Line Value: CS23
  misc_feature: MA Experiment 20000069 PARAMETER Experiment Name: At_100uM_ABA_Mutants_cDNA_P Parameter: Timepoint (hr) Value: 6
  misc_feature: MA Experiment 20000069 PARAMETER Experiment Name: At_100uM_ABA_Mutants_cDNA_P Parameter: Tissue Value: Aerial
  misc_feature: MA Experiment 20000069 PARAMETER Experiment Name: At_100uM_ABA_Mutants_cDNA_P Parameter: Treatment Value: 100uM ABA vs. No Treatment
  misc_feature: MA Experiment ID: 20000070 Result: Down-regulated in Transcription
  misc_feature: MA Experiment 20000070 PARAMETER Experiment Name: At_100uM_ABA_Mutants_cDNA_P Parameter: Plant Line Value: CS24
  misc_feature: MA Experiment 20000070 PARAMETER Experiment Name: At_100uM_ABA_Mutants_cDNA_P Parameter: Timepoint (hr) Value: 6
  misc_feature: MA Experiment 20000070 PARAMETER Experiment Name: At_100uM_ABA_Mutants_cDNA_P Parameter: Tissue Value: Aerial
  misc_feature: MA Experiment 20000070 PARAMETER Experiment Name: At_100uM_ABA_Mutants_cDNA_P Parameter: Treatment Value: 100uM ABA vs. No Treatment
  misc_feature: MA Experiment ID: 20000071 Result: Down-regulated in Transcription
  misc_feature: MA Experiment 20000071 PARAMETER Experiment Name: At_100uM_ABA_Mutants_cDNA_P Parameter: Plant Line Value: CS8104
  misc_feature: MA Experiment 20000071 PARAMETER Experiment Name: At_100uM_ABA_Mutants_cDNA_P Parameter: Timepoint (hr) Value: 6
  misc_feature: MA Experiment 20000071 PARAMETER Experiment Name: At_100uM_ABA_Mutants_cDNA_P Parameter: Tissue Value: Aerial
  misc_feature: MA Experiment 20000071 PARAMETER Experiment Name: At_100uM_ABA_Mutants_cDNA_P Parameter: Treatment Value: 100uM ABA vs. No Treatment
  misc_feature: MA Experiment ID: 20000086 Result: Down-regulated in Transcription
  misc_feature: MA Experiment 20000086 PARAMETER Experiment Name: At_100uM_ABA_Mutants_cDNA_P Parameter: Plant Line Value: CS22
  misc_feature: MA Experiment 20000086 PARAMETER Experiment Name: At_100uM_ABA_Mutants_cDNA_P Parameter: Timepoint (hr) Value: 6
  misc_feature: MA Experiment 20000086 PARAMETER Experiment Name: At_100uM_ABA_Mutants_cDNA_P Parameter: Tissue Value: Aerial
  misc_feature: MA Experiment 20000086 PARAMETER Experiment Name: At_100uM_ABA_Mutants_cDNA_P Parameter: Treatment Value: 100uM ABA vs. No Treatment
  misc_feature: MA Experiment ID: 20000088 Result: Down-regulated in Transcription
  misc_feature: MA Experiment 20000088 PARAMETER Experiment Name: At_100uM_ABA_Mutants_cDNA_P Parameter: Plant Line Value: Landsberg
  misc_feature: MA Experiment 20000088 PARAMETER Experiment Name: At_100uM_ABA_Mutants_cDNA_P Parameter: Timepoint (hr) Value: 6
  misc_feature: MA Experiment 20000088 PARAMETER Experiment Name: At_100uM_ABA_Mutants_cDNA_P Parameter: Tissue Value: Aerial
  misc_feature: MA Experiment 20000088 PARAMETER Experiment Name: At_100uM_ABA_Mutants_cDNA_P Parameter: Treatment Value: 100uM ABA vs. No Treatment
  misc_feature: MA Experiment ID: 20000089 Result: Down-regulated in Transcription
  misc_feature: MA Experiment ID: 20000090 Result: Down-regulated in Transcription
  misc_feature: MA Experiment ID: 20000117 Result: Down-regulated in Transcription
  misc_feature: MA Experiment 20000117 PARAMETER Experiment Name: At_100uM_ABA_Mutants_cDNA_P Parameter: Plant Line Value: Columbia
  misc_feature: MA Experiment 20000117 PARAMETER Experiment Name: At_100uM_ABA_Mutants_cDNA_P Parameter: Timepoint (hr) Value: 6
  misc_feature: MA Experiment 20000117 PARAMETER Experiment Name: At_100uM_ABA_Mutants_cDNA_P Parameter: Tissue Value: Aerial
  misc_feature: MA Experiment 20000117 PARAMETER Experiment Name: At_100uM_ABA_Mutants_cDNA_P Parameter: Treatment Value: 100uM ABA vs. No Treatment
  misc_feature: MA Experiment ID: 20000179 Result: Up-regulated in Transcription
  misc_feature: MA Experiment 20000179 PARAMETER Experiment Name: At_Germinating_Seeds_P Parameter: Age (hr) Value: 6 vs. 0
  misc_feature: MA Experiment 20000179 PARAMETER Experiment Name: At_Germinating_Seeds_P Parameter: Tissue Value: Germinating Seeds
  misc_feature: MA Experiment ID: 20000180 Result: Up-regulated in Transcription
  misc_feature: MA Experiment 20000180 PARAMETER Experiment Name: At_Germinating_Seeds_P Parameter: Age (hr) Value: 24 vs. 0
  misc_feature: MA Experiment 20000180 PARAMETER Experiment Name: At_Germinating_Seeds_P Parameter: Tissue Value: Germinating Seeds
  misc_feature: MA Experiment ID: 20000184 Result: Up-regulated in Transcription
  misc_feature: MA Experiment 20000184 PARAMETER Experiment Name: At_Shoots__P Parameter: Age (day) Value: 7
  misc_feature: MA Experiment 20000184 PARAMETER Experiment Name: At_Shoots__P Parameter: Tissue Value: Shoots vs. Whole Plant
  misc_feature: MA Experiment ID: 20000185 Result: Up-regulated in Transcription
  misc_feature: MA Experiment 20000185 PARAMETER Experiment Name: At_Roots__P Parameter: Age (day) Value: 7 vs. 21
  misc_feature: MA Experiment 20000185 PARAMETER Experiment Name: At_Roots__P Parameter: Organism Value: A. thaliana
  misc_feature: MA Experiment 20000185 PARAMETER Experiment Name: At_Roots__P Parameter: Tissue Value: Roots vs. Whole Plant
  misc_feature: MA Experiment ID: 20000224 Result: Up-regulated in Transcription
  misc_feature: MA Experiment ID: 20000234 Result: Up-regulated in Transcription
  misc_feature: MA Experiment 20000234 PARAMETER Experiment Name: At_Siliques_P Parameter: Age (day) Value: 21
  misc_feature: MA Experiment 20000234 PARAMETER Experiment Name: At_Siliques_P Parameter: Organism Value: A. thaliana
  misc_feature: MA Experiment 20000234 PARAMETER Experiment Name: At_Siliques_P Parameter: Plant Line Value: WS
  misc_feature: MA Experiment 20000234 PARAMETER Experiment Name: At_Siliques_P Parameter: Tissue Value: Less Than 5mm Siliques vs. Whole Plant
  misc_feature: MA Experiment ID: 20000235 Result: Up-regulated in Transcription
  misc_feature: MA Experiment 20000235 PARAMETER Experiment Name: At_Siliques_P Parameter: Age (day) Value: 21
  misc_feature: MA Experiment 20000235 PARAMETER Experiment Name: At_Siliques_P Parameter: Organism Value: A. thaliana
  misc_feature: MA Experiment 20000235 PARAMETER Experiment Name: At_Siliques_P Parameter: Plant Line Value: WS
  misc_feature: MA Experiment 20000235 PARAMETER Experiment Name: At_Siliques_P Parameter: Tissue Value: 5-10mm Siliques vs. Whole Plant
  misc_feature: MA Experiment ID: 20000264 Result: Up-regulated in Transcription
  misc_feature: MA Experiment 20000264 PARAMETER Experiment Name: At_Open_Flower_P Parameter: Age (day) Value: 21
  misc_feature: MA Experiment 20000264 PARAMETER Experiment Name: At_Open_Flower_P Parameter: Plant Line Value: WS
  misc_feature: MA Experiment 20000264 PARAMETER Experiment Name: At_Open_Flower_P Parameter: Tissue Value: Open Flower vs. Whole Plant
  misc_feature: MA Experiment ID: 20000265 Result: Up-regulated in Transcription
  misc_feature: MA Experiment 20000265 PARAMETER Experiment Name: At_Open_Flower_P Parameter: Age (day) Value: 21
  misc_feature: MA Experiment 20000265 PARAMETER Experiment Name: At_Open_Flower_P Parameter: Plant Line Value: WS
  misc_feature: MA Experiment 20000265 PARAMETER Experiment Name: At_Open_Flower_P Parameter: Tissue Value: Closed Flower vs. Whole Plant
  misc_feature: MA Experiment ID: 20000286 Result: Up-regulated in Transcription
  misc_feature: MA Experiment 20000286 PARAMETER Experiment Name: At_Open_Flower_P Parameter: Age (day) Value: 21
  misc_feature: MA Experiment 20000286 PARAMETER Experiment Name: At_Open_Flower_P Parameter: Plant Line Value: WS
  misc_feature: MA Experiment 20000286 PARAMETER Experiment Name: At_Open_Flower_P Parameter: Tissue Value: Half Open vs. Whole Plant
  misc_feature: MA Experiment ID: 20000438 Result: Up-regulated in Transcription
  misc_feature: MA Experiment 20000438 PARAMETER Experiment Name: At_Shoots__P Parameter: Age (day) Value: 14
  misc_feature: MA Experiment 20000438 PARAMETER Experiment Name: At_Shoots__P Parameter: Tissue Value: Shoots vs. Whole Plant
  misc_feature: MA Experiment ID: 20000439 Result: Up-regulated in Transcription
  misc_feature: MA Experiment 20000439 PARAMETER Experiment Name: At_Roots__P Parameter: Age (day) Value: 14 vs. 21
  misc_feature: MA Experiment 20000439 PARAMETER Experiment Name: At_Roots__P Parameter: Organism Value: A. thaliana
  misc_feature: MA Experiment 20000439 PARAMETER Experiment Name: At_Roots__P Parameter: Tissue Value: Roots vs. Whole Plant
  misc_feature: MA Experiment ID: 20000573 Result: Down-regulated in Transcription
  misc_feature: MA Experiment 20000573 PARAMETER Experiment Name: At_100uM_ABA_Mutants__P Parameter: Organism Value: A. thaliana
  misc_feature: MA Experiment 20000573 PARAMETER Experiment Name: At_100uM_ABA_Mutants__P Parameter: Plant Line Value: CS22 vs. Ler wt
  misc_feature: MA Experiment 20000573 PARAMETER Experiment Name: At_100uM_ABA_Mutants__P Parameter: Timepoint (hr) Value: N/A
  misc_feature: MA Experiment 20000573 PARAMETER Experiment Name: At_100uM_ABA_Mutants__P Parameter: Tissue Value: Whole Plant
  misc_feature: MA Experiment 20000573 PARAMETER Experiment Name: At_100uM_ABA_Mutants__P Parameter: Treatment Value: None
  misc_feature: MA Experiment ID: 20001248 Result: Down-regulated in Transcription
  misc_feature: MA Experiment 20001248 PARAMETER Experiment Name: At_Far-red-induction_P Parameter: Age (day) Value: 7
  misc_feature: MA Experiment 20001248 PARAMETER Experiment Name: At_Far-red-induction_P Parameter: Light Value: Far-red vs. White
  misc_feature: MA Experiment 20001248 PARAMETER Experiment Name: At_Far-red-induction_P Parameter: Organism Value: A. thaliana
  misc_feature: MA Experiment 20001248 PARAMETER Experiment Name: At_Far-red-induction_P Parameter: Plant Line Value: Columbia
  misc_feature: MA Experiment 20001248 PARAMETER Experiment Name: At_Far-red-induction_P Parameter: Timepoint (hr) Value: 4
  misc_feature: MA Experiment 20001248 PARAMETER Experiment Name: At_Far-red-induction_P Parameter: Tissue Value: Whole Plant
  misc_feature: MA Experiment ID: 20001450 Result: Down-regulated in Transcription
  misc_feature: MA Experiment 20001450 PARAMETER Experiment Name: At_Far-red-induction_P Parameter: Age (day) Value: 7
  misc_feature: MA Experiment 20001450 PARAMETER Experiment Name: At_Far-red-induction_P Parameter: Light Value: Far-red vs. White
  misc_feature: MA Experiment 20001450 PARAMETER Experiment Name: At_Far-red-induction_P Parameter: Organism Value: A. thaliana
  misc_feature: MA Experiment 20001450 PARAMETER Experiment Name: At_Far-red-induction_P Parameter: Plant Line Value: Columbia
  misc_feature: MA Experiment 20001450 PARAMETER Experiment Name: At_Far-red-induction_P Parameter: Timepoint (hr) Value: 8
  misc_feature: MA Experiment 20001450 PARAMETER Experiment Name: At_Far-red-induction_P Parameter: Tissue Value: Whole Plant
  misc_feature: MA Experiment ID: 20001556 Result: Up-regulated in Transcription
  misc_feature: MA Experiment 20001556 PARAMETER Experiment Name: At_Drought_Soil_Dry_P Parameter: Age (day) Value: 26
  misc_feature: MA Experiment 20001556 PARAMETER Experiment Name: At_Drought_Soil_Dry_P Parameter: Organism Value: A. thaliana
  misc_feature: MA Experiment 20001556 PARAMETER Experiment Name: At_Drought_Soil_Dry_P Parameter: Plant Line Value: WS
  misc_feature: MA Experiment 20001556 PARAMETER Experiment Name: At_Drought_Soil_Dry_P Parameter: Post Timepoint (hr) Value: None
  misc_feature: MA Experiment 20001556 PARAMETER Experiment Name: At_Drought_Soil_Dry_P Parameter: Post-Treatment Value: None
  misc_feature: MA Experiment 20001556 PARAMETER Experiment Name: At_Drought_Soil_Dry_P Parameter: Timepoint (day) Value: 12
  misc_feature: MA Experiment 20001556 PARAMETER Experiment Name: At_Drought_Soil_Dry_P Parameter: Treatment Value: Drought vs. No Drought
  misc_feature: MA Experiment ID: 20001557 Result: Up-regulated in Transcription
  misc_feature: MA Experiment 20001557 PARAMETER Experiment Name: At_Drought_Soil_Dry_P Parameter: Age (day) Value: 27
  misc_feature: MA Experiment 20001557 PARAMETER Experiment Name: At_Drought_Soil_Dry_P Parameter: Organism Value: A. thaliana
  misc_feature: MA Experiment 20001557 PARAMETER Experiment Name: At_Drought_Soil_Dry_P Parameter: Plant Line Value: WS
  misc_feature: MA Experiment 20001557 PARAMETER Experiment Name: At_Drought_Soil_Dry_P Parameter: Post Timepoint (hr) Value: 3
  misc_feature: MA Experiment 20001557 PARAMETER Experiment Name: At_Drought_Soil_Dry_P Parameter: Post-Treatment Value: Re-Water vs. No Drought
  misc_feature: MA Experiment 20001557 PARAMETER Experiment Name: At_Drought_Soil_Dry_P Parameter: Timepoint (day) Value: 13
  misc_feature: MA Experiment 20001557 PARAMETER Experiment Name: At_Drought_Soil_Dry_P Parameter: Treatment Value: Drought vs. No Drought
  misc_feature: MA Experiment ID: 20001757 Result: Down-regulated in Transcription
  misc_feature: MA Experiment 20001757 PARAMETER Experiment Name: At_50mM_NH4NO3_L-to-H_P Parameter: Timepoint (hr) Value: 6
  misc_feature: MA Experiment 20001757 PARAMETER Experiment Name: At_50mM_NH4NO3_L-to-H_P Parameter: Tissue Value: Leaf
  misc_feature: MA Experiment 20001757 PARAMETER Experiment Name: At_50mM_NH4NO3_L-to-H_P Parameter: Treatment Value: 50mM NH4NO3 vs 100mM Mannitol
aagctttgaacgttagcaaaattatgttacctaccaccagtccctggcttattatatagagagagatattcacatttacaatttcgatattgtttctctaagatcgtaaaatagtacaccaagccatttataaatttcttcactctcagattcaaaataatataaattagaaatgggaacagagatggtcatggttcacgaggttccttttcctccacagatcatcacttccaagccactctctcttctgggccaagggatcacagacattgagatccactttcttcaagtgaagttcactgcgatcggagtttacttagatccttcagatgttaaaacacatcttgataactggaaaggcaaaaccggaaaagaactcgccggcgatgatgacttcttcgacgcccttgcctccgcggagatggagaaggttataagagtggtggtgataaaggagataaaaggagctcagtacggagtgcagctagagaatacggtgagagatcgtttggctgaggaggataagtacgaggaagaagaagaaactgagctcgagaaggtcgttggctttttccagtccaagtacttcaaagctaactccgttatcacttaccatttctcagccaaagatggcatttgcgagatcgggtttgagacggaaggtaaagaagaggagaaactgaaggtggagaatgcgaatgtggtgggaatgatgcagagatggtatttgtccggaagtcgtggagtctcaccgtcgactattgtctccatcgctgattcaatctccgcagttttaacctaagaaccatggccccttacataaaaatttgtatgtgtgtgtgttttatgtagtattttttttttcctcttgtcaagttcctgcttttgtatcatcaaacttttactttggagtttgatatggccgaacaatatggtaattccttaatctcaatttaaatcagctttgctcgtttggattc

SEQ ID NO: 25348 - protein, 209 aa, Arabidopsis thaliana
  peptide (1)..(209): Ceres Seq. ID no. 13497472
  misc_feature (1)..(209): Pfam Name: Chalcone-flavanone isomerase Pfam Description: Chalcone-flavanone isomerase
  misc_feature (6)..(194): Homolog of NCBI NO: 28804193 NR Description: chalcone isomerase [Lotus japonicus]
  misc_feature (3)..(208): Homolog of NCBI NO: 116136 NR Description: CHALCONE--FLAVONONE ISOMERASE A (CHALCONE
  misc_feature (3)..(208): Homolog of NCBI NO: 68481 NR Description: chalcone isomerase (EC 5.5.1.6) A - garden
  misc_feature (11)..(209): Homolog of NCBI NO: 729103 NR Description: CHALCONE--FLAVONONE ISOMERASE (CHALCONE
  misc_feature (6)..(205): Homolog of NCBI NO: 1705761 NR Description: CHALCONE--FLAVONONE ISOMERASE (CHALCONE
  misc_feature (6)..(208): Homolog of NCBI NO: 27530601 NR Description: putative chalcone isomerase [Lotus japonicus]
  misc_feature (3)..(208): Homolog of NCBI NO: 5921722 NR Description: Chalcone--flavonone isomerase (Chalcone
  misc_feature (3)..(208): Homolog of NCBI NO: 4126399 NR Description: chalcone isomerase [Citrus sinensis]
  misc_feature (5)..(209): Homolog of NCBI NO: 10176739 NR Description: contains similarity to chalcone-flavonone
  misc_feature (1)..(209): Homolog of NCBI NO: 18414838 NR Description: chalcone-flavanone isomerase family [Arabidopsis
MGTEMVMVHEVPFPPQIITSKPLSLLGQGITDIEIHFLQVKFTAIGVYLDPSDVKTHLDNWKGKTGKELAGDDDFFDALASAEMEKVIRVVVIKEIKGAQYGVQLENTVRDRLAEEDKYEEEEETELEKVVGFFQSKYFKANSVITYHFSAKDGICEIGFETEGKEEEKLKVENANVVGMMQRWYLSGSRGVSPSTIVSIADSISAVLT

SEQ ID NO: 25349 - protein, 205 aa, Arabidopsis thaliana
  peptide (1)..(205): Ceres Seq. ID no. 13497473
  misc_feature (1)..(205): Pfam Name: Chalcone-flavanone isomerase Pfam Description: Chalcone-flavanone isomerase
  misc_feature (2)..(190): Homolog of NCBI NO: 28804193 NR Description: chalcone isomerase [Lotus japonicus]
  misc_feature (1)..(204): Homolog of NCBI NO: 116136 NR Description: CHALCONE--FLAVONONE ISOMERASE A (CHALCONE
  misc_feature (1)..(204): Homolog of NCBI NO: 68481 NR Description: chalcone isomerase (EC 5.5.1.6) A - garden
  misc_feature (7)..(205): Homolog of NCBI NO: 729103 NR Description: CHALCONE--FLAVONONE ISOMERASE (CHALCONE
  misc_feature (2)..(201): Homolog of NCBI NO: 1705761 NR Description: CHALCONE--FLAVONONE ISOMERASE (CHALCONE
  misc_feature (2)..(204): Homolog of NCBI NO: 27530601 NR Description: putative chalcone isomerase [Lotus japonicus]
  misc_feature (1)..(204): Homolog of NCBI NO: 5921722 NR Description: Chalcone--flavonone isomerase (Chalcone
  misc_feature (1)..(204): Homolog of NCBI NO: 4126399 NR Description: chalcone isomerase [Citrus sinensis]
  misc_feature (1)..(205): Homolog of NCBI NO: 10176739 NR Description: contains similarity to chalcone-flavonone
  misc_feature (1)..(205): Homolog of NCBI NO: 18414838 NR Description: chalcone-flavanone isomerase family [Arabidopsis
MVMVHEVPFPPQIITSKPLSLLGQGITDIEIHFLQVKFTAIGVYLDPSDVKTHLDNWKGKTGKELAGDDDFFDALASAEMEKVIRVVVIKEIKGAQYGVQLENTVRDRLAEEDKYEEEEETELEKVVGFFQSKYFKANSVITYHFSAKDGICEIGFETEGKEEEKLKVENANVVGMMQRWYLSGSRGVSPSTIVSIADSISAVLT

SEQ ID NO: 25350 - protein, 203 aa, Arabidopsis thaliana
  peptide (1)..(203): Ceres Seq. ID no. 13497474
  misc_feature (1)..(203): Pfam Name: Chalcone-flavanone isomerase Pfam Description: Chalcone-flavanone isomerase
  misc_feature (1)..(188): Homolog of NCBI NO: 28804193 NR Description: chalcone isomerase [Lotus japonicus]
  misc_feature (1)..(202): Homolog of NCBI NO: 116136 NR Description: CHALCONE--FLAVONONE ISOMERASE A (CHALCONE
  misc_feature (1)..(202): Homolog of NCBI NO: 68481 NR Description: chalcone isomerase (EC 5.5.1.6) A - garden
  misc_feature (5)..(203): Homolog of NCBI NO: 729103 NR Description: CHALCONE--FLAVONONE ISOMERASE (CHALCONE
  misc_feature (1)..(199): Homolog of NCBI NO: 1705761 NR Description: CHALCONE--FLAVONONE ISOMERASE (CHALCONE
  misc_feature (1)..(202): Homolog of NCBI NO: 27530601 NR Description: putative chalcone isomerase [Lotus japonicus]
  misc_feature (1)..(202): Homolog of NCBI NO: 5921722 NR Description: Chalcone--flavonone isomerase (Chalcone
  misc_feature (1)..(202): Homolog of NCBI NO: 4126399 NR Description: chalcone isomerase [Citrus sinensis]
  misc_feature (1)..(203): Homolog of NCBI NO: 10176739 NR Description: contains similarity to chalcone-flavonone
  misc_feature (1)..(203): Homolog of NCBI NO: 18414838 NR Description: chalcone-flavanone isomerase family [Arabidopsis
MVHEVPFPPQIITSKPLSLLGQGITDIEIHFLQVKFTAIGVYLDPSDVKTHLDNWKGKTGKELAGDDDFFDALASAEMEKVIRVVVIKEIKGAQYGVQLENTVRDRLAEEDKYEEEEETELEKVVGFFQSKYFKANSVITYHFSAKDGICEIGFETEGKEEEKLKVENANVVGMMQRWYLSGSRGVSPSTIVSIADSISAVLT

SEQ ID NO: 25351 - DNA, 1140 bp, Arabidopsis thaliana
  misc_feature (1)..(1140): Ceres Seq. ID no. 12321112
  misc_feature: MA Experiment ID: 20000113 Result: Down-regulated in Transcription
  misc_feature: MA Experiment 20000113 PARAMETER Experiment Name: At_42deg_Heat_cDNA_P Parameter: Temperature (deg C) Value: 42 vs. 22
  misc_feature: MA Experiment 20000113 PARAMETER Experiment Name: At_42deg_Heat_cDNA_P Parameter: Timepoint (hr) Value: 8
  misc_feature: MA Experiment 20000113 PARAMETER Experiment Name: At_42deg_Heat_cDNA_P Parameter: Tissue Value: Aerial
actccgaatcccaaaattgttgccttccttcgtctccgatcattttcgtggtgtctgtaaccccaattacaattcgaatccattagcgaaagaaagagacttcctttgaaagagaagagtctcgttggctcggttttctgttcaaatcagcggatttcctcacatttaattgttcaatcatggcggctaccaatgtcatgcggcgagacgagagccttcttattgatccccaaagaggagatacaagtgtttctcgtggcctctcgcttgagaagaaaattgaggcccttgagagcctggccggacaagttagtaacaggcgatctcggagatggttaaatgatcgtattctgatggaacttgttcctcgtttggatgcccaagaaatcagaggcttgtttgctccaccaccgtggggtgatgatgtcccaccctcagcattttctttgactaatgttggagaatgggacaaatttagaaacatagacatggacaaggaggccaacatcatggattccttgaataggtcatccgtaaggcagaaaggtagcgtggacggtgataaaatcgctgtcttaaatgcttggagaagaatagattgtaggacaagagatgctcttcgacgtagctttttaccagaactaatcgagggatatgagagctgtataagtcacttcatcgaggaaggtggtgaaggagatgttcttgagctcaaggttcaagacccattccatagattgcttttacacggtgtttgtgagtatcacaatttggtatcaacaactgcaacagaacagataggaaggatagcaatgaagacaacgagcatcaaatggaagaagagtggcgattcaggggagaaaccaagcatcagcctagcgcatttccttaggatgtcaaaggaaggagcttggtaacaacacatacactcctttgtagctgtggttttttatgaatatcagcgccaatttaaagggctatttatgcagcaaaaagatctcaagactctctctctctctctttggcctttgctacttccccctatgtggcctcttgtaagcttgtatttgtatcctcaatttatacggttttatgattaaagaacgagatagacaataaattttattgagtgctgattgt

SEQ ID NO: 25352 - protein, 245 aa, Arabidopsis thaliana
  peptide (1)..(245): Ceres Seq. ID no. 12321113
  misc_feature (1)..(245): Homolog of NCBI NO: 18379075 NR Description: expressed protein
  misc_feature (1)..(197): Homolog of NCBI NO: 25372999 NR Description: hypothetical protein F15K9.15 [imported] -
MAATNVMRRDESLLIDPQRGDTSVSRGLSLEKKIEALESLAGQVSNRRSRRWLNDRILMELVPRLDAQEIRGLFAPPPWGDDVPPSAFSLTNVGEWDKFRNIDMDKEANIMDSLNRSSVRQKGSVDGDKIAVLNAWRRIDCRTRDALRRSFLPELIEGYESCISHFIEEGGEGDVLELKVQDPFHRLLLHGVCEYHNLVSTTATEQIGRIAMKTTSIKWKKSGDSGEKPSISLAHFLRMSKEGAW

SEQ ID NO: 25353 - protein, 239 aa, Arabidopsis thaliana
  peptide (1)..(239): Ceres Seq. ID no. 12321114
  misc_feature (1)..(191): Homolog of NCBI NO: 25372999 NR Description: hypothetical protein F15K9.15 [imported] -
  misc_feature (1)..(239): Homolog of NCBI NO: 18379075 NR Description: expressed protein
MRRDESLLIDPQRGDTSVSRGLSLEKKIEALESLAGQVSNRRSRRWLNDRILMELVPRLDAQEIRGLFAPPPWGDDVPPSAFSLTNVGEWDKFRNIDMDKEANIMDSLNRSSVRQKGSVDGDKIAVLNAWRRIDCRTRDALRRSFLPELIEGYESCISHFIEEGGEGDVLELKVQDPFHRLLLHGVCEYHNLVSTTATEQIGRIAMKTTSIKWKKSGDSGEKPSISLAHFLRMSKEGAW

SEQ ID NO: 25354 - protein, 187 aa, Arabidopsis thaliana
  peptide (1)..(187): Ceres Seq. ID no. 12321115
  misc_feature (1)..(139): Homolog of NCBI NO: 25372999 NR Description: hypothetical protein F15K9.15 [imported] -
  misc_feature (1)..(187): Homolog of NCBI NO: 18379075 NR Description: expressed protein
MELVPRLDAQEIRGLFAPPPWGDDVPPSAFSLTNVGEWDKFRNIDMDKEANIMDSLNRSSVRQKGSVDGDKIAVLNAWRRIDCRTRDALRRSFLPELIEGYESCISHFIEEGGEGDVLELKVQDPFHRLLLHGVCEYHNLVSTTATEQIGRIAMKTTSIKWKKSGDSGEKPSISLAHFLRMSKEGAW

SEQ ID NO: 25355 - DNA, 1350 bp, Arabidopsis thaliana
  misc_feature (1)..(1350): Ceres Seq. ID no. 12321118
  misc_feature: MA Experiment ID: 108434 Result: Up-regulated in Transcription
  misc_feature: MA Experiment 108434 PARAMETER Experiment Name: At_Root_Tips_cDNA_P Parameter: Tissue Value: Root Tips
  misc_feature: MA Experiment ID: 108573 Result: Up-regulated in Transcription
  misc_feature: MA Experiment 108573 PARAMETER Experiment Name: At_Drought_cDNA_P Parameter: Timepoint (hr) Value: 6
  misc_feature: MA Experiment 108573 PARAMETER Experiment Name: At_Drought_cDNA_P Parameter: Tissue Value: Aerial
  misc_feature: MA Experiment 108573 PARAMETER Experiment Name: At_Drought_cDNA_P Parameter: Treatment Value: Drought vs. No Drought
  misc_feature: MA Experiment ID: 108595 Result: Down-regulated in Transcription
  misc_feature: MA Experiment 108595 PARAMETER Experiment Name: At_Ler-pi_Ovule_cDNA_P Parameter: Plant Line Value: null
atcttcgataaatacgcaagagtgagcttcacggtcagacaaaagctgactctacgctctctcaaaagtcgaatatcccaaattcgatccgttttccggcgataatctccgatctagatccgatggcgaaagaaccagttcgtgtgctcgttactggagctgcaggacaaatcggatatgctcttgtacctatgattgcaaggggtatcatgcttggtgctgaccaacctgttatcctccacatgttggatattcctccagctgctgaagctttgaacggtgttaagatggagttgatcgatgctgctttccctcttcttaaaggtgttgttgctacaactgatgccgttgagggatgtactggagtcaatgttgctgttatggttggtggtttcccgaggaaagaaggtatggagaggaaggatgtgatgtccaagaatgtttccatctacaagtctcaggctgctgccttggagaagcatgccgctcctaactgcaaggttcttgttgtggccaacccggcaaacaccaacgcattgatcctcaaggaatttgcaccatcaatccctgaaaagaacatctcttgtttgacaaggcttgaccacaacagggctttgggacagatctctgagaggttgagcgtgccagtgtctgatgttaagaacgtgatcatctggggaaaccactcatcctcacagtacccagatgtcaaccatgctaaagtgcagacctcgtctggagagaagcctgtccgtgagctcgtcaaggacgatgcatggttggacggagaatttatctctacagttcaacaacgtggagctgcaatcatcaaggcgaggaagttgtctagtgcgctctctgctgctagctctgcttgtgaccacatccgtgactgggtccttggaactccagagggtacgttcgtttccatgggagtatactccgatggctcttacagcgttccatcaggacttatctactccttccctgtaacttgtcgcaatggagactggagtattgtccaaggccttccgattgatgaagtatcaaggaagaagatggatttgactgcagaggagctcaaggaagagaaggacttggcgtactcatgcctctcttaaacccttctggagcaaaattttcatctataaggtgtgagatcagttaaagcctttcagggctttgtccgaataagaagtgtgtttgaaagatctccaaacactgttttataacctctttggtctctttgatgagtattgtccctggtctgtttctaaaccaggatatcgtttttttcaatgtgtctgatttggtttacccatgaaaagaagaaaattggcagttgcatgg

SEQ ID NO: 25356 - protein, 332 aa, Arabidopsis thaliana
  peptide (1)..(332): Ceres Seq. ID no. 12321119
  misc_feature (157)..(331): Pfam Name: lactate/malate dehydrogenase, alpha/beta Pfam Description: lactate/malate dehydrogenase, alpha/beta
  misc_feature (1)..(324): Homolog of NCBI NO: 15837813 NR Description: malate dehydrogenase [Xylella fastidiosa 9a5c]
  misc_feature (1)..(332): Homolog of NCBI NO: 12229778 NR Description: Malate dehydrogenase, cytoplasmic
  misc_feature (1)..(332): Homolog of NCBI NO: 15982948 NR Description: NAD-dependent malate dehydrogenase [Prunus
  misc_feature (1)..(332): Homolog of NCBI NO: 10334493 NR Description: cytosolic malate dehydrogenase [Cicer arietinum]
  misc_feature (1)..(332): Homolog of NCBI NO: 11133373 NR Description: Malate dehydrogenase, cytoplasmic
  misc_feature (1)..(331): Homolog of NCBI NO: 18202485 NR Description: Malate dehydrogenase, cytoplasmic
  misc_feature (1)..(332): Homolog of NCBI NO: 10798652 NR Description: malate dehydrogenase [Nicotiana tabacum]
  misc_feature (1)..(332): Homolog of NCBI NO: 15239843 NR Description: cytosolic malate dehydrogenase
  misc_feature (1)..(332): Homolog of NCBI NO: 21593565 NR Description: cytosolic malate dehydrogenase [Arabidopsis
  misc_feature (1)..(332): Homolog of NCBI NO: 15219721 NR Description: putative malate dehydrogenase
MAKEPVRVLVTGAAGQIGYALVPMIARGIMLGADQPVILHMLDIPPAAEALNGVKMELIDAAFPLLKGVVATTDAVEGCTGVNVAVMVGGFPRKEGMERKDVMSKNVSIYKSQAAALEKHAAPNCKVLVVANPANTNALILKEFAPSIPEKNISCLTRLDHNRALGQISERLSVPVSDVKNVIIWGNHSSSQYPDVNHAKVQTSSGEKPVRELVKDDAWLDGEFISTVQQRGAAIIKARKLSSALSAASSACDHIRDWVLGTPEGTFVSMGVYSDGSYSVPSGLIYSFPVTCRNGDWSIVQGLPIDEVSRKKMDLTAEELKEEKDLAYSCLS

SEQ ID NO: 25357 - protein, 309 aa, Arabidopsis thaliana
  peptide (1)..(309): Ceres Seq. ID no. 12321120
  misc_feature (134)..(308): Pfam Name: lactate/malate dehydrogenase, alpha/beta Pfam Description: lactate/malate dehydrogenase, alpha/beta
  misc_feature (1)..(301): Homolog of NCBI NO: 15837813 NR Description: malate dehydrogenase [Xylella fastidiosa 9a5c]
  misc_feature (1)..(309): Homolog of NCBI NO: 12229778 NR Description: Malate dehydrogenase, cytoplasmic
  misc_feature (1)..(309): Homolog of NCBI NO: 15982948 NR Description: NAD-dependent malate dehydrogenase [Prunus
  misc_feature (1)..(309): Homolog of NCBI NO: 10334493 NR Description: cytosolic malate dehydrogenase [Cicer arietinum]
  misc_feature (1)..(309): Homolog of NCBI NO: 11133373 NR Description: Malate dehydrogenase, cytoplasmic
  misc_feature (1)..(308): Homolog of NCBI NO: 18202485 NR Description: Malate dehydrogenase, cytoplasmic
  misc_feature (1)..(309): Homolog of NCBI NO: 10798652 NR Description: malate dehydrogenase [Nicotiana tabacum]
  misc_feature (1)..(309): Homolog of NCBI NO: 15239843 NR Description: cytosolic malate dehydrogenase
  misc_feature (1)..(309): Homolog of NCBI NO: 21593565 NR Description: cytosolic malate dehydrogenase [Arabidopsis
  misc_feature (1)..(309): Homolog of NCBI NO: 15219721 NR Description: putative malate dehydrogenase
MIARGIMLGADQPVILHMLDIPPAAEALNGVKMELIDAAFPLLKGVVATTDAVEGCTGVNVAVMVGGFPRKEGMERKDVMSKNVSIYKSQAAALEKHAAPNCKVLVVANPANTNALILKEFAPSIPEKNISCLTRLDHNRALGQISERLSVPVSDVKNVIIWGNHSSSQYPDVNHAKVQTSSGEKPVRELVKDDAWLDGEFISTVQQRGAAIIKARKLSSALSAASSACDHIRDWVLGTPEGTFVSMGVYSDGSYSVPSGLIYSFPVTCRNGDWSIVQGLPIDEVSRKKMDLTAEELKEEKDLAYSCLS

SEQ ID NO: 25358 - protein, 303 aa, Arabidopsis thaliana
  peptide (1)..(303): Ceres Seq. ID no. 12321121
  misc_feature (128)..(302): Pfam Name: lactate/malate dehydrogenase, alpha/beta Pfam Description: lactate/malate dehydrogenase, alpha/beta
  misc_feature (1)..(295): Homolog of NCBI NO: 15837813 NR Description: malate dehydrogenase [Xylella fastidiosa 9a5c]
  misc_feature (1)..(303): Homolog of NCBI NO: 12229778 NR Description: Malate dehydrogenase, cytoplasmic
  misc_feature (1)..(303): Homolog of NCBI NO: 15982948 NR Description: NAD-dependent malate dehydrogenase [Prunus
  misc_feature (1)..(303): Homolog of NCBI NO: 10334493 NR Description: cytosolic malate dehydrogenase [Cicer arietinum]
  misc_feature (1)..(303): Homolog of NCBI NO: 11133373 NR Description: Malate dehydrogenase, cytoplasmic
  misc_feature (1)..(302): Homolog of NCBI NO: 18202485 NR Description: Malate dehydrogenase, cytoplasmic
  misc_feature (1)..(303): Homolog of NCBI NO: 10798652 NR Description: malate dehydrogenase [Nicotiana tabacum]
  misc_feature (1)..(303): Homolog of NCBI NO: 15239843 NR Description: cytosolic malate dehydrogenase
  misc_feature (1)..(303): Homolog of NCBI NO: 21593565 NR Description: cytosolic malate dehydrogenase [Arabidopsis
  misc_feature (1)..(303): Homolog of NCBI NO: 15219721 NR Description: putative malate dehydrogenase
MLGADQPVILHMLDIPPAAEALNGVKMELIDAAFPLLKGVVATTDAVEGCTGVNVAVMVGGFPRKEGMERKDVMSKNVSIYKSQAAALEKHAAPNCKVLVVANPANTNALILKEFAPSIPEKNISCLTRLDHNRALGQISERLSVPVSDVKNVIIWGNHSSSQYPDVNHAKVQTSSGEKPVRELVKDDAWLDGEFISTVQQRGAAIIKARKLSSALSAASSACDHIRDWVLGTPEGTFVSMGVYSDGSYSVPSGLIYSFPVTCRNGDWSIVQGLPIDEVSRKKMDLTAEELKEEKDLAYSCLS

SEQ ID NO: 25359 - DNA, 1107 bp, Arabidopsis thaliana
  misc_feature (1)..(1107): Ceres Seq. ID no. 13621987
  misc_feature: MA Experiment ID: 108572 Result: Up-regulated in Transcription
  misc_feature: MA Experiment 108572 PARAMETER Experiment Name: At_Drought_cDNA_P Parameter: Timepoint (hr) Value: 1
  misc_feature: MA Experiment 108572 PARAMETER Experiment Name: At_Drought_cDNA_P Parameter: Tissue Value: Aerial
  misc_feature: MA Experiment 108572 PARAMETER Experiment Name: At_Drought_cDNA_P Parameter: Treatment Value: Drought vs. No Drought
  misc_feature: MA Experiment ID: 108573 Result: Up-regulated in Transcription
  misc_feature: MA Experiment 108573 PARAMETER Experiment Name: At_Drought_cDNA_P Parameter: Timepoint (hr) Value: 6
  misc_feature: MA Experiment 108573 PARAMETER Experiment Name: At_Drought_cDNA_P Parameter: Tissue Value: Aerial
  misc_feature: MA Experiment 108573 PARAMETER Experiment Name: At_Drought_cDNA_P Parameter: Treatment Value: Drought vs. No Drought
  misc_feature: MA Experiment ID: 108579 Result: Down-regulated in Transcription
  misc_feature: MA Experiment 108579 PARAMETER Experiment Name: At_4deg_Cold_cDNA_P Parameter: Temperature (deg C) Value: 4 vs. 22
  misc_feature: MA Experiment 108579 PARAMETER Experiment Name: At_4deg_Cold_cDNA_P Parameter: Timepoint (hr) Value: 6
  misc_feature: MA Experiment 108579 PARAMETER Experiment Name: At_4deg_Cold_cDNA_P Parameter: Tissue Value: Aerial
  misc_feature: MA Experiment ID: 20000072 Result: Down-regulated in Transcription
  misc_feature: MA Experiment 20000072 PARAMETER Experiment Name: At_100uM_ABA_Mutants_cDNA_P Parameter: Plant Line Value: CS8105
  misc_feature: MA Experiment 20000072 PARAMETER Experiment Name: At_100uM_ABA_Mutants_cDNA_P Parameter: Timepoint (hr) Value: 6
  misc_feature: MA Experiment 20000072 PARAMETER Experiment Name: At_100uM_ABA_Mutants_cDNA_P Parameter: Tissue Value: Aerial
  misc_feature: MA Experiment 20000072 PARAMETER Experiment Name: At_100uM_ABA_Mutants_cDNA_P Parameter: Treatment Value: 100uM ABA vs. No Treatment
  misc_feature: MA Experiment ID: 20000087 Result: Down-regulated in Transcription
  misc_feature: MA Experiment 20000087 PARAMETER Experiment Name: At_100uM_ABA_Mutants_cDNA_P Parameter: Plant Line Value: WS
  misc_feature: MA Experiment 20000087 PARAMETER Experiment Name: At_100uM_ABA_Mutants_cDNA_P Parameter: Timepoint (hr) Value: 6
  misc_feature: MA Experiment 20000087 PARAMETER Experiment Name: At_100uM_ABA_Mutants_cDNA_P Parameter: Tissue Value: Aerial
  misc_feature: MA Experiment 20000087 PARAMETER Experiment Name: At_100uM_ABA_Mutants_cDNA_P Parameter: Treatment Value: 100uM ABA vs. No Treatment
  misc_feature: MA Experiment ID: 20000090 Result: Down-regulated in Transcription
  misc_feature: MA Experiment ID: 20000093 Result: Up-regulated in Transcription
  misc_feature: MA Experiment 20000093 PARAMETER Experiment Name: At_42deg_Heat_cDNA_P Parameter: Temperature (deg C) Value: 42 vs. 22
  misc_feature: MA Experiment 20000093 PARAMETER Experiment Name: At_42deg_Heat_cDNA_P Parameter: Timepoint (hr) Value: 0.5
  misc_feature: MA Experiment 20000093 PARAMETER Experiment Name: At_42deg_Heat_cDNA_P Parameter: Tissue Value: Aerial
  misc_feature: MA Experiment ID: 20000180 Result: Up-regulated in Transcription
  misc_feature: MA Experiment 20000180 PARAMETER Experiment Name: At_Germinating_Seeds_P Parameter: Age (hr) Value: 24 vs. 0
  misc_feature: MA Experiment 20000180 PARAMETER Experiment Name: At_Germinating_Seeds_P Parameter: Tissue Value: Germinating Seeds
  misc_feature: MA Experiment ID: 20000213 Result: Down-regulated in Transcription
  misc_feature: MA Experiment 20000213 PARAMETER Experiment Name: At_4deg_Cold_P Parameter: Timepoint (hr) Value: 2
  misc_feature: MA Experiment ID: 20000224 Result: Down-regulated in Transcription
  misc_feature: MA Experiment ID: 20000234 Result: Down-regulated in Transcription
  misc_feature: MA Experiment 20000234 PARAMETER Experiment Name: At_Siliques_P Parameter: Age (day) Value: 21
  misc_feature: MA Experiment 20000234 PARAMETER Experiment Name: At_Siliques_P Parameter: Organism Value: A. thaliana
  misc_feature: MA Experiment 20000234 PARAMETER Experiment Name: At_Siliques_P Parameter: Plant Line Value: WS
  misc_feature: MA Experiment 20000234 PARAMETER Experiment Name: At_Siliques_P Parameter: Tissue Value: Less Than 5mm Siliques vs. Whole Plant
  misc_feature: MA Experiment ID: 20000264 Result: Down-regulated in Transcription
  misc_feature: MA Experiment 20000264 PARAMETER Experiment Name: At_Open_Flower_P Parameter: Age (day) Value: 21
  misc_feature: MA Experiment 20000264 PARAMETER Experiment Name: At_Open_Flower_P Parameter: Plant Line Value: WS
  misc_feature: MA Experiment 20000264 PARAMETER Experiment Name: At_Open_Flower_P Parameter: Tissue Value: Open Flower vs. Whole Plant
  misc_feature: MA Experiment ID: 20000265 Result: Down-regulated in Transcription
  misc_feature: MA Experiment 20000265 PARAMETER Experiment Name: At_Open_Flower_P Parameter: Age (day) Value: 21
  misc_feature: MA Experiment 20000265 PARAMETER Experiment Name: At_Open_Flower_P Parameter: Plant Line Value: WS
  misc_feature: MA Experiment 20000265 PARAMETER Experiment Name: At_Open_Flower_P Parameter: Tissue Value: Closed Flower vs. Whole Plant
  misc_feature: MA Experiment ID: 20000286 Result: Down-regulated in Transcription
  misc_feature: MA Experiment 20000286 PARAMETER Experiment Name: At_Open_Flower_P Parameter: Age (day) Value: 21
  misc_feature: MA Experiment 20000286 PARAMETER Experiment Name: At_Open_Flower_P Parameter: Plant Line Value: WS
  misc_feature: MA Experiment 20000286 PARAMETER Experiment Name: At_Open_Flower_P Parameter: Tissue Value: Half Open vs. Whole Plant
  misc_feature: MA Experiment ID: 20000307 Result: Up-regulated in Transcription
  misc_feature: MA Experiment 20000307 PARAMETER Experiment Name: At_Germinating_Seeds_Sub_P Parameter: Age (hr) Value: 24 vs. 0
  misc_feature: MA Experiment 20000307 PARAMETER Experiment Name: At_Germinating_Seeds_Sub_P Parameter: Organism Value: A. thaliana
  misc_feature: MA Experiment 20000307 PARAMETER Experiment Name: At_Germinating_Seeds_Sub_P Parameter: Plant Line Value: WS
  misc_feature: MA Experiment 20000307 PARAMETER Experiment Name: At_Germinating_Seeds_Sub_P Parameter: Tissue Value: Germinating Seeds
  misc_feature: MA Experiment ID: 20000332 Result: Down-regulated in Transcription
  misc_feature: MA Experiment 20000332 PARAMETER Experiment Name: At_4deg_Cold_Sub_P Parameter: Age (day) Value: 14
  misc_feature: MA Experiment 20000332 PARAMETER Experiment Name: At_4deg_Cold_Sub_P Parameter: Organism Value: A. thaliana
  misc_feature: MA Experiment 20000332 PARAMETER Experiment Name: At_4deg_Cold_Sub_P Parameter: Plant Line Value: WS
  misc_feature: MA Experiment 20000332 PARAMETER Experiment Name: At_4deg_Cold_Sub_P Parameter: Temperature (deg C) Value: 4 vs. 22
  misc_feature: MA Experiment 20000332 PARAMETER Experiment Name: At_4deg_Cold_Sub_P Parameter: Timepoint (hr) Value: 2
  misc_feature: MA Experiment 20000332 PARAMETER Experiment Name: At_4deg_Cold_Sub_P Parameter: Tissue Value: Aerial
  misc_feature: MA Experiment ID: 20000347 Result: Down-regulated in Transcription
  misc_feature: MA Experiment 20000347 PARAMETER Experiment Name: At_2mM_SA_Sub_P Parameter: Age (day) Value: 14
  misc_feature: MA Experiment 20000347 PARAMETER Experiment Name: At_2mM_SA_Sub_P Parameter: Organism Value: A. thaliana
  misc_feature: MA Experiment 20000347 PARAMETER Experiment Name: At_2mM_SA_Sub_P Parameter: Plant Line Value: WS
  misc_feature: MA Experiment 20000347 PARAMETER Experiment Name: At_2mM_SA_Sub_P Parameter: Timepoint (hr) Value: 6
  misc_feature: MA Experiment 20000347 PARAMETER Experiment Name: At_2mM_SA_Sub_P Parameter: Tissue Value: Aerial
  misc_feature: MA Experiment 20000347 PARAMETER Experiment Name: At_2mM_SA_Sub_P Parameter: Treatment Value: 2mM SA vs. No Treatment
  misc_feature: MA Experiment ID: 20000355 Result: Down-regulated in Transcription
  misc_feature: MA Experiment 20000355 PARAMETER Experiment Name: At_Siliques_Sub_P Parameter: Age (day) Value: 21
  misc_feature: MA Experiment 20000355 PARAMETER Experiment Name: At_Siliques_Sub_P Parameter: Organism Value: A. thaliana
  misc_feature: MA Experiment 20000355 PARAMETER Experiment Name: At_Siliques_Sub_P Parameter: Plant Line Value: WS
  misc_feature: MA Experiment 20000355 PARAMETER Experiment Name: At_Siliques_Sub_P Parameter: Tissue Value: Less Than 5mm Siliques vs. Whole Plant
  misc_feature: MA Experiment ID: 20000437 Result: Down-regulated in Transcription
  misc_feature: MA Experiment 20000437 PARAMETER Experiment Name: At_Drought_P Parameter: Age (day) Value: 8
  misc_feature: MA Experiment 20000437 PARAMETER Experiment Name: At_Drought_P Parameter: Organism Value: A. thaliana
  misc_feature: MA Experiment 20000437 PARAMETER Experiment Name: At_Drought_P Parameter: Plant Line Value: WS
  misc_feature: MA Experiment 20000437 PARAMETER Experiment Name: At_Drought_P Parameter: Timepoint (hr) Value: 24
  misc_feature: MA Experiment 20000437 PARAMETER Experiment Name: At_Drought_P Parameter: Tissue Value: Whole Plant
  misc_feature: MA Experiment 20000437 PARAMETER Experiment Name: At_Drought_P Parameter: Treatment Value: Drought vs. No Drought
  misc_feature: MA Experiment ID: 20000440 Result: Down-regulated in Transcription
  misc_feature: MA Experiment 20000440 PARAMETER Experiment Name: At_Closed-Flower__Sub_P Parameter: Tissue Value: Closed Flower vs. Whole Plant
  misc_feature: MA Experiment ID: 20000451 Result: Down-regulated in Transcription
  misc_feature: MA Experiment 20000451 PARAMETER Experiment Name: At_CS6879_Shoots-Roots_P Parameter: Age (day) Value: 14
  misc_feature: MA Experiment 20000451 PARAMETER Experiment Name: At_CS6879_Shoots-Roots_P Parameter: Organism Value: A. thaliana
  misc_feature: MA Experiment 20000451 PARAMETER Experiment Name: At_CS6879_Shoots-Roots_P Parameter: Plant Line Value: CS6879 vs. WS
  misc_feature: MA Experiment 20000451 PARAMETER Experiment Name: At_CS6879_Shoots-Roots_P Parameter: Tissue Value: Roots
  misc_feature: MA Experiment ID: 20000794 Result: Down-regulated in Transcription
  misc_feature: MA Experiment 20000794 PARAMETER Experiment Name: At_Petals_P Parameter: Age (day) Value: 23-25 days
  misc_feature: MA Experiment 20000794 PARAMETER Experiment Name: At_Petals_P Parameter: Plant Line Value: WS
  misc_feature: MA Experiment 20000794 PARAMETER Experiment Name: At_Petals_P Parameter: Tissue Value: Petals vs. Whole plant
  misc_feature: MA Experiment ID: 20001450 Result: Up-regulated in Transcription
  misc_feature: MA Experiment 20001450 PARAMETER Experiment Name: At_Far-red-induction_P Parameter: Age (day) Value: 7
  misc_feature: MA Experiment 20001450 PARAMETER Experiment Name: At_Far-red-induction_P Parameter: Light Value: Far-red vs. White
  misc_feature: MA Experiment 20001450 PARAMETER Experiment Name: At_Far-red-induction_P Parameter: Organism Value: A. thaliana
  misc_feature: MA Experiment 20001450 PARAMETER Experiment Name: At_Far-red-induction_P Parameter: Plant Line Value: Columbia
  misc_feature: MA Experiment 20001450 PARAMETER Experiment Name: At_Far-red-induction_P Parameter: Timepoint (hr) Value: 8
  misc_feature: MA Experiment 20001450 PARAMETER Experiment Name: At_Far-red-induction_P Parameter: Tissue Value: Whole Plant
  misc_feature: MA Experiment ID: 20001451 Result: Up-regulated in Transcription
  misc_feature: MA Experiment 20001451 PARAMETER Experiment Name: At_Far-red-induction_P Parameter: Age (day) Value: 7
  misc_feature: MA Experiment 20001451 PARAMETER Experiment Name: At_Far-red-induction_P Parameter: Light Value: Far-red vs. White
  misc_feature: MA Experiment 20001451 PARAMETER Experiment Name: At_Far-red-induction_P Parameter: Organism Value: A. thaliana
  misc_feature: MA Experiment 20001451 PARAMETER Experiment Name: At_Far-red-induction_P Parameter: Plant Line Value: Columbia
  misc_feature: MA Experiment 20001451 PARAMETER Experiment Name: At_Far-red-induction_P Parameter: Timepoint (hr) Value: 24
  misc_feature: MA Experiment 20001451 PARAMETER Experiment Name: At_Far-red-induction_P Parameter: Tissue Value: Whole Plant
  misc_feature: MA Experiment ID: 20001554 Result: Down-regulated in Transcription
  misc_feature: MA Experiment 20001554 PARAMETER Experiment Name: At_Drought_Soil_Dry_P Parameter: Age (day) Value: 21
  misc_feature: MA Experiment 20001554 PARAMETER Experiment Name: At_Drought_Soil_Dry_P Parameter: Organism Value: A. thaliana
  misc_feature: MA Experiment 20001554 PARAMETER Experiment Name: At_Drought_Soil_Dry_P Parameter: Plant Line Value: WS
  misc_feature: MA Experiment 20001554 PARAMETER Experiment Name: At_Drought_Soil_Dry_P Parameter: Post Timepoint (hr) Value: None
  misc_feature: MA Experiment 20001554 PARAMETER Experiment Name: At_Drought_Soil_Dry_P Parameter: Post-Treatment Value: None
  misc_feature: MA Experiment 20001554 PARAMETER Experiment Name: At_Drought_Soil_Dry_P Parameter: Timepoint (day) Value: 7
  misc_feature: MA Experiment 20001554 PARAMETER Experiment Name: At_Drought_Soil_Dry_P Parameter: Treatment Value: Drought vs. No Drought
  misc_feature: MA Experiment ID: 20001555 Result: Down-regulated in Transcription
  misc_feature: MA Experiment 20001555 PARAMETER Experiment Name: At_Drought_Soil_Dry_P Parameter: Age (day) Value: 24
  misc_feature: MA Experiment 20001555 PARAMETER Experiment Name: At_Drought_Soil_Dry_P Parameter: Organism Value: A. thaliana
  misc_feature: MA Experiment 20001555 PARAMETER Experiment Name: At_Drought_Soil_Dry_P Parameter: Plant Line Value: WS
  misc_feature: MA Experiment 20001555 PARAMETER Experiment Name: At_Drought_Soil_Dry_P Parameter: Post Timepoint (hr) Value: None
  misc_feature: MA Experiment 20001555 PARAMETER Experiment Name: At_Drought_Soil_Dry_P Parameter: Post-Treatment Value: None
  misc_feature: MA Experiment 20001555 PARAMETER Experiment Name: At_Drought_Soil_Dry_P Parameter: Timepoint (day) Value: 10
  misc_feature: MA Experiment 20001555 PARAMETER Experiment Name: At_Drought_Soil_Dry_P Parameter: Treatment Value: Drought vs. No Drought
  misc_feature: MA Experiment ID: 20001556 Result: Down-regulated in Transcription
  misc_feature: MA Experiment 20001556 PARAMETER Experiment Name: At_Drought_Soil_Dry_P Parameter: Age (day) Value: 26
  misc_feature: MA Experiment 20001556 PARAMETER Experiment Name: At_Drought_Soil_Dry_P Parameter: Organism Value: A. thaliana
  misc_feature: MA Experiment 20001556 PARAMETER Experiment Name: At_Drought_Soil_Dry_P Parameter: Plant Line Value: WS
  misc_feature: MA Experiment 20001556 PARAMETER Experiment Name: At_Drought_Soil_Dry_P Parameter: Post Timepoint (hr) Value: None
  misc_feature: MA Experiment 20001556 PARAMETER Experiment Name: At_Drought_Soil_Dry_P Parameter: Post-Treatment Value: None
  misc_feature: MA Experiment 20001556 PARAMETER Experiment Name: At_Drought_Soil_Dry_P Parameter: Timepoint (day) Value: 12
  misc_feature: MA Experiment 20001556 PARAMETER Experiment Name: At_Drought_Soil_Dry_P Parameter: Treatment Value: Drought vs. No Drought
  misc_feature: MA Experiment ID: 20001557 Result: Down-regulated in Transcription
  misc_feature: MA Experiment 20001557 PARAMETER Experiment Name: At_Drought_Soil_Dry_P Parameter: Age (day) Value: 27
  misc_feature: MA Experiment 20001557 PARAMETER Experiment Name: At_Drought_Soil_Dry_P Parameter: Organism Value: A. thaliana
  misc_feature: MA Experiment 20001557 PARAMETER Experiment Name: At_Drought_Soil_Dry_P Parameter: Plant Line Value: WS
  misc_feature: MA Experiment 20001557 PARAMETER Experiment Name: At_Drought_Soil_Dry_P Parameter: Post Timepoint (hr) Value: 3
  misc_feature: MA Experiment 20001557 PARAMETER Experiment Name: At_Drought_Soil_Dry_P Parameter: Post-Treatment Value: Re-Water vs. No Drought
  misc_feature: MA Experiment 20001557 PARAMETER Experiment Name: At_Drought_Soil_Dry_P Parameter: Timepoint (day) Value: 13
  misc_feature: MA Experiment 20001557 PARAMETER Experiment Name: At_Drought_Soil_Dry_P Parameter: Treatment Value: Drought vs. No Drought
  misc_feature: MA Experiment ID: 20001559 Result: Down-regulated in Transcription
  misc_feature: MA Experiment 20001559 PARAMETER Experiment Name: At_Drought_Soil_Dry_P Parameter: Age (day) Value: 28
  misc_feature: MA Experiment 20001559 PARAMETER Experiment Name: At_Drought_Soil_Dry_P Parameter: Organism Value: A. thaliana
  misc_feature: MA Experiment 20001559 PARAMETER Experiment Name: At_Drought_Soil_Dry_P Parameter: Plant Line Value: WS
  misc_feature: MA Experiment 20001559 PARAMETER Experiment Name: At_Drought_Soil_Dry_P Parameter: Post Timepoint (hr) Value: 29
  misc_feature: MA Experiment 20001559 PARAMETER Experiment Name: At_Drought_Soil_Dry_P Parameter: Post-Treatment Value: Re-Water vs. No Drought
  misc_feature: MA Experiment 20001559 PARAMETER Experiment Name: At_Drought_Soil_Dry_P Parameter: Timepoint (day) Value: 14
  misc_feature: MA Experiment 20001559 PARAMETER Experiment Name: At_Drought_Soil_Dry_P Parameter: Treatment Value: Drought vs. No Drought
  misc_feature: MA Experiment ID: 20001757 Result: Up-regulated in Transcription
  misc_feature: MA Experiment 20001757 PARAMETER Experiment Name: At_50mM_NH4NO3_L-to-H_P Parameter: Timepoint (hr) Value: 6
  misc_feature: MA Experiment 20001757 PARAMETER Experiment Name: At_50mM_NH4NO3_L-to-H_P Parameter: Tissue Value: Leaf
  misc_feature: MA Experiment 20001757 PARAMETER Experiment Name: At_50mM_NH4NO3_L-to-H_P Parameter: Treatment Value: 50mM NH4NO3 vs 100mM Mannitol
  misc_feature: MA Experiment ID: 20001904 Result: Down-regulated in Transcription
  misc_feature: MA Experiment 20001904 PARAMETER Experiment Name: At_Drought_Reproduction_P Parameter: Age (day) Value: 37
  misc_feature: MA Experiment 20001904 PARAMETER Experiment Name: At_Drought_Reproduction_P Parameter: Organism Value: A. thaliana
  misc_feature: MA Experiment 20001904 PARAMETER Experiment Name: At_Drought_Reproduction_P Parameter: Plant Line Value: WS
  misc_feature: MA Experiment 20001904 PARAMETER Experiment Name: At_Drought_Reproduction_P Parameter: Timepoint (day) Value: 7
  misc_feature: MA Experiment 20001904 PARAMETER Experiment Name: At_Drought_Reproduction_P Parameter: Tissue Value: Rosettes
  misc_feature: MA Experiment 20001904 PARAMETER Experiment Name: At_Drought_Reproduction_P Parameter: Treatment Value: Drought vs. No Drought
atattacccattgtagaaaagaagaaaaaaagcaaagaacacttgaacgttttctagatagagatggaagggaaagaagaggatgttcgagtgggagctaacaagttcccggagaggcaaccgataggtacatcggctcagacggacaaagactacaaggagccaccaccagctccatttttcgagccaggcgagctgagttcgtggtccttctacagagccggaatcgccgagttcatagccaccttcctgtttctatacataacagtattgacagtgatgggagtgaagagagcaccaaacatgtgtgcctctgttggaatccaaggcattgcttgggctttcggtggcatgatctttgcccttgtctactgtactgctggaatctctggtgggcacataaacccagcggtgacatttggtctgttcttggctcgtaagctgtcattgacgagagctgtcttttacatcgtgatgcaatgtctcggagccatctgcggcgccggagttgtcaaaggcttccagccaaatccttaccaaactctcggcggaggagccaacacagtcgctcacggctacactaagggctctggtttgggtgctgagataatcggaaccttcgtccttgtctacacggtcttctccgccactgacgccaagagaagcgctcgtgactcccacgttccgattttggcaccactcccaatcggattcgctgtgttcttggttcacttggcgacgtttccaatcaccggaacaggaattaacccagctaggagtcttggagctgcaatcatctacaacaaggaccacgcttgggacgaccactggatattctgggtcggaccattcattggagcagctcttgcggctctttaccaccaacttgtcatcagagccattccattcaagtccagatcctgatttgatttctttctttataaaacttcattgttgcatcttggtttgtaattgagcttgaaaatatttgagagatctggatcatgtgtttattttaattaatggacttgtctttttcttatttgctgtggatgatctggttttatcgttaaatggagtttgatattatgattgatttggtacgat

SEQ ID NO: 25360 - protein, 286 aa, Arabidopsis thaliana
  peptide (1)..(286): Ceres Seq. ID no. 13621988
  misc_feature (1)..(286): Homolog of NCBI NO: 10799095 NR Description: aquaporin PIP1b2 [Brassica oleracea]
  misc_feature (1)..(286): Homolog of NCBI NO: 2373401 NR Description: transmembrane protein [Arabidopsis thaliana]
  misc_feature (1)..(286): Homolog of NCBI NO: 3551131 NR Description: plasma membrane aquaporin (PAQ1) [Raphanus
  misc_feature (1)..(286): Homolog of NCBI NO: 472873 NR Description: plasma membrane intrinsic protein 1a [Arabidopsis
  misc_feature (1)..(286): Homolog of NCBI NO: 7441247 NR Description: probable plasma membrane intrinsic protein 1c -
  misc_feature (1)..(286): Homolog of NCBI NO: 15233109 NR Description: plasma membrane intrinsic protein 1A [Arabidopsis
  misc_feature (1)..(286): Homolog of NCBI NO: 18411332 NR Description: transmembrane protein (MIP family) [Arabidopsis
  misc_feature (1)..(286): Homolog of NCBI NO: 472875 NR Description: plasma membrane intrinsic protein 1c [Arabidopsis
  misc_feature (1)..(286): Homolog of NCBI NO: 15223438 NR Description: plasma membrane intrinsic protein 1c [Arabidopsis
  misc_feature (1)..(286): Homolog of NCBI NO: 17065068 NR Description: plasma membrane intrinsic protein 1C
MEGKEEDVRVGANKFPERQPIGTSAQTDKDYKEPPPAPFFEPGELSSWSFYRAGIAEFIATFLFLYITVLTVMGVKRAPNMCASVGIQGIAWAFGGMIFALVYCTAGISGGHINPAVTFGLFLARKLSLTRAVFYIVMQCLGAICGAGVVKGFQPNPYQTLGGGANTVAHGYTKGSGLGAEIIGTFVLVYTVFSATDAKRSARDSHVPILAPLPIGFAVFLVHLATFPITGTGINPARSLGAAIIYNKDHAWDDHWIFWVGPFIGAALAALYHQLVIRAIPFKSRS

SEQ ID NO: 25361 - protein, 214 aa, Arabidopsis thaliana
  peptide (1)..(214): Ceres Seq. ID no. 13621989
  misc_feature (1)..(214): Homolog of NCBI NO: 10799095 NR Description: aquaporin PIP1b2 [Brassica oleracea]
  misc_feature (1)..(214): Homolog of NCBI NO: 2373401 NR Description: transmembrane protein [Arabidopsis thaliana]
  misc_feature (1)..(214): Homolog of NCBI NO: 3551131 NR Description: plasma membrane aquaporin (PAQ1) [Raphanus
  misc_feature (1)..(214): Homolog of NCBI NO: 472873 NR Description: plasma membrane intrinsic protein 1a [Arabidopsis
  misc_feature (1)..(214): Homolog of NCBI NO: 7441247 NR Description: probable plasma membrane intrinsic protein 1c -
  misc_feature (1)..(214): Homolog of NCBI NO: 15233109 NR Description: plasma membrane intrinsic protein 1A [Arabidopsis
  misc_feature (1)..(214): Homolog of NCBI NO: 18411332 NR Description: transmembrane protein (MIP family) [Arabidopsis
  misc_feature (1)..(214): Homolog of NCBI NO: 472875 NR Description: plasma membrane intrinsic protein 1c [Arabidopsis
  misc_feature (1)..(214): Homolog of NCBI NO: 15223438 NR Description: plasma membrane intrinsic protein 1c [Arabidopsis
  misc_feature (1)..(214): Homolog of NCBI NO: 17065068 NR Description: plasma membrane intrinsic protein 1C
MGVKRAPNMCASVGIQGIAWAFGGMIFALVYCTAGISGGHINPAVTFGLFLARKLSLTRAVFYIVMQCLGAICGAGVVKGFQPNPYQTLGGGANTVAHGYTKGSGLGAEIIGTFVLVYTVFSATDAKRSARDSHVPILAPLPIGFAVFLVHLATFPITGTGINPARSLGAAIIYNKDHAWDDHWIFWVGPFIGAALAALYHQLVIRAIPFKSRS

SEQ ID NO: 25362 - protein, 206 aa, Arabidopsis thaliana
  peptide (1)..(206): Ceres Seq. ID no. 13621990
  misc_feature (1)..(206): Homolog of NCBI NO: 10799095 NR Description: aquaporin PIP1b2 [Brassica oleracea]
  misc_feature (1)..(206): Homolog of NCBI NO: 2373401 NR Description: transmembrane protein [Arabidopsis thaliana]
  misc_feature (1)..(206): Homolog of NCBI NO: 3551131 NR Description: plasma membrane aquaporin (PAQ1) [Raphanus
  misc_feature (1)..(206): Homolog of NCBI NO: 472873 NR Description: plasma membrane intrinsic protein 1a [Arabidopsis
  misc_feature (1)..(206): Homolog of NCBI NO: 7441247 NR Description: probable plasma membrane intrinsic protein 1c -
  misc_feature (1)..(206): Homolog of NCBI NO: 15233109 NR Description: plasma membrane intrinsic protein 1A [Arabidopsis
  misc_feature (1)..(206): Homolog of NCBI NO: 18411332 NR Description: transmembrane protein (MIP family) [Arabidopsis
  misc_feature (1)..(206): Homolog of NCBI NO: 472875 NR Description: plasma membrane intrinsic protein 1c [Arabidopsis
  misc_feature (1)..(206): Homolog of NCBI NO: 15223438 NR Description: plasma membrane intrinsic protein 1c [Arabidopsis
  misc_feature (1)..(206): Homolog of NCBI NO: 17065068 NR Description: plasma membrane intrinsic protein 1C
MCASVGIQGIAWAFGGMIFALVYCTAGISGGHINPAVTFGLFLARKLSLTRAVFYIVMQCLGAICGAGVVKGFQPNPYQTLGGGANTVAHGYTKGSGLGAEIIGTFVLVYTVFSATDAKRSARDSHVPILAPLPIGFAVFLVHLATFPITGTGINPARSLGAAIIYNKDHAWDDHWIFWVGPFIGAALAALYHQLVIRAIPFKSRS

SEQ ID NO: 25363 - DNA, 1446 bp, Arabidopsis thaliana
  misc_feature (1)..(1446): Ceres Seq. ID no. 13494217
  misc_feature: MA Experiment ID: 108434 Result: Down-regulated in Transcription
  misc_feature: MA Experiment 108434 PARAMETER Experiment Name: At_Root_Tips_cDNA_P Parameter: Tissue Value: Root Tips
  misc_feature: MA Experiment ID: 108462 Result: Down-regulated in Transcription
  misc_feature: MA Experiment 108462 PARAMETER Experiment Name: At_Germinating_Seeds_cDNA_P Parameter: Age (day) Value: 2 vs. 0
  misc_feature: MA Experiment 108462 PARAMETER Experiment Name: At_Germinating_Seeds_cDNA_P Parameter: Tissue Value: Germinating Seeds
  misc_feature: MA Experiment ID: 108464 Result: Down-regulated in Transcription
  misc_feature: MA Experiment 108464 PARAMETER Experiment Name: At_Germinating_Seeds_cDNA_P Parameter: Age (day) Value: 4 vs. 0
  misc_feature: MA Experiment 108464 PARAMETER Experiment Name: At_Germinating_Seeds_cDNA_P Parameter: Tissue Value: Germinating Seeds
  misc_feature: MA Experiment ID: 108474 Result: Down-regulated in Transcription
  misc_feature: MA Experiment 108474 PARAMETER Experiment Name: At_Drought_Flowers_cDNA_P Parameter: Timepoint (hr) Value: null
  misc_feature: MA Experiment 108474 PARAMETER Experiment Name: At_Drought_Flowers_cDNA_P Parameter: Treatment Value: Drought vs. No Drought
  misc_feature: MA Experiment ID: 108488 Result: Down-regulated in Transcription
  misc_feature: MA Experiment ID: 108579 Result: Down-regulated in Transcription
  misc_feature: MA Experiment 108579 PARAMETER Experiment Name: At_4deg_Cold_cDNA_P Parameter: Temperature (deg C) Value: 4 vs. 22
  misc_feature: MA Experiment 108579 PARAMETER Experiment Name: At_4deg_Cold_cDNA_P Parameter: Timepoint (hr) Value: 6
  misc_feature: MA Experiment 108579 PARAMETER Experiment Name: At_4deg_Cold_cDNA_P Parameter: Tissue Value: Aerial
  misc_feature: MA Experiment ID: 108605 Result: Up-regulated in Transcription
  misc_feature: MA Experiment 108605 PARAMETER Experiment Name: At_100uM_ABA_cDNA_P Parameter: Timepoint (hr) Value: 6
  misc_feature: MA Experiment 108605 PARAMETER Experiment Name: At_100uM_ABA_cDNA_P Parameter: Tissue Value: Aerial
  misc_feature: MA Experiment 108605 PARAMETER Experiment Name: At_100uM_ABA_cDNA_P Parameter: Treatment Value: 100uM ABA vs. No Treatment
  misc_feature: MA Experiment ID: 20000071 Result: Up-regulated in Transcription
  misc_feature: MA Experiment 20000071 PARAMETER Experiment Name: At_100uM_ABA_Mutants_cDNA_P Parameter: Plant Line Value: CS8104
  misc_feature: MA Experiment 20000071 PARAMETER Experiment Name: At_100uM_ABA_Mutants_cDNA_P Parameter: Timepoint (hr) Value: 6
  misc_feature: MA Experiment 20000071 PARAMETER Experiment Name: At_100uM_ABA_Mutants_cDNA_P Parameter: Tissue Value: Aerial
  misc_feature: MA Experiment 20000071 PARAMETER Experiment Name: At_100uM_ABA_Mutants_cDNA_P Parameter: Treatment Value: 100uM ABA vs. No Treatment
  misc_feature: MA Experiment ID: 20000072 Result: Up-regulated in Transcription
  misc_feature: MA Experiment 20000072 PARAMETER Experiment Name: At_100uM_ABA_Mutants_cDNA_P Parameter: Plant Line Value: CS8105
  misc_feature: MA Experiment 20000072 PARAMETER Experiment Name: At_100uM_ABA_Mutants_cDNA_P Parameter: Timepoint (hr) Value: 6
  misc_feature: MA Experiment 20000072 PARAMETER Experiment Name: At_100uM_ABA_Mutants_cDNA_P Parameter: Tissue Value: Aerial
  misc_feature: MA Experiment 20000072 PARAMETER Experiment Name: At_100uM_ABA_Mutants_cDNA_P Parameter: Treatment Value: 100uM ABA vs. No Treatment
  misc_feature: MA Experiment ID: 20000089 Result: Down-regulated in Transcription
  misc_feature: MA Experiment ID: 20000117 Result: Up-regulated in Transcription
  misc_feature: MA Experiment 20000117 PARAMETER Experiment Name: At_100uM_ABA_Mutants_cDNA_P Parameter: Plant Line Value: Columbia
  misc_feature: MA Experiment 20000117 PARAMETER Experiment Name: At_100uM_ABA_Mutants_cDNA_P Parameter: Timepoint (hr) Value: 6
  misc_feature: MA Experiment 20000117 PARAMETER Experiment Name: At_100uM_ABA_Mutants_cDNA_P Parameter: Tissue Value: Aerial
  misc_feature: MA Experiment 20000117 PARAMETER Experiment Name: At_100uM_ABA_Mutants_cDNA_P Parameter: Treatment Value: 100uM ABA vs. No Treatment
  misc_feature: MA Experiment ID: 20000169 Result: Up-regulated in Transcription
  misc_feature: MA Experiment 20000169 PARAMETER Experiment Name: At_100uM_ABA_P Parameter: Age (day) Value: 14
  misc_feature: MA Experiment 20000169 PARAMETER Experiment Name: At_100uM_ABA_P Parameter: Organism Value: A. thaliana
  misc_feature: MA Experiment 20000169 PARAMETER Experiment Name: At_100uM_ABA_P Parameter: Plant Line Value: WS
  misc_feature: MA Experiment 20000169 PARAMETER Experiment Name: At_100uM_ABA_P Parameter: Timepoint (hr) Value: 6
  misc_feature: MA Experiment 20000169 PARAMETER Experiment Name: At_100uM_ABA_P Parameter: Tissue Value: Aerial
  misc_feature: MA Experiment 20000169 PARAMETER Experiment Name: At_100uM_ABA_P Parameter: Treatment Value: 100uM ABA vs. No Treatment
  misc_feature: MA Experiment ID: 20000179 Result: Up-regulated in Transcription
  misc_feature: MA Experiment 20000179 PARAMETER Experiment Name: At_Germinating_Seeds_P Parameter: Age (hr) Value: 6 vs. 0
  misc_feature: MA Experiment 20000179 PARAMETER Experiment Name: At_Germinating_Seeds_P Parameter: Tissue Value: Germinating Seeds
  misc_feature: MA Experiment ID: 20000227 Result: Down-regulated in Transcription
  misc_feature: MA Experiment 20000227 PARAMETER Experiment Name: At_Root-Tips-vs-Tops_P Parameter: Tissue Value: Root Tips vs. Root Tops
  misc_feature: MA Experiment ID: 20000234 Result: Down-regulated in Transcription
  misc_feature: MA Experiment 20000234 PARAMETER Experiment Name: At_Siliques_P Parameter: Age (day) Value: 21
  misc_feature: MA Experiment 20000234 PARAMETER Experiment Name: At_Siliques_P Parameter: Organism Value: A. thaliana
  misc_feature: MA Experiment 20000234 PARAMETER Experiment Name: At_Siliques_P Parameter: Plant Line Value: WS
  misc_feature: MA Experiment 20000234 PARAMETER Experiment Name: At_Siliques_P Parameter: Tissue Value: Less Than 5mm Siliques vs. Whole Plant
  misc_feature: MA Experiment ID: 20000264 Result: Up-regulated in Transcription
  misc_feature: MA Experiment 20000264 PARAMETER Experiment Name: At_Open_Flower_P Parameter: Age (day) Value: 21
  misc_feature: MA Experiment 20000264 PARAMETER Experiment Name: At_Open_Flower_P Parameter: Plant Line Value: WS
  misc_feature: MA Experiment 20000264 PARAMETER Experiment Name: At_Open_Flower_P Parameter: Tissue Value: Open Flower vs. Whole Plant
  misc_feature: MA Experiment ID: 20000269 Result: Down-regulated in Transcription
  misc_feature: MA Experiment 20000269 PARAMETER Experiment Name: At_1mM_KNO3_L-vs-H_Roots_P Parameter: Age (day) Value: 7,10,12
  misc_feature: MA Experiment 20000269 PARAMETER Experiment Name: At_1mM_KNO3_L-vs-H_Roots_P Parameter: Organism Value: A. thaliana
  misc_feature: MA Experiment 20000269 PARAMETER Experiment Name: At_1mM_KNO3_L-vs-H_Roots_P Parameter: Plant Line Value: WS
  misc_feature: MA Experiment 20000269 PARAMETER Experiment Name: At_1mM_KNO3_L-vs-H_Roots_P Parameter: Timepoint (day) Value: 7,10,12
  misc_feature: MA Experiment 20000269 PARAMETER Experiment Name: At_1mM_KNO3_L-vs-H_Roots_P Parameter: Tissue Value: Roots
  misc_feature: MA Experiment 20000269 PARAMETER Experiment Name: At_1mM_KNO3_L-vs-H_Roots_P Parameter: Treatment Value: 1mM KNO3 vs. 50mM KNO3
  misc_feature: MA Experiment ID: 20000436 Result: Up-regulated in Transcription
  misc_feature: MA Experiment 20000436 PARAMETER Experiment Name: At_Drought_P Parameter: Age (day) Value: 7
  misc_feature: MA Experiment 20000436 PARAMETER Experiment Name: At_Drought_P Parameter: Organism Value: A. thaliana
  misc_feature: MA Experiment 20000436 PARAMETER Experiment Name: At_Drought_P Parameter: Plant Line Value: WS
  misc_feature: MA Experiment 20000436 PARAMETER Experiment Name: At_Drought_P Parameter: Timepoint (hr) Value: 12
  misc_feature: MA Experiment 20000436 PARAMETER Experiment Name: At_Drought_P Parameter: Tissue Value: Whole Plant
  misc_feature: MA Experiment 20000436 PARAMETER Experiment Name: At_Drought_P Parameter: Treatment Value: Drought vs. No Drought
  misc_feature: MA Experiment ID: 20000451 Result: Down-regulated in Transcription
  misc_feature: MA Experiment 20000451 PARAMETER Experiment Name: At_CS6879_Shoots-Roots_P Parameter: Age (day) Value: 14
  misc_feature: MA Experiment 20000451 PARAMETER Experiment Name: At_CS6879_Shoots-Roots_P Parameter: Organism Value: A. thaliana
  misc_feature: MA Experiment 20000451 PARAMETER Experiment Name: At_CS6879_Shoots-Roots_P Parameter: Plant Line Value: CS6879 vs. WS
  misc_feature: MA Experiment 20000451 PARAMETER Experiment Name: At_CS6879_Shoots-Roots_P Parameter: Tissue Value: Roots
  misc_feature: MA Experiment ID: 20000456 Result: Down-regulated in Transcription
  misc_feature: MA Experiment 20000456 PARAMETER Experiment Name: At_100uM_BA_P Parameter: Age (day) Value: 14
  misc_feature: MA Experiment 20000456 PARAMETER Experiment Name: At_100uM_BA_P Parameter: Organism Value: A. thaliana
  misc_feature: MA Experiment 20000456 PARAMETER Experiment Name: At_100uM_BA_P Parameter: Plant Line Value: WS
  misc_feature: MA Experiment 20000456 PARAMETER Experiment Name: At_100uM_BA_P Parameter: Timepoint (hr) Value: 6
  misc_feature: MA Experiment 20000456 PARAMETER Experiment Name: At_100uM_BA_P Parameter: Tissue Value: Aerial
  misc_feature: MA Experiment 20000456 PARAMETER Experiment Name: At_100uM_BA_P Parameter: Treatment Value: 100uM BA vs. No Treatment
  misc_feature: MA Experiment ID: 20000573 Result: Up-regulated in Transcription
  misc_feature: MA Experiment 20000573 PARAMETER Experiment Name: At_100uM_ABA_Mutants__P Parameter: Organism Value: A. thaliana
  misc_feature: MA Experiment 20000573 PARAMETER Experiment Name: At_100uM_ABA_Mutants__P Parameter: Plant Line Value: CS22 vs. Ler wt
  misc_feature: MA Experiment 20000573 PARAMETER Experiment Name: At_100uM_ABA_Mutants__P Parameter: Timepoint (hr) Value: N/A
  misc_feature: MA Experiment 20000573 PARAMETER Experiment Name: At_100uM_ABA_Mutants__P Parameter: Tissue Value: Whole Plant
  misc_feature: MA Experiment 20000573 PARAMETER Experiment Name: At_100uM_ABA_Mutants__P Parameter: Treatment Value: None
  misc_feature: MA Experiment ID: 20000709 Result: Down-regulated in Transcription
  misc_feature: MA Experiment 20000709 PARAMETER Experiment Name: At_15mM_NH4NO3_L-to-H_P Parameter: Age (hr) Value: 14
  misc_feature: MA Experiment 20000709 PARAMETER Experiment Name: At_15mM_NH4NO3_L-to-H_P Parameter: Organism Value: A. thaliana
  misc_feature: MA Experiment 20000709 PARAMETER Experiment Name: At_15mM_NH4NO3_L-to-H_P Parameter: Plant Line Value: WS
  misc_feature: MA Experiment 20000709 PARAMETER Experiment Name: At_15mM_NH4NO3_L-to-H_P Parameter: Timepoint (hr) Value: 4
  misc_feature: MA Experiment 20000709 PARAMETER Experiment Name: At_15mM_NH4NO3_L-to-H_P Parameter: Tissue Value: Aerial
  misc_feature: MA Experiment 20000709 PARAMETER Experiment Name: At_15mM_NH4NO3_L-to-H_P Parameter: Treatment Value: 15mM NH4NO3 vs. 30mM Mannitol
  misc_feature: MA Experiment ID: 20000794 Result: Up-regulated in Transcription
  misc_feature: MA Experiment 20000794 PARAMETER Experiment Name: At_Petals_P Parameter: Age (day) Value: 23-25 days
  misc_feature: MA Experiment 20000794 PARAMETER Experiment Name: At_Petals_P Parameter: Plant Line Value: WS
  misc_feature: MA Experiment 20000794 PARAMETER Experiment Name: At_Petals_P Parameter: Tissue Value: Petals vs. Whole plant
  misc_feature: MA Experiment ID: 20001247 Result: Up-regulated in Transcription
  misc_feature: MA Experiment 20001247 PARAMETER Experiment Name: At_Far-red-induction_P Parameter: Age (day) Value: 7
  misc_feature: MA Experiment 20001247 PARAMETER Experiment Name: At_Far-red-induction_P Parameter: Light Value: Far-red vs. White
  misc_feature: MA Experiment 20001247 PARAMETER Experiment Name: At_Far-red-induction_P Parameter: Organism Value: A. thaliana
  misc_feature: MA Experiment 20001247 PARAMETER Experiment Name: At_Far-red-induction_P Parameter: Plant Line Value: Columbia
  misc_feature: MA Experiment 20001247 PARAMETER Experiment Name: At_Far-red-induction_P Parameter: Timepoint (hr) Value: 1
  misc_feature: MA Experiment 20001247 PARAMETER Experiment Name: At_Far-red-induction_P Parameter: Tissue Value: Whole Plant
  misc_feature: MA Experiment ID: 20001450 Result: Up-regulated in Transcription
  misc_feature: MA Experiment 20001450 PARAMETER Experiment Name: At_Far-red-induction_P Parameter: Age (day) Value: 7
  misc_feature: MA Experiment 20001450 PARAMETER Experiment Name: At_Far-red-induction_P Parameter: Light Value: Far-red vs. White
  misc_feature: MA Experiment 20001450 PARAMETER Experiment Name: At_Far-red-induction_P Parameter: Organism Value: A. thaliana
  misc_feature: MA Experiment 20001450 PARAMETER Experiment Name: At_Far-red-induction_P Parameter: Plant Line Value: Columbia
  misc_feature: MA Experiment 20001450 PARAMETER Experiment Name: At_Far-red-induction_P Parameter: Timepoint (hr) Value: 8
  misc_feature: MA Experiment 20001450 PARAMETER Experiment Name: At_Far-red-induction_P Parameter: Tissue Value: Whole Plant
  misc_feature: MA Experiment ID: 20001451 Result: Up-regulated in Transcription
  misc_feature: MA Experiment 20001451 PARAMETER Experiment Name: At_Far-red-induction_P Parameter: Age (day) Value: 7
  misc_feature: MA Experiment 20001451 PARAMETER Experiment Name: At_Far-red-induction_P Parameter: Light Value: Far-red vs. White
  misc_feature: MA Experiment 20001451 PARAMETER Experiment Name: At_Far-red-induction_P Parameter: Organism Value: A. thaliana
  misc_feature: MA Experiment 20001451 PARAMETER Experiment Name: At_Far-red-induction_P Parameter: Plant Line Value: Columbia
  misc_feature: MA Experiment 20001451 PARAMETER Experiment Name: At_Far-red-induction_P Parameter: Timepoint (hr) Value: 24
  misc_feature: MA Experiment 20001451 PARAMETER Experiment Name: At_Far-red-induction_P Parameter: Tissue Value: Whole Plant
  misc_feature: MA Experiment ID: 20001557 Result: Down-regulated in Transcription
  misc_feature: MA Experiment 20001557 PARAMETER Experiment Name: At_Drought_Soil_Dry_P Parameter: Age (day) Value: 27
  misc_feature: MA Experiment 20001557 PARAMETER Experiment Name: At_Drought_Soil_Dry_P Parameter: Organism Value: A. thaliana
  misc_feature: MA Experiment 20001557 PARAMETER Experiment Name: At_Drought_Soil_Dry_P Parameter: Plant Line Value: WS
  misc_feature: MA Experiment 20001557 PARAMETER Experiment Name: At_Drought_Soil_Dry_P Parameter: Post Timepoint (hr) Value: 3
  misc_feature: MA Experiment 20001557 PARAMETER Experiment Name: At_Drought_Soil_Dry_P Parameter: Post-Treatment Value: Re-Water vs. No Drought
  misc_feature: MA Experiment 20001557 PARAMETER Experiment Name: At_Drought_Soil_Dry_P Parameter: Timepoint (day) Value: 13
  misc_feature: MA Experiment 20001557 PARAMETER Experiment Name: At_Drought_Soil_Dry_P Parameter: Treatment Value: Drought vs. No Drought
  misc_feature: MA Experiment ID: 20001558 Result: Down-regulated in Transcription
  misc_feature: MA Experiment 20001558 PARAMETER Experiment Name: At_Drought_Soil_Dry_P Parameter: Age (day) Value: 27
  misc_feature: MA Experiment 20001558 PARAMETER Experiment Name: At_Drought_Soil_Dry_P Parameter: Organism Value: A. thaliana
  misc_feature: MA Experiment 20001558 PARAMETER Experiment Name: At_Drought_Soil_Dry_P Parameter: Plant Line Value: WS
  misc_feature: MA Experiment 20001558 PARAMETER Experiment Name: At_Drought_Soil_Dry_P Parameter: Post Timepoint (hr) Value: 6
  misc_feature: MA Experiment 20001558 PARAMETER Experiment Name: At_Drought_Soil_Dry_P Parameter: Post-Treatment Value: Re-Water vs. No Drought
  misc_feature: MA Experiment 20001558 PARAMETER Experiment Name: At_Drought_Soil_Dry_P Parameter: Timepoint (day) Value: 13
  misc_feature: MA Experiment 20001558 PARAMETER Experiment Name: At_Drought_Soil_Dry_P Parameter: Treatment Value: Drought vs. No Drought
  misc_feature: MA Experiment ID: 20001757 Result: Down-regulated in Transcription
  misc_feature: MA Experiment 20001757 PARAMETER Experiment Name: At_50mM_NH4NO3_L-to-H_P Parameter: Timepoint (hr) Value: 6
  misc_feature: MA Experiment 20001757 PARAMETER Experiment Name: At_50mM_NH4NO3_L-to-H_P Parameter: Tissue Value: Leaf
  misc_feature: MA Experiment 20001757 PARAMETER Experiment Name: At_50mM_NH4NO3_L-to-H_P Parameter: Treatment Value: 50mM NH4NO3 vs 100mM Mannitol
  misc_feature: MA Experiment ID: 20001905 Result: Up-regulated in Transcription
  misc_feature: MA Experiment 20001905 PARAMETER Experiment Name: At_Drought_Reproduction_P Parameter: Age (day) Value: 40
  misc_feature: MA Experiment 20001905 PARAMETER Experiment Name: At_Drought_Reproduction_P Parameter: Organism Value: A. thaliana
  misc_feature: MA Experiment 20001905 PARAMETER Experiment Name: At_Drought_Reproduction_P Parameter: Plant Line Value: WS
  misc_feature: MA Experiment 20001905 PARAMETER Experiment Name: At_Drought_Reproduction_P Parameter: Timepoint (day) Value: 10
  misc_feature: MA Experiment 20001905 PARAMETER Experiment Name: At_Drought_Reproduction_P Parameter: Tissue Value: Rosettes
  misc_feature: MA Experiment 20001905 PARAMETER Experiment Name: At_Drought_Reproduction_P Parameter: Treatment Value: Drought vs. No Drought
  misc_feature: MA Experiment ID: 20001906 Result: Up-regulated in Transcription
  misc_feature: MA Experiment 20001906 PARAMETER Experiment Name: At_Drought_Reproduction_P Parameter: Age (day) Value: 35
  misc_feature: MA Experiment 20001906 PARAMETER Experiment Name: At_Drought_Reproduction_P Parameter: Organism Value: A. thaliana
  misc_feature: MA Experiment 20001906 PARAMETER Experiment Name: At_Drought_Reproduction_P Parameter: Plant Line Value: WS
  misc_feature: MA Experiment 20001906 PARAMETER Experiment Name: At_Drought_Reproduction_P Parameter: Timepoint (day) Value: 5
  misc_feature: MA Experiment 20001906 PARAMETER Experiment Name: At_Drought_Reproduction_P Parameter: Tissue Value: Siliques
  misc_feature: MA Experiment 20001906 PARAMETER Experiment Name: At_Drought_Reproduction_P Parameter: Treatment Value: Drought vs. No Drought
atagtttttgtttttccttttgctactctacatgactctcgatcgagggaaaaaactagttctcatgtttatccaaaactctatatcacctttttgatgtttttatataagaagacttgttcatccatactctttcaataaccttgacagaaaaaaaaaataaacacaaaatttcaataaccatggagggtgttagtgcaactatgcataagttaaggccttatttgttaatgatctttttgcaatttggagcagcaggaacatatattgttattatggccactcttaaccaaggccagaaccgttacgtcgtaattgtgtatcgtaatcttgtggctgctcttgtccttgcacattttgcactcatctttgaaaggaaagtgaggccgaagatgacactatcggttttgtggaaaataatggcacttggtttcttagagccagtcttggatcagggttttggttacttggggatgaacatgacatcagcaacatatacatctgcgatcatgaacattcttccttctgtcacatttataatagcttggattttaagaatggagaaagttaacatagcggaggtacgaagcaaagcaaagatcattgggacattggtgggtcttggaggggcactagtaatgacattgtacaaaggtccgcttattcctttaccgtggtctaacccgaatatggatcaacaaaacggacatacaaataattcacaagaccataacaattgggttgttggaaccttgttgattctcctcggttgtgttgcttggtctggtttttatgttttacagtcgataacaataaagacgtaccctgccgatctttcattatcagccttaatatgcctagccggggctgtccaaagcttcgcggtagcgcttgtggtggagagacaccctagcggatgggcggttggttgggatgcaaggctttttgcacctctttatacaggaatagttagctcggggataacgtactatgttcaagggatggttatgaagacgagagggccagtttttgttactgcctttaaccctctctgcatgattcttgtagctctcattgcctcttttattcttcatgaacaaatccatttcggatgtgtaataggaggggcagtgatcgccgcgggtttgtatatggttgtttggggaaaaggaaaagactatgaagtatccggattagatatccttgaaaagaatagcctccaagaattgcctatcacaactaaaagtgaggatgacaacaaattggtttcttctataagcgacaacagcaatgtgaccattcctggtggtgcgcatagtaacacatctggaatataagtgaagaaagcatttctcgagttataaatacatatttgtattcgactaaaataaatacatatgtatttgtatgcatttggtatgaaatacatgaaattatttttatgtt

SEQ ID NO: 25364 - protein, 384 aa, Arabidopsis thaliana
  peptide (1)..(384): Ceres Seq. ID no. 13494218
  misc_feature (198)..(327): Pfam Name: Integral membrane protein DUF6 Pfam Description: Integral membrane protein DUF6
  misc_feature (17)..(363): Homolog of NCBI NO: 21553757 NR Description: nodulin-like protein [Arabidopsis thaliana]
  misc_feature (1)..(372): Homolog of NCBI NO: 15219448 NR Description: nodulin MtN21 family protein [Arabidopsis
  misc_feature (8)..(359): Homolog of NCBI NO: 21553533 NR Description: nodulin protein, putative [Arabidopsis thaliana]
  misc_feature (15)..(67): Homolog of NCBI NO: 37532392 NR Description: putative nodulin-like protein
  misc_feature (56)..(358): Homolog of NCBI NO: 37532392 NR Description: putative nodulin-like protein
  misc_feature (8)..(363): Homolog of NCBI NO: 15224291 NR Description: nodulin MtN21 family protein [Arabidopsis
  misc_feature (12)..(353): Homolog of NCBI NO: 15225480 NR Description: nodulin MtN21 family protein [Arabidopsis
  misc_feature (8)..(384): Homolog of NCBI NO: 21593603 NR Description: nodulin-like protein [Arabidopsis thaliana]
  misc_feature (1)..(384): Homolog of NCBI NO: 15236455 NR Description: nodulin MtN21 family protein [Arabidopsis
  misc_feature (1)..(384): Homolog of NCBI NO: 26452235 NR Description: putative nodulin [Arabidopsis thaliana]
MEGVSATMHKLRPYLLMIFLQFGAAGTYIVIMATLNQGQNRYVVIVYRNLVAALVLAHFALIFERKVRPKMTLSVLWKIMALGFLEPVLDQGFGYLGMNMTSATYTSAIMNILPSVTFIIAWILRMEKVNIAEVRSKAKIIGTLVGLGGALVMTLYKGPLIPLPWSNPNMDQQNGHTNNSQDHNNWVVGTLLILLGCVAWSGFYVLQSITIKTYPADLSLSALICLAGAVQSFAVALVVERHPSGWAVGWDARLFAPLYTGIVSSGITYYVQGMVMKTRGPVFVTAFNPLCMILVALIASFILHEQIHFGCVIGGAVIAAGLYMVVWGKGKDYEVSGLDILEKNSLQELPITTKSEDDNKLVSSISDNSNVTIPGGAHSNTSGI

SEQ ID NO: 25365 - protein, 377 aa, Arabidopsis thaliana
  peptide (1)..(377): Ceres Seq. ID no. 13494219
  misc_feature (191)..(320): Pfam Name: Integral membrane protein DUF6 Pfam Description: Integral membrane protein DUF6
  misc_feature (1)..(377): Homolog of NCBI NO: 26452235 NR Description: putative nodulin [Arabidopsis thaliana]
  misc_feature (10)..(356): Homolog of NCBI NO: 21553757 NR Description: nodulin-like protein [Arabidopsis thaliana]
  misc_feature (1)..(365): Homolog of NCBI NO: 15219448 NR Description: nodulin MtN21 family protein [Arabidopsis
  misc_feature (1)..(352): Homolog of NCBI NO: 21553533 NR Description: nodulin protein, putative [Arabidopsis thaliana]
  misc_feature (8)..(60): Homolog of NCBI NO: 37532392 NR Description: putative nodulin-like protein
  misc_feature (49)..(351): Homolog of NCBI NO: 37532392 NR Description: putative nodulin-like protein
  misc_feature (1)..(356): Homolog of NCBI NO: 15224291 NR Description: nodulin MtN21 family protein [Arabidopsis
  misc_feature (5)..(346): Homolog of NCBI NO: 15225480 NR Description: nodulin MtN21 family protein [Arabidopsis
  misc_feature (1)..(377): Homolog of NCBI NO: 21593603 NR Description: nodulin-like protein [Arabidopsis thaliana]
  misc_feature (1)..(377): Homolog of NCBI NO: 15236455 NR Description: nodulin MtN21 family protein [Arabidopsis
MHKLRPYLLMIFLQFGAAGTYIVIMATLNQGQNRYVVIVYRNLVAALVLAHFALIFERKVRPKMTLSVLWKIMALGFLEPVLDQGFGYLGMNMTSATYTSAIMNILPSVTFIIAWILRMEKVNIAEVRSKAKIIGTLVGLGGALVMTLYKGPLIPLPWSNPNMDQQNGHTNNSQDHNNWVVGTLLILLGCVAWSGFYVLQSITIKTYPADLSLSALICLAGAVQSFAVALVVERHPSGWAVGWDARLFAPLYTGIVSSGITYYVQGMVMKTRGPVFVTAFNPLCMILVALIASFILHEQIHFGCVIGGAVIAAGLYMVVWGKGKDYEVSGLDILEKNSLQELPITTKSEDDNKLVSSISDNSNVTIPGGAHSNTSGI

SEQ ID NO: 25366 - protein, 368 aa, Arabidopsis thaliana
  peptide (1)..(368): Ceres Seq. ID no. 13494220
  misc_feature (182)..(311): Pfam Name: Integral membrane protein DUF6 Pfam Description: Integral membrane protein DUF6
  misc_feature (1)..(347): Homolog of NCBI NO: 21553757 NR Description: nodulin-like protein [Arabidopsis thaliana]
  misc_feature (1)..(356): Homolog of NCBI NO: 15219448 NR Description: nodulin MtN21 family protein [Arabidopsis
  misc_feature (1)..(343): Homolog of NCBI NO: 21553533 NR Description: nodulin protein, putative [Arabidopsis thaliana]
  misc_feature (1)..(51): Homolog of NCBI NO: 37532392 NR Description: putative nodulin-like protein
  misc_feature (40)..(342): Homolog of NCBI NO: 37532392 NR Description: putative nodulin-like protein
  misc_feature (1)..(347): Homolog of NCBI NO: 15224291 NR Description: nodulin MtN21 family protein [Arabidopsis
  misc_feature (1)..(337): Homolog of NCBI NO: 15225480 NR Description: nodulin MtN21 family protein [Arabidopsis
  misc_feature (1)..(368): Homolog of NCBI NO: 21593603 NR Description: nodulin-like protein [Arabidopsis thaliana]
  misc_feature (1)..(368): Homolog of NCBI NO: 15236455 NR Description: nodulin MtN21 family protein [Arabidopsis
  misc_feature (1)..(368): Homolog of NCBI NO: 26452235 NR Description: putative nodulin [Arabidopsis thaliana]
MIFLQFGAAGTYIVIMATLNQGQNRYVVIVYRNLVAALVLAHFALIFERKVRPKMTLSVLWKIMALGFLEPVLDQGFGYLGMNMTSATYTSAIMNILPSVTFIIAWILRMEKVNIAEVRSKAKIIGTLVGLGGALVMTLYKGPLIPLPWSNPNMDQQNGHTNNSQDHNNWVVGTLLILLGCVAWSGFYVLQSITIKTYPADLSLSALICLAGAVQSFAVALVVERHPSGWAVGWDARLFAPLYTGIVSSGITYYVQGMVMKTRGPVFVTAFNPLCMILVALIASFILHEQIHFGCVIGGAVIAAGLYMVVWGKGKDYEVSGLDILEKNSLQELPITTKSEDDNKLVSSISDNSNVTIPGGAHSNTSGI

SEQ ID NO: 25367 - DNA, 1194 bp, Arabidopsis thaliana
  misc_feature (1)..(1194): Ceres Seq. ID no. 12327686
  misc_feature: MA Experiment ID: 108434 Result: Down-regulated in Transcription
  misc_feature: MA Experiment 108434 PARAMETER Experiment Name: At_Root_Tips_cDNA_P Parameter: Tissue Value: Root Tips
  misc_feature: MA Experiment ID: 108463 Result: Up-regulated in Transcription
  misc_feature: MA Experiment 108463 PARAMETER Experiment Name: At_Germinating_Seeds_cDNA_P Parameter: Age (day) Value: 3 vs. 0
  misc_feature: MA Experiment 108463 PARAMETER Experiment Name: At_Germinating_Seeds_cDNA_P Parameter: Tissue Value: Germinating Seeds
  misc_feature: MA Experiment ID: 108464 Result: Up-regulated in Transcription
  misc_feature: MA Experiment 108464 PARAMETER Experiment Name: At_Germinating_Seeds_cDNA_P Parameter: Age (day) Value: 4 vs. 0
  misc_feature: MA Experiment 108464 PARAMETER Experiment Name: At_Germinating_Seeds_cDNA_P Parameter: Tissue Value: Germinating Seeds
  misc_feature: MA Experiment ID: 108594 Result: Up-regulated in Transcription
  misc_feature: MA Experiment 108594 PARAMETER Experiment Name: At_Ler-rhl_Root_cDNA_P Parameter: Plant Line Value: null
  misc_feature: MA Experiment ID: 20000227 Result: Down-regulated in Transcription
  misc_feature: MA Experiment 20000227 PARAMETER Experiment Name: At_Root-Tips-vs-Tops_P Parameter: Tissue Value: Root Tips vs. Root Tops
  misc_feature: MA Experiment ID: 20000264 Result: Down-regulated in Transcription
  misc_feature: MA Experiment 20000264 PARAMETER Experiment Name: At_Open_Flower_P Parameter: Age (day) Value: 21
  misc_feature: MA Experiment 20000264 PARAMETER Experiment Name: At_Open_Flower_P Parameter: Plant Line Value: WS
  misc_feature: MA Experiment 20000264 PARAMETER Experiment Name: At_Open_Flower_P Parameter: Tissue Value: Open Flower vs. Whole Plant
  misc_feature: MA Experiment ID: 20000265 Result: Down-regulated in Transcription
  misc_feature: MA Experiment 20000265 PARAMETER Experiment Name: At_Open_Flower_P Parameter: Age (day) Value: 21
  misc_feature: MA Experiment 20000265 PARAMETER Experiment Name: At_Open_Flower_P Parameter: Plant Line Value: WS
  misc_feature: MA Experiment 20000265 PARAMETER Experiment Name: At_Open_Flower_P Parameter: Tissue Value: Closed Flower vs. Whole Plant
  misc_feature: MA Experiment ID: 20000267 Result: Down-regulated in Transcription
  misc_feature: MA Experiment 20000267 PARAMETER Experiment Name: At_Drought_P Parameter: Age (day) Value: 7
  misc_feature: MA Experiment 20000267 PARAMETER Experiment Name: At_Drought_P Parameter: Organism Value: A. thaliana
  misc_feature: MA Experiment 20000267 PARAMETER Experiment Name: At_Drought_P Parameter: Plant Line Value: WS
  misc_feature: MA Experiment 20000267 PARAMETER Experiment Name: At_Drought_P Parameter: Timepoint (hr) Value: 6
  misc_feature: MA Experiment 20000267 PARAMETER Experiment Name: At_Drought_P Parameter: Tissue Value: Whole Plant
  misc_feature: MA Experiment 20000267 PARAMETER Experiment Name: At_Drought_P Parameter: Treatment Value: Drought vs. No Drought
  misc_feature: MA Experiment ID: 20000438 Result: Down-regulated in Transcription
  misc_feature: MA Experiment 20000438 PARAMETER Experiment Name: At_Shoots__P Parameter: Age (day) Value: 14
  misc_feature: MA Experiment 20000438 PARAMETER Experiment Name: At_Shoots__P Parameter: Tissue Value: Shoots vs. Whole Plant
  misc_feature: MA Experiment ID: 20000451 Result: Up-regulated in Transcription
  misc_feature: MA Experiment 20000451 PARAMETER Experiment Name: At_CS6879_Shoots-Roots_P Parameter: Age (day) Value: 14
  misc_feature: MA Experiment 20000451 PARAMETER Experiment Name: At_CS6879_Shoots-Roots_P Parameter: Organism Value: A. thaliana
  misc_feature: MA Experiment 20000451 PARAMETER Experiment Name: At_CS6879_Shoots-Roots_P Parameter: Plant Line Value: CS6879 vs. WS
  misc_feature: MA Experiment 20000451 PARAMETER Experiment Name: At_CS6879_Shoots-Roots_P Parameter: Tissue Value: Roots
  misc_feature: MA Experiment ID: 20000460 Result: Down-regulated in Transcription
  misc_feature: MA Experiment 20000460 PARAMETER Experiment Name: At_10percent_PEG_P Parameter: Age (day) Value: 12
  misc_feature: MA Experiment 20000460 PARAMETER Experiment Name: At_10percent_PEG_P Parameter: Organism Value: A. thaliana
  misc_feature: MA Experiment 20000460 PARAMETER Experiment Name: At_10percent_PEG_P Parameter: Plant Line Value: WS
  misc_feature: MA Experiment 20000460 PARAMETER Experiment Name: At_10percent_PEG_P Parameter: Timepoint (day) Value: 12
  misc_feature: MA Experiment 20000460 PARAMETER Experiment Name: At_10percent_PEG_P Parameter: Tissue Value: Whole Plant
  misc_feature: MA Experiment 20000460 PARAMETER Experiment Name: At_10percent_PEG_P Parameter: Treatment Value: 10percent PEG vs. No Treatment
  misc_feature: MA Experiment ID: 20000527 Result: Down-regulated in Transcription
  misc_feature: MA Experiment 20000527 PARAMETER Experiment Name: At_10percent_PEG_P Parameter: Age (day) Value: 20
  misc_feature: MA Experiment 20000527 PARAMETER Experiment Name: At_10percent_PEG_P Parameter: Organism Value: A. thaliana
  misc_feature: MA Experiment 20000527 PARAMETER Experiment Name: At_10percent_PEG_P Parameter: Plant Line Value: WS
  misc_feature: MA Experiment 20000527 PARAMETER Experiment Name: At_10percent_PEG_P Parameter: Timepoint (day) Value: 20
  misc_feature: MA Experiment 20000527 PARAMETER Experiment Name: At_10percent_PEG_P Parameter: Tissue Value: Whole Plant
  misc_feature: MA Experiment 20000527 PARAMETER Experiment Name: At_10percent_PEG_P Parameter: Treatment Value: 10percent PEG vs. No Treatment
  misc_feature: MA Experiment ID: 20001247 Result: Down-regulated in Transcription
  misc_feature: MA Experiment 20001247 PARAMETER Experiment Name: At_Far-red-induction_P Parameter: Age (day) Value: 7
  misc_feature: MA Experiment 20001247 PARAMETER Experiment Name: At_Far-red-induction_P Parameter: Light Value: Far-red vs. White
  misc_feature: MA Experiment 20001247 PARAMETER Experiment Name: At_Far-red-induction_P Parameter: Organism Value: A. thaliana
  misc_feature: MA Experiment 20001247 PARAMETER Experiment Name: At_Far-red-induction_P Parameter: Plant Line Value: Columbia
  misc_feature: MA Experiment 20001247 PARAMETER Experiment Name: At_Far-red-induction_P Parameter: Timepoint (hr) Value: 1
  misc_feature: MA Experiment 20001247 PARAMETER Experiment Name: At_Far-red-induction_P Parameter: Tissue Value: Whole Plant
  misc_feature: MA Experiment ID: 20001450 Result: Down-regulated in Transcription
  misc_feature: MA Experiment 20001450 PARAMETER Experiment Name: At_Far-red-induction_P Parameter: Age (day) Value: 7
  misc_feature: MA Experiment 20001450 PARAMETER Experiment Name: At_Far-red-induction_P Parameter: Light Value: Far-red vs. White
  misc_feature: MA Experiment 20001450 PARAMETER Experiment Name: At_Far-red-induction_P Parameter: Organism Value: A. thaliana
  misc_feature: MA Experiment 20001450 PARAMETER Experiment Name: At_Far-red-induction_P Parameter: Plant Line Value: Columbia
  misc_feature: MA Experiment 20001450 PARAMETER Experiment Name: At_Far-red-induction_P Parameter: Timepoint (hr) Value: 8
  misc_feature: MA Experiment 20001450 PARAMETER Experiment Name: At_Far-red-induction_P Parameter: Tissue Value: Whole Plant
aataaactatctctttagtaagtcttttaaacaagctatctagacaatgaaaacacaaaccaaagtgatgggaggacatgtcttgcttactgttttcactctttgtatgctttgttcaggggttagggcacagctaagccctgacatttatgctaaatcgtgccccaatctagttcaaattgtccgtaaacaagttgccatcgccctgaaggccgagatacggatggctgcttctctcattcgtcttcatttccacgactgctttgttaatgggtgtgatgcgtcgttattgttggatggagctgacagcgagaaactcgcgatcccaaacattaactctgctagaggatttgaagtaattgatacaatcaaagccgctgtggaaaacgcatgtcctggtgttgtttcttgtgctgatatcctcactttggccgctcgtgactccgttgtattgagtggagggcctgggtggagagtggcattaggaagaaaagatggattggtggcaaatcagaacagtgcaaacaatctaccatctccttttgaacctttagacgccattatcgccaaatttgtagccgtaaaccttaacatcaccgacgtcgtagctttatcaggagctcacacctttggacaagcgaagtgtgctgtcttcagcaaccgtctgttcaactttaccggcgcgggaaatcccgacgcaacacttgagacatcactcttgtctaatctgcaaacagtttgtccgctcggaggaaatagtaacataacagcacctcttgacaggagcactacggacaccttcgacaacaattatttcaagaacctgcttgaaggaaaaggtcttttgagttctgatcagattctgttctcgagtgacttagccgtgaacaccacaaagaaactagtggaggcttatagtcggagccagagcttgtttttcagggacttcacatgtgcgatgatcagaatgggaaacatttcgaatggagctagtggggaggttaggacaaactgcagggttatcaataattagcatgtgtgtgtgttttcgagtttatgtaatgtttgggagttgatcggtctcgtgtgtatcagaatgatcacgtgtgtaataataagaattaatggggtttgttggtttgcctaattaaaagtgatttggtaaacctggaaattttcattgattttaaaatt

SEQ ID NO: 25368 - protein, 328 aa, Arabidopsis thaliana
  peptide (1)..(328): Ceres Seq. ID no. 12327687
  misc_feature (46)..(293): Pfam Name: Peroxidase Pfam Description: Peroxidase
  misc_feature (12)..(328): Homolog of NCBI NO: 19698448 NR Description: gaiacol peroxidase [Gossypium hirsutum]
  misc_feature (9)..(327): Homolog of NCBI NO: 21594792 NR Description: peroxidase [Arabidopsis thaliana]
  misc_feature (16)..(327): Homolog of NCBI NO: 7433039 NR Description: peroxidase (EC 1.11.1.7) poxN [similarity] - rice
  misc_feature (28)..(328): Homolog of NCBI NO: 1279654 NR Description: peroxidase [Populus balsamifera subsp.
  misc_feature (16)..(327): Homolog of NCBI NO: 1853975 NR Description: putative peroxidase [Oryza sativa (japonica
  misc_feature (1)..(327): Homolog of NCBI NO: 26398017 NR Description: Peroxidase N precursor (Neutral peroxidase)
  misc_feature (29)..(328): Homolog of NCBI NO: 7245406 NR Description: Chain A, Arabidopsis Thaliana Peroxidase N
  misc_feature (1)..(328): Homolog of NCBI NO: 21593604 NR Description: peroxidase ATP N [Arabidopsis thaliana]
  misc_feature (1)..(328): Homolog of NCBI NO: 18420061 NR Description: peroxidase, putative
  misc_feature (1)..(328): Homolog of NCBI NO: 1403134 NR Description: peroxidase [Arabidopsis thaliana]
MKTQTKVMGGHVLLTVFTLCMLCSGVRAQLSPDIYAKSCPNLVQIVRKQVAIALKAEIRMAASLIRLHFHDCFVNGCDASLLLDGADSEKLAIPNINSARGFEVIDTIKAAVENACPGVVSCADILTLAARDSVVLSGGPGWRVALGRKDGLVANQNSANNLPSPFEPLDAIIAKFVAVNLNITDVVALSGAHTFGQAKCAVFSNRLFNFTGAGNPDATLETSLLSNLQTVCPLGGNSNITAPLDRSTTDTFDNNYFKNLLEGKGLLSSDQILFSSDLAVNTTKKLVEAYSRSQSLFFRDFTCAMIRMGNISNGASGEVRTNCRVINN

SEQ ID NO: 25369 - protein, 321 aa, Arabidopsis thaliana
  peptide (1)..(321): Ceres Seq. ID no. 12327688
  misc_feature (39)..(286): Pfam Name: Peroxidase Pfam Description: Peroxidase
  misc_feature (5)..(321): Homolog of NCBI NO: 19698448 NR Description: gaiacol peroxidase [Gossypium hirsutum]
  misc_feature (2)..(320): Homolog of NCBI NO: 21594792 NR Description: peroxidase [Arabidopsis thaliana]
  misc_feature (9)..(320): Homolog of NCBI NO: 7433039 NR Description: peroxidase (EC 1.11.1.7) poxN [similarity] - rice
  misc_feature (21)..(321): Homolog of NCBI NO: 1279654 NR Description: peroxidase [Populus balsamifera subsp.
  misc_feature (9)..(320): Homolog of NCBI NO: 1853975 NR Description: putative peroxidase [Oryza sativa (japonica
  misc_feature (1)..(320): Homolog of NCBI NO: 26398017 NR Description: Peroxidase N precursor (Neutral peroxidase)
  misc_feature (22)..(321): Homolog of NCBI NO: 7245406 NR Description: Chain A, Arabidopsis Thaliana Peroxidase N
  misc_feature (1)..(321): Homolog of NCBI NO: 21593604 NR Description: peroxidase ATP N [Arabidopsis thaliana]
  misc_feature (1)..(321): Homolog of NCBI NO: 18420061 NR Description: peroxidase, putative
  misc_feature (1)..(321): Homolog of NCBI NO: 1403134 NR Description: peroxidase [Arabidopsis thaliana]
MGGHVLLTVFTLCMLCSGVRAQLSPDIYAKSCPNLVQIVRKQVAIALKAEIRMAASLIRLHFHDCFVNGCDASLLLDGADSEKLAIPNINSARGFEVIDTIKAAVENACPGVVSCADILTLAARDSVVLSGGPGWRVALGRKDGLVANQNSANNLPSPFEPLDAIIAKFVAVNLNITDVVALSGAHTFGQAKCAVFSNRLFNFTGAGNPDATLETSLLSNLQTVCPLGGNSNITAPLDRSTTDTFDNNYFKNLLEGKGLLSSDQILFSSDLAVNTTKKLVEAYSRSQSLFFRDFTCAMIRMGNISNGASGEVRTNCRVINN

SEQ ID NO: 25370 - protein, 308 aa, Arabidopsis thaliana
  peptide (1)..(308): Ceres Seq. ID no. 12327689
  misc_feature (26)..(273): Pfam Name: Peroxidase Pfam Description: Peroxidase
  misc_feature (1)..(308): Homolog of NCBI NO: 19698448 NR Description: gaiacol peroxidase [Gossypium hirsutum]
  misc_feature (1)..(307): Homolog of NCBI NO: 21594792 NR Description: peroxidase [Arabidopsis thaliana]
  misc_feature (1)..(307): Homolog of NCBI NO: 7433039 NR Description: peroxidase (EC 1.11.1.7) poxN [similarity] - rice
  misc_feature (8)..(308): Homolog of NCBI NO: 1279654 NR Description: peroxidase [Populus balsamifera subsp.
  misc_feature (1)..(307): Homolog of NCBI NO: 1853975 NR Description: putative peroxidase [Oryza sativa (japonica
  misc_feature (1)..(307): Homolog of NCBI NO: 26398017 NR Description: Peroxidase N precursor (Neutral peroxidase)
  misc_feature (9)..(308): Homolog of NCBI NO: 7245406 NR Description: Chain A, Arabidopsis Thaliana Peroxidase N
  misc_feature (1)..(308): Homolog of NCBI NO: 21593604 NR Description: peroxidase ATP N [Arabidopsis thaliana]
  misc_feature (1)..(308): Homolog of NCBI NO: 18420061 NR Description: peroxidase, putative
  misc_feature (1)..(308): Homolog of NCBI NO: 1403134 NR Description: peroxidase [Arabidopsis thaliana]
MLCSGVRAQLSPDIYAKSCPNLVQIVRKQVAIALKAEIRMAASLIRLHFHDCFVNGCDASLLLDGADSEKLAIPNINSARGFEVIDTIKAAVENACPGVVSCADILTLAARDSVVLSGGPGWRVALGRKDGLVANQNSANNLPSPFEPLDAIIAKFVAVNLNITDVVALSGAHTFGQAKCAVFSNRLFNFTGAGNPDATLETSLLSNLQTVCPLGGNSNITAPLDRSTTDTFDNNYFKNLLEGKGLLSSDQILFSSDLAVNTTKKLVEAYSRSQSLFFRDFTCAMIRMGNISNGASGEVRTNCRVINN

SEQ ID NO: 25371 - DNA, 1223 bp, Arabidopsis thaliana
  misc_feature (1)..(1223): Ceres Seq. ID no. 13490775
  misc_feature: MA Experiment ID: 108433 Result: Up-regulated in Transcription
  misc_feature: MA Experiment 108433 PARAMETER Experiment Name: At_rhl_Mutant2_cDNA_P Parameter: Age (day) Value: 7
  misc_feature: MA Experiment 108433 PARAMETER Experiment Name: At_rhl_Mutant2_cDNA_P Parameter: Organism Value: A. thaliana
  misc_feature: MA Experiment 108433 PARAMETER Experiment Name: At_rhl_Mutant2_cDNA_P Parameter: Plant Line Value: rhl Mutant vs. wt landsburg
  misc_feature: MA Experiment 108433 PARAMETER Experiment Name: At_rhl_Mutant2_cDNA_P Parameter: Tissue Value: Roots
  misc_feature: MA Experiment ID: 108434 Result: Down-regulated in Transcription
  misc_feature: MA Experiment 108434 PARAMETER Experiment Name: At_Root_Tips_cDNA_P Parameter: Tissue Value: Root Tips
  misc_feature: MA Experiment ID: 108461 Result: Up-regulated in Transcription
  misc_feature: MA Experiment 108461 PARAMETER Experiment Name: At_Germinating_Seeds_cDNA_P Parameter: Age (day) Value: 1 vs. 0
  misc_feature: MA Experiment 108461 PARAMETER Experiment Name: At_Germinating_Seeds_cDNA_P Parameter: Tissue Value: Germinating Seeds
  misc_feature: MA Experiment ID: 108462 Result: Up-regulated in Transcription
  misc_feature: MA Experiment 108462 PARAMETER Experiment Name: At_Germinating_Seeds_cDNA_P Parameter: Age (day) Value: 2 vs. 0
  misc_feature: MA Experiment 108462 PARAMETER Experiment Name: At_Germinating_Seeds_cDNA_P Parameter: Tissue Value: Germinating Seeds
  misc_feature: MA Experiment ID: 108463 Result: Up-regulated in Transcription
  misc_feature: MA Experiment 108463 PARAMETER Experiment Name: At_Germinating_Seeds_cDNA_P Parameter: Age (day) Value: 3 vs. 0
  misc_feature: MA Experiment 108463 PARAMETER Experiment Name: At_Germinating_Seeds_cDNA_P Parameter: Tissue Value: Germinating Seeds
  misc_feature: MA Experiment ID: 108469 Result: Up-regulated in Transcription
  misc_feature: MA Experiment ID: 108501 Result: Up-regulated in Transcription
  misc_feature: MA Experiment 108501 PARAMETER Experiment Name: At_ap2_floral_buds_cDNA_P Parameter: Plant Line Value: ap2 (Ler.)
  misc_feature: MA Experiment 108501 PARAMETER Experiment Name: At_ap2_floral_buds_cDNA_P Parameter: Tissue Value: Closed Flower
  misc_feature: MA Experiment ID: 108561 Result: Up-regulated in Transcription
  misc_feature: MA Experiment 108561 PARAMETER Experiment Name: At_100uM_ABA_cDNA_P Parameter: Timepoint (hr) Value: 6
  misc_feature: MA Experiment 108561 PARAMETER Experiment Name: At_100uM_ABA_cDNA_P Parameter: Tissue Value: Aerial
  misc_feature: MA Experiment 108561 PARAMETER Experiment Name: At_100uM_ABA_cDNA_P Parameter: Treatment Value: 100uM ABA vs. No Treatment
  misc_feature: MA Experiment ID: 108585 Result: Up-regulated in Transcription
  misc_feature: MA Experiment 108585 PARAMETER Experiment Name: At_5mM_NaNP_cDNA_P Parameter: Timepoint (hr) Value: 6
  misc_feature: MA Experiment 108585 PARAMETER Experiment Name: At_5mM_NaNP_cDNA_P Parameter: Tissue Value: Aerial
  misc_feature: MA Experiment 108585 PARAMETER Experiment Name: At_5mM_NaNP_cDNA_P Parameter: Treatment Value: null
  misc_feature: MA Experiment ID: 108594 Result: Down-regulated in Transcription
  misc_feature: MA Experiment 108594 PARAMETER Experiment Name: At_Ler-rhl_Root_cDNA_P Parameter: Plant Line Value: null
  misc_feature: MA Experiment ID: 108607 Result: Up-regulated in Transcription
  misc_feature: MA Experiment 108607 PARAMETER Experiment Name: At_100uM_ABA_cDNA_P Parameter: Timepoint (hr) Value: 4
  misc_feature: MA Experiment 108607 PARAMETER Experiment Name: At_100uM_ABA_cDNA_P Parameter: Tissue Value: Aerial
  misc_feature: MA Experiment 108607 PARAMETER Experiment Name: At_100uM_ABA_cDNA_P Parameter: Treatment Value: 100uM ABA vs. No Treatment
  misc_feature: MA Experiment ID: 108668 Result: Up-regulated in Transcription
  misc_feature: MA Experiment 108668 PARAMETER Experiment Name: At_2mM_SA_cDNA_P Parameter: Plant Line Value: WS
  misc_feature: MA Experiment 108668 PARAMETER Experiment Name: At_2mM_SA_cDNA_P Parameter: Timepoint (hr) Value: 6
  misc_feature: MA Experiment 108668 PARAMETER Experiment Name: At_2mM_SA_cDNA_P Parameter: Treatment Value: 2mM SA vs. No Treatment
  misc_feature: MA Experiment ID: 20000182 Result: Up-regulated in Transcription
  misc_feature: MA Experiment 20000182 PARAMETER Experiment Name: At_2mM_SA_P Parameter: Age (day) Value: 14
  misc_feature: MA Experiment 20000182 PARAMETER Experiment Name: At_2mM_SA_P Parameter: Organism Value: A. thaliana
  misc_feature: MA Experiment 20000182 PARAMETER Experiment Name: At_2mM_SA_P Parameter: Plant Line Value: WS
  misc_feature: MA Experiment 20000182 PARAMETER Experiment Name: At_2mM_SA_P Parameter: Timepoint (hr) Value: 6
  misc_feature: MA Experiment 20000182 PARAMETER Experiment Name: At_2mM_SA_P Parameter: Tissue Value: Aerial
  misc_feature: MA Experiment 20000182 PARAMETER Experiment Name: At_2mM_SA_P Parameter: Treatment Value: 2mM SA vs. No Treatment
  misc_feature: MA Experiment ID: 20000184 Result: Down-regulated in Transcription
  misc_feature: MA Experiment 20000184 PARAMETER Experiment Name: At_Shoots__P Parameter: Age (day) Value: 7
  misc_feature: MA Experiment 20000184 PARAMETER Experiment Name: At_Shoots__P Parameter: Tissue Value: Shoots vs. Whole Plant
  misc_feature: MA Experiment ID: 20000227 Result: Down-regulated in Transcription
  misc_feature: MA Experiment 20000227 PARAMETER Experiment Name: At_Root-Tips-vs-Tops_P Parameter: Tissue Value: Root Tips vs. Root Tops
  misc_feature: MA Experiment ID: 20000234 Result: Down-regulated in Transcription
  misc_feature: MA Experiment 20000234 PARAMETER Experiment Name: At_Siliques_P Parameter: Age (day) Value: 21
  misc_feature: MA Experiment 20000234 PARAMETER Experiment Name: At_Siliques_P Parameter: Organism Value: A. thaliana
  misc_feature: MA Experiment 20000234 PARAMETER Experiment Name: At_Siliques_P Parameter: Plant Line Value: WS
  misc_feature: MA Experiment 20000234 PARAMETER Experiment Name: At_Siliques_P Parameter: Tissue Value: Less Than 5mm Siliques vs. Whole Plant
  misc_feature: MA Experiment ID: 20000235 Result: Down-regulated in Transcription
  misc_feature: MA Experiment 20000235 PARAMETER Experiment Name: At_Siliques_P Parameter: Age (day) Value: 21
  misc_feature: MA Experiment 20000235 PARAMETER Experiment Name: At_Siliques_P Parameter: Organism Value: A. thaliana
  misc_feature: MA Experiment 20000235 PARAMETER Experiment Name: At_Siliques_P Parameter: Plant Line Value: WS
  misc_feature: MA Experiment 20000235 PARAMETER Experiment Name: At_Siliques_P Parameter: Tissue Value: 5-10mm Siliques vs. Whole Plant
  misc_feature: MA Experiment ID: 20000264 Result: Down-regulated in Transcription
  misc_feature: MA Experiment 20000264 PARAMETER Experiment Name: At_Open_Flower_P Parameter: Age (day) Value: 21
  misc_feature: MA Experiment 20000264 PARAMETER Experiment Name: At_Open_Flower_P Parameter: Plant Line Value: WS
  misc_feature: MA Experiment 20000264 PARAMETER Experiment Name: At_Open_Flower_P Parameter: Tissue Value: Open Flower vs. Whole Plant
  misc_feature: MA Experiment ID: 20000265 Result: Down-regulated in Transcription
  misc_feature: MA Experiment 20000265 PARAMETER Experiment Name: At_Open_Flower_P Parameter: Age (day) Value: 21
  misc_feature: MA Experiment 20000265 PARAMETER Experiment Name: At_Open_Flower_P Parameter: Plant Line Value: WS
  misc_feature: MA Experiment 20000265 PARAMETER Experiment Name: At_Open_Flower_P Parameter: Tissue Value: Closed Flower vs. Whole Plant
  misc_feature: MA Experiment ID: 20000286 Result: Down-regulated in Transcription
  misc_feature: MA Experiment 20000286 PARAMETER Experiment Name: At_Open_Flower_P Parameter: Age (day) Value: 21
  misc_feature: MA Experiment 20000286 PARAMETER Experiment Name: At_Open_Flower_P Parameter: Plant Line Value: WS
  misc_feature: MA Experiment 20000286 PARAMETER Experiment Name: At_Open_Flower_P Parameter: Tissue Value: Half Open vs. Whole Plant
  misc_feature: MA Experiment ID: 20000438 Result: Down-regulated in Transcription
  misc_feature: MA Experiment 20000438 PARAMETER Experiment Name: At_Shoots__P Parameter: Age (day) Value: 14
  misc_feature: MA Experiment 20000438 PARAMETER Experiment Name: At_Shoots__P Parameter: Tissue Value: Shoots vs. Whole Plant
  misc_feature: MA Experiment ID: 20000453 Result: Up-regulated in Transcription
  misc_feature: MA Experiment 20000453 PARAMETER Experiment Name: At_100uM_ABA_P Parameter: Age (day) Value: 15
  misc_feature: MA Experiment 20000453 PARAMETER Experiment Name: At_100uM_ABA_P Parameter: Organism Value: A. thaliana
  misc_feature: MA Experiment 20000453 PARAMETER Experiment Name: At_100uM_ABA_P Parameter: Plant Line Value: WS
  misc_feature: MA Experiment 20000453 PARAMETER Experiment Name: At_100uM_ABA_P Parameter: Timepoint (hr) Value: 24
  misc_feature: MA Experiment 20000453 PARAMETER Experiment Name: At_100uM_ABA_P Parameter: Tissue Value: Aerial
  misc_feature: MA Experiment 20000453 PARAMETER Experiment Name: At_100uM_ABA_P Parameter: Treatment Value: 100uM ABA vs. No Treatment
  misc_feature: MA Experiment ID: 20000460 Result: Down-regulated in Transcription
  misc_feature: MA Experiment 20000460 PARAMETER Experiment Name: At_10percent_PEG_P Parameter: Age (day) Value: 12
  misc_feature: MA Experiment 20000460 PARAMETER Experiment Name: At_10percent_PEG_P Parameter: Organism Value: A. thaliana
  misc_feature: MA Experiment 20000460 PARAMETER Experiment Name: At_10percent_PEG_P Parameter: Plant Line Value: WS
  misc_feature: MA Experiment 20000460 PARAMETER Experiment Name: At_10percent_PEG_P Parameter: Timepoint (day) Value: 12
  misc_feature: MA Experiment 20000460 PARAMETER Experiment Name: At_10percent_PEG_P Parameter: Tissue Value: Whole Plant
  misc_feature: MA Experiment 20000460 PARAMETER Experiment Name: At_10percent_PEG_P Parameter: Treatment Value: 10percent PEG vs. No Treatment
  misc_feature: MA Experiment ID: 20000527 Result: Down-regulated in Transcription
  misc_feature: MA Experiment 20000527 PARAMETER Experiment Name: At_10percent_PEG_P Parameter: Age (day) Value: 20
  misc_feature: MA Experiment 20000527 PARAMETER Experiment Name: At_10percent_PEG_P Parameter: Organism Value: A. thaliana
  misc_feature: MA Experiment 20000527 PARAMETER Experiment Name: At_10percent_PEG_P Parameter: Plant Line Value: WS
  misc_feature: MA Experiment 20000527 PARAMETER Experiment Name: At_10percent_PEG_P Parameter: Timepoint (day) Value: 20
  misc_feature: MA Experiment 20000527 PARAMETER Experiment Name: At_10percent_PEG_P Parameter: Tissue Value: Whole Plant
  misc_feature: MA Experiment 20000527 PARAMETER Experiment Name: At_10percent_PEG_P Parameter: Treatment Value: 10percent PEG vs. No Treatment
  misc_feature: MA Experiment ID: 20000573 Result: Down-regulated in Transcription
  misc_feature: MA Experiment 20000573 PARAMETER Experiment Name: At_100uM_ABA_Mutants__P Parameter: Organism Value: A. thaliana
  misc_feature: MA Experiment 20000573 PARAMETER Experiment Name: At_100uM_ABA_Mutants__P Parameter: Plant Line Value: CS22 vs. Ler wt
  misc_feature: MA Experiment 20000573 PARAMETER Experiment Name: At_100uM_ABA_Mutants__P Parameter: Timepoint (hr) Value: N/A
  misc_feature: MA Experiment 20000573 PARAMETER Experiment Name: At_100uM_ABA_Mutants__P Parameter: Tissue Value: Whole Plant
  misc_feature: MA Experiment 20000573 PARAMETER Experiment Name: At_100uM_ABA_Mutants__P Parameter: Treatment Value: None
  misc_feature: MA Experiment ID: 20000794 Result: Down-regulated in Transcription
  misc_feature: MA Experiment 20000794 PARAMETER Experiment Name: At_Petals_P Parameter: Age (day) Value: 23-25 days
  misc_feature: MA Experiment 20000794 PARAMETER Experiment Name: At_Petals_P Parameter: Plant Line Value: WS
  misc_feature: MA Experiment 20000794 PARAMETER Experiment Name: At_Petals_P Parameter: Tissue Value: Petals vs. Whole plant
  misc_feature: MA Experiment ID: 20001556 Result: Down-regulated in Transcription
  misc_feature: MA Experiment 20001556 PARAMETER Experiment Name: At_Drought_Soil_Dry_P Parameter: Age (day) Value: 26
  misc_feature: MA Experiment 20001556 PARAMETER Experiment Name: At_Drought_Soil_Dry_P Parameter: Organism Value: A. thaliana
  misc_feature: MA Experiment 20001556 PARAMETER Experiment Name: At_Drought_Soil_Dry_P Parameter: Plant Line Value: WS
  misc_feature: MA Experiment 20001556 PARAMETER Experiment Name: At_Drought_Soil_Dry_P Parameter: Post Timepoint (hr) Value: None
  misc_feature: MA Experiment 20001556 PARAMETER Experiment Name: At_Drought_Soil_Dry_P Parameter: Post-Treatment Value: None
  misc_feature: MA Experiment 20001556 PARAMETER Experiment Name: At_Drought_Soil_Dry_P Parameter: Timepoint (day) Value: 12
  misc_feature: MA Experiment 20001556 PARAMETER Experiment Name: At_Drought_Soil_Dry_P Parameter: Treatment Value: Drought vs. No Drought
  misc_feature: MA Experiment ID: 20001557 Result: Down-regulated in Transcription
  misc_feature: MA Experiment 20001557 PARAMETER Experiment Name: At_Drought_Soil_Dry_P Parameter: Age (day) Value: 27
  misc_feature: MA Experiment 20001557 PARAMETER Experiment Name: At_Drought_Soil_Dry_P Parameter: Organism Value: A. thaliana
  misc_feature: MA Experiment 20001557 PARAMETER Experiment Name: At_Drought_Soil_Dry_P Parameter: Plant Line Value: WS
  misc_feature: MA Experiment 20001557 PARAMETER Experiment Name: At_Drought_Soil_Dry_P Parameter: Post Timepoint (hr) Value: 3
  misc_feature: MA Experiment 20001557 PARAMETER Experiment Name: At_Drought_Soil_Dry_P Parameter: Post-Treatment Value: Re-Water vs. No Drought
  misc_feature: MA Experiment 20001557 PARAMETER Experiment Name: At_Drought_Soil_Dry_P Parameter: Timepoint (day) Value: 13
  misc_feature: MA Experiment 20001557 PARAMETER Experiment Name: At_Drought_Soil_Dry_P Parameter: Treatment Value: Drought vs. No Drought
  misc_feature: MA Experiment ID: 20001558 Result: Down-regulated in Transcription
  misc_feature: MA Experiment 20001558 PARAMETER Experiment Name: At_Drought_Soil_Dry_P Parameter: Age (day) Value: 27
  misc_feature: MA Experiment 20001558 PARAMETER Experiment Name: At_Drought_Soil_Dry_P Parameter: Organism Value: A. thaliana
  misc_feature: MA Experiment 20001558 PARAMETER Experiment Name: At_Drought_Soil_Dry_P Parameter: Plant Line Value: WS
  misc_feature: MA Experiment 20001558 PARAMETER Experiment Name: At_Drought_Soil_Dry_P Parameter: Post Timepoint (hr) Value: 6
  misc_feature: MA Experiment 20001558 PARAMETER Experiment Name: At_Drought_Soil_Dry_P Parameter: Post-Treatment Value: Re-Water vs. No Drought
  misc_feature: MA Experiment 20001558 PARAMETER Experiment Name: At_Drought_Soil_Dry_P Parameter: Timepoint (day) Value: 13
  misc_feature: MA Experiment 20001558 PARAMETER Experiment Name: At_Drought_Soil_Dry_P Parameter: Treatment Value: Drought vs. No Drought
  misc_feature: MA Experiment ID: 20001560 Result: Down-regulated in Transcription
  misc_feature: MA Experiment 20001560 PARAMETER Experiment Name: At_Drought_Soil_Dry_P Parameter: Age (day) Value: 28
  misc_feature: MA Experiment 20001560 PARAMETER Experiment Name: At_Drought_Soil_Dry_P Parameter: Organism Value: A. thaliana
  misc_feature: MA Experiment 20001560 PARAMETER Experiment Name: At_Drought_Soil_Dry_P Parameter: Plant Line Value: WS
  misc_feature: MA Experiment 20001560 PARAMETER Experiment Name: At_Drought_Soil_Dry_P Parameter: Post Timepoint (hr) Value: None
  misc_feature: MA Experiment 20001560 PARAMETER Experiment Name: At_Drought_Soil_Dry_P Parameter: Post-Treatment Value: None
  misc_feature: MA Experiment 20001560 PARAMETER Experiment Name: At_Drought_Soil_Dry_P Parameter: Timepoint (day) Value: 14
  misc_feature: MA Experiment 20001560 PARAMETER Experiment Name: At_Drought_Soil_Dry_P Parameter: Treatment Value: Drought vs. No Drought
  misc_feature: MA Experiment ID: 20001773 Result: Up-regulated in Transcription
  misc_feature: MA Experiment 20001773 PARAMETER Experiment Name: At_Far-red-enriched-adult_P Parameter: Age (day) Value: 30
  misc_feature: MA Experiment 20001773 PARAMETER Experiment Name: At_Far-red-enriched-adult_P Parameter: Light Value: Far-red enriched vs. White
  misc_feature: MA Experiment 20001773 PARAMETER Experiment Name: At_Far-red-enriched-adult_P Parameter: Organism Value: A. thaliana
  misc_feature: MA Experiment 20001773 PARAMETER Experiment Name: At_Far-red-enriched-adult_P Parameter: Plant Line Value: Columbia
  misc_feature: MA Experiment 20001773 PARAMETER Experiment Name: At_Far-red-enriched-adult_P Parameter: Timepoint (hr) Value: 48
  misc_feature: MA Experiment 20001773 PARAMETER Experiment Name: At_Far-red-enriched-adult_P Parameter: Tissue Value: Aerial
aatctttaaagcaagtcttcgctcttcaatttatattttaccaaatcatcttctctctttctctatctctcaaaacaaaaagtaaccatgatcaagacaaagacgacgtcccttctctgtttccttctcacagccgttatactaatgaacccatcttcctcctcccccactgacaattacatatacgccgtttgttctccggctaaattctcccctagctccggctacgagacaaatcttaactccctcctctcttccttcgtcacctcaaccgcccaaacccgctacgccaacttcacagttcccaccgggaaaccggaaccaaccgttaccgtatacggtatttaccagtgccgcggcgacctagacccaaccgcctgctcgacgtgcgtatcaagcgccgtcgcacaggtcggagccttatgttcaaactcgtactccgggttcttgcagatggaaaattgtctgatccgttacgacaacaaatcgttccttggggttcaagacaaaacgttgatcctcaacaaatgtggacagccgatggaattcaacgaccaggatgcgttgaccaaagctagtgacgtcatcggttctttaggtaccggagatggatcttacaggacaggtggcaacgggaatgttcagggtgtggctcagtgctccggtgatctaagtacatcacagtgccaagattgcttgtctgatgcaatcggacggctcaaatctgattgtggaatggctcagggaggatatgtttacttgtcgaaatgttacgcgcgtttcagtgttggtggtagtcacgcgcgtcagaccccaggcccaaactttggtcatgaaggagagaagggcaataaggatgataatggagtgggaaaaacattggcgataataataggaatcgtcaccttaatcatcttgctcgttgtgtttctcgcttttgttggaaagtgttgtagaaaattacaagatgagaaatggtgtaaatgaaaggacaaagtgggaaagatatcaatcaacaactcgagtcgagccacactgttagttgtatttttgtaattttttttgttctccctcataagatgtacgtagttatagtatattgataatttgatatagtattgatatgattgtatctccgaatcgatttttgtataattgtcggacttatataggccaaagcgatatcttcttctttgatgtgaatgaaaccttcgatttcttac

SEQ ID NO: 25372 - protein, 299 aa, Arabidopsis thaliana
  peptide (1)..(299): Ceres Seq. ID no. 13490776
  misc_feature (83)..(137): Pfam Name: Domain of unknown function DUF26 Pfam Description: Domain of unknown function DUF26
  misc_feature (24)..(232): Homolog of NCBI NO: 15232412 NR Description: secretory protein - like [Arabidopsis thaliana]
  misc_feature (10)..(240): Homolog of NCBI NO: 38567870 NR Description: OSJNBa0091D06.12 [Oryza sativa (japonica
  misc_feature (5)..(237): Homolog of NCBI NO: 9757976 NR Description: contains similarity to secretory
  misc_feature (1)..(240): Homolog of NCBI NO: 25410919 NR Description: hypothetical protein At2g01660 [imported] -
  misc_feature (5)..(290): Homolog of NCBI NO: 30693130 NR Description: expressed protein [Arabidopsis thaliana]
  misc_feature (1)..(291): Homolog of NCBI NO: 21554153 NR Description: unknown [Arabidopsis thaliana]
  misc_feature (1)..(291): Homolog of NCBI NO: 18379273 NR Description: expressed protein [Arabidopsis thaliana]
  misc_feature (1)..(256): Homolog of NCBI NO: 25406066 NR Description: unknown protein F5A18.13 [imported] - Arabidopsis
  misc_feature (1)..(299): Homolog of NCBI NO: 21593606 NR Description: unknown [Arabidopsis thaliana]
  misc_feature (1)..(299): Homolog of NCBI NO: 18409653 NR Description: expressed protein [Arabidopsis thaliana]
MIKTKTTSLLCFLLTAVILMNPSSSSPTDNYIYAVCSPAKFSPSSGYETNLNSLLSSFVTSTAQTRYANFTVPTGKPEPTVTVYGIYQCRGDLDPTACSTCVSSAVAQVGALCSNSYSGFLQMENCLIRYDNKSFLGVQDKTLILNKCGQPMEFNDQDALTKASDVIGSLGTGDGSYRTGGNGNVQGVAQCSGDLSTSQCQDCLSDAIGRLKSDCGMAQGGYVYLSKCYARFSVGGSHARQTPGPNFGHEGEKGNKDDNGVGKTLAIIIGIVTLIILLVVFLAFVGKCCRKLQDEKWCK

SEQ ID NO: 25373 - protein, 280 aa, Arabidopsis thaliana
  peptide (1)..(280): Ceres Seq. ID no. 13490777
  misc_feature (64)..(118): Pfam Name: Domain of unknown function DUF26 Pfam Description: Domain of unknown function DUF26
  misc_feature (5)..(213): Homolog of NCBI NO: 15232412 NR Description: secretory protein - like [Arabidopsis thaliana]
  misc_feature (1)..(221): Homolog of NCBI NO: 38567870 NR Description: OSJNBa0091D06.12 [Oryza sativa (japonica
  misc_feature (1)..(218): Homolog of NCBI NO: 9757976 NR Description: contains similarity to secretory
  misc_feature (1)..(221): Homolog of NCBI NO: 25410919 NR Description: hypothetical protein At2g01660 [imported] -
  misc_feature (1)..(271): Homolog of NCBI NO: 30693130 NR Description: expressed protein [Arabidopsis thaliana]
  misc_feature (1)..(272): Homolog of NCBI NO: 21554153 NR Description: unknown [Arabidopsis thaliana]
  misc_feature (1)..(272): Homolog of NCBI NO: 18379273 NR Description: expressed protein [Arabidopsis thaliana]
  misc_feature (1)..(237): Homolog of NCBI NO: 25406066 NR Description: unknown protein F5A18.13 [imported] - Arabidopsis
  misc_feature (1)..(280): Homolog of NCBI NO: 21593606 NR Description: unknown [Arabidopsis thaliana]
  misc_feature (1)..(280): Homolog of NCBI NO: 18409653 NR Description: expressed protein [Arabidopsis thaliana]
MNPSSSSPTDNYIYAVCSPAKFSPSSGYETNLNSLLSSFVTSTAQTRYANFTVPTGKPEPTVTVYGIYQCRGDLDPTACSTCVSSAVAQVGALCSNSYSGFLQMENCLIRYDNKSFLGVQDKTLILNKCGQPMEFNDQDALTKASDVIGSLGTGDGSYRTGGNGNVQGVAQCSGDLSTSQCQDCLSDAIGRLKSDCGMAQGGYVYLSKCYARFSVGGSHARQTPGPNFGHEGEKGNKDDNGVGKTLAIIIGIVTLIILLVVFLAFVGKCCRKLQDEKWCK

SEQ ID NO: 25374 - protein, 177 aa, Arabidopsis thaliana
  peptide (1)..(177): Ceres Seq. ID no. 13490778
  misc_feature (1)..(110): Homolog of NCBI NO: 15232412 NR Description: secretory protein - like [Arabidopsis thaliana]
  misc_feature (1)..(118): Homolog of NCBI NO: 38567870 NR Description: OSJNBa0091D06.12 [Oryza sativa (japonica
  misc_feature (1)..(115): Homolog of NCBI NO: 9757976 NR Description: contains similarity to secretory
  misc_feature (1)..(118): Homolog of NCBI NO: 25410919 NR Description: hypothetical protein At2g01660 [imported] -
  misc_feature (1)..(168): Homolog of NCBI NO: 30693130 NR Description: expressed protein [Arabidopsis thaliana]
  misc_feature (1)..(169): Homolog of NCBI NO: 21554153 NR Description: unknown [Arabidopsis thaliana]
  misc_feature (1)..(169): Homolog of NCBI NO: 18379273 NR Description: expressed protein [Arabidopsis thaliana]
  misc_feature (1)..(134): Homolog of NCBI NO: 25406066 NR Description: unknown protein F5A18.13 [imported] - Arabidopsis
  misc_feature (1)..(177): Homolog of NCBI NO: 21593606 NR Description: unknown [Arabidopsis thaliana]
  misc_feature (1)..(177): Homolog of NCBI NO: 18409653 NR Description: expressed protein [Arabidopsis thaliana]
MENCLIRYDNKSFLGVQDKTLILNKCGQPMEFNDQDALTKASDVIGSLGTGDGSYRTGGNGNVQGVAQCSGDLSTSQCQDCLSDAIGRLKSDCGMAQGGYVYLSKCYARFSVGGSHARQTPGPNFGHEGEKGNKDDNGVGKTLAIIIGIVTLIILLVVFLAFVGKCCRKLQDEKWCK

SEQ ID NO: 25375 - DNA, 1139 bp, Arabidopsis thaliana
  misc_feature (1)..(1139): Ceres Seq. ID no. 12321108
  misc_feature: MA Experiment ID: 108434 Result: Up-regulated in Transcription
  misc_feature: MA Experiment 108434 PARAMETER Experiment Name: At_Root_Tips_cDNA_P Parameter: Tissue Value: Root Tips
  misc_feature: MA Experiment ID: 108488 Result: Up-regulated in Transcription
  misc_feature: MA Experiment ID: 20000794 Result: Down-regulated in Transcription
  misc_feature: MA Experiment 20000794 PARAMETER Experiment Name: At_Petals_P Parameter: Age (day) Value: 23-25 days
  misc_feature: MA Experiment 20000794 PARAMETER Experiment Name: At_Petals_P Parameter: Plant Line Value: WS
  misc_feature: MA Experiment 20000794 PARAMETER Experiment Name: At_Petals_P Parameter: Tissue Value: Petals vs. Whole plant
  misc_feature: MA Experiment ID: 20001905 Result: Down-regulated in Transcription
  misc_feature: MA Experiment 20001905 PARAMETER Experiment Name: At_Drought_Reproduction_P Parameter: Age (day) Value: 40
  misc_feature: MA Experiment 20001905 PARAMETER Experiment Name: At_Drought_Reproduction_P Parameter: Organism Value: A. thaliana
  misc_feature: MA Experiment 20001905 PARAMETER Experiment Name: At_Drought_Reproduction_P Parameter: Plant Line Value: WS
  misc_feature: MA Experiment 20001905 PARAMETER Experiment Name: At_Drought_Reproduction_P Parameter: Timepoint (day) Value: 10
  misc_feature: MA Experiment 20001905 PARAMETER Experiment Name: At_Drought_Reproduction_P Parameter: Tissue Value: Rosettes
  misc_feature: MA Experiment 20001905 PARAMETER Experiment Name: At_Drought_Reproduction_P Parameter: Treatment Value: Drought vs. No Drought
  misc_feature: Phenotype: ROSETTE LEAVES Other
  misc_feature: Phenotype: WHOLE PLANT Size-Small
  misc_feature: Phenotype: CAULINE LEAVES Size-Small
  misc_feature: Phenotype: INFLORESCENCE Height-Short
  misc_feature: Phenotype: INFLORESCENCE Internode Length-Short Internode
  misc_feature: Phenotype: ROSETTE LEAVES Curled-Curled 4
  misc_feature: Phenotype: ROSETTE LEAVES Petiole Length-Short Petioles
  misc_feature: Phenotype: WHOLE PLANT Size-Small
  misc_feature: Phenotype: INFLORESCENCE Height-Short
  misc_feature: Phenotype: ROSETTE LEAVES Disorganized Rosette-Disorganized Rosette
  misc_feature: Phenotype: ROSETTE LEAVES Petiole Length-Short Petioles
  misc_feature: Phenotype: WHOLE PLANT Color-Dark Green
  misc_feature: Phenotype: WHOLE PLANT Size-Small
  misc_feature: Phenotype: INFLORESCENCE Flowering Time-Late Flowering
agaaaccgatagacctctctcattcgatcatttcttcttcttcttcgtcttcgctgcagcctgcatctgttgtttcttctagactttgcagtcacagagatagtgagtgagatagagagagtgataatggcgagtggactaagcgagatcgggagcacgaagatgttcgatggctacaacaaaagatacaaacacttcagtgagacacttggatgttccatgaccttttccatctacttccctccttctgcttctgcttcttcttcccataaatctcctgtgctttactggctttctggcctcacctgcacggacgagaacttcattatcaaatcaggagctcaacgtgctgcttctactcacggcattgctcttgttgctccagacacttctccaagaggactaaatgttgaaggggaggcagacagttacgactttggtgtaggagccggattctacctcaatgctactcaggaaaagtggaagaactggcgtatgtatgactatgttgtcaaagagttgccaaaactcctgagtgaaaacttttcccagcttgacacaacaaaagcatctatatctggacactccatgggtggacatggagctcttactatatacctgaggaacctcgataaatacaagtctgtatctgcgtttgcaccaatcacgaatcccataaattgtgcatggggacagaaggcattcaccaattatctaggtgacaacaaagctgcttgggaggaatacgatgccacttgtcttatttcaaagtacaacaatctttctgcaacaattctaattgatcagggagaaaacgaccagttctaccctgatcagttattgcccagcaagtttgaggaggcgtgcaagaaagtgaatgcaccgctcttattgcgcctccatccaggatacgaccactcctactatttcattgccaccttcatcgaagaccacattagtcaccatgctcaagcccttgagctatagctcacttcatctgcttggaaaccggctttgggtttgtccaagtattagtatctcaataaagcaagtggacttgtaatgttttatgttcaataactcccctgtgtgctcttttgtctacgataataataagaaaatcatctttgcttcatacc

SEQ ID NO: 25376 - protein, 286 aa, Arabidopsis thaliana
  peptide (1)..(286): Ceres Seq. ID no. 12321109
  misc_feature (5)..(284): Homolog of NCBI NO: 9857260 NR Description: esterase D [Sus scrofa]
  misc_feature (5)..(285): Homolog of NCBI NO: 23060276 NR Description: hypothetical protein [Pseudomonas fluorescens
  misc_feature (5)..(284): Homolog of NCBI NO: 34874491 NR Description: similar to esterase 10; esterase D [Rattus
  misc_feature (5)..(284): Homolog of NCBI NO: 28436838 NR Description: Similar to esterase 10 [Mus musculus]
  misc_feature (5)..(284): Homolog of NCBI NO: 13937355 NR Description: esterase 10; esterase D [Mus musculus]
  misc_feature (1)..(284): Homolog of NCBI NO: 12846304 NR Description: unnamed protein product [Mus musculus]
  misc_feature (3)..(91): Homolog of NCBI NO: 20161330 NR Description: putative esterase D [Oryza sativa (japonica
  misc_feature (102)..(285): Homolog of NCBI NO: 20161330 NR Description: putative esterase D [Oryza sativa (japonica
  misc_feature (13)..(286): Homolog of NCBI NO: 21593226 NR Description: putative esterase D [Arabidopsis thaliana]
  misc_feature (1)..(286): Homolog of NCBI NO: 15227376 NR Description: putative esterase D
MASGLSEIGSTKMFDGYNKRYKHFSETLGCSMTFSIYFPPSASASSSHKSPVLYWLSGLTCTDENFIIKSGAQRAASTHGIALVAPDTSPRGLNVEGEADSYDFGVGAGFYLNATQEKWKNWRMYDYVVKELPKLLSENFSQLDTTKASISGHSMGGHGALTIYLRNLDKYKSVSAFAPITNPINCAWGQKAFTNYLGDNKAAWEEYDATCLISKYNNLSATILIDQGENDQFYPDQLLPSKFEEACKKVNAPLLLRLHPGYDHSYYFIATFIEDHISHHAQALEL

SEQ ID NO: 25377 - protein, 274 aa, Arabidopsis thaliana
  peptide (1)..(274): Ceres Seq. ID no. 12321110
  misc_feature (1)..(79): Homolog of NCBI NO: 20161330 NR Description: putative esterase D [Oryza sativa (japonica
  misc_feature (90)..(273): Homolog of NCBI NO: 20161330 NR Description: putative esterase D [Oryza sativa (japonica
  misc_feature (1)..(274): Homolog of NCBI NO: 21593226 NR Description: putative esterase D [Arabidopsis thaliana]
  misc_feature (1)..(274): Homolog of NCBI NO: 15227376 NR Description: putative esterase D
  misc_feature (1)..(272): Homolog of NCBI NO: 9857260 NR Description: esterase D [Sus scrofa]
  misc_feature (1)..(273): Homolog of NCBI NO: 23060276 NR Description: hypothetical protein [Pseudomonas fluorescens
  misc_feature (1)..(272): Homolog of NCBI NO: 34874491 NR Description: similar to esterase 10; esterase D [Rattus
  misc_feature (1)..(272): Homolog of NCBI NO: 28436838 NR Description: Similar to esterase 10 [Mus musculus]
  misc_feature (1)..(272): Homolog of NCBI NO: 13937355 NR Description: esterase 10; esterase D [Mus musculus]
  misc_feature (1)..(272): Homolog of NCBI NO: 12846304 NR Description: unnamed protein product [Mus musculus]
MFDGYNKRYKHFSETLGCSMTFSIYFPPSASASSSHKSPVLYWLSGLTCTDENFIIKSGAQRAASTHGIALVAPDTSPRGLNVEGEADSYDFGVGAGFYLNATQEKWKNWRMYDYVVKELPKLLSENFSQLDTTKASISGHSMGGHGALTIYLRNLDKYKSVSAFAPITNPINCAWGQKAFTNYLGDNKAAWEEYDATCLISKYNNLSATILIDQGENDQFYPDQLLPSKFEEACKKVNAPLLLRLHPGYDHSYYFIATFIEDHISHHAQALEL

SEQ ID NO: 25378 - protein, 255 aa, Arabidopsis thaliana
  peptide (1)..(255): Ceres Seq. ID no. 12321111
  misc_feature (1)..(253): Homolog of NCBI NO: 9857260 NR Description: esterase D [Sus scrofa]
  misc_feature (1)..(254): Homolog of NCBI NO: 23060276 NR Description: hypothetical protein [Pseudomonas fluorescens
  misc_feature (1)..(253): Homolog of NCBI NO: 34874491 NR Description: similar to esterase 10; esterase D [Rattus
  misc_feature (1)..(253): Homolog of NCBI NO: 28436838 NR Description: Similar to esterase 10 [Mus musculus]
  misc_feature (1)..(253): Homolog of NCBI NO: 13937355 NR Description: esterase 10; esterase D [Mus musculus]
  misc_feature (1)..(253): Homolog of NCBI NO: 12846304 NR Description: unnamed protein product [Mus musculus]
  misc_feature (1)..(60): Homolog of NCBI NO: 20161330 NR Description: putative esterase D [Oryza sativa (japonica
  misc_feature (71)..(254): Homolog of NCBI NO: 20161330 NR Description: putative esterase D [Oryza sativa (japonica
  misc_feature (1)..(255): Homolog of NCBI NO: 21593226 NR Description: putative esterase D [Arabidopsis thaliana]
  misc_feature (1)..(255): Homolog of NCBI NO: 15227376 NR Description: putative esterase D
MTFSIYFPPSASASSSHKSPVLYWLSGLTCTDENFIIKSGAQRAASTHGIALVAPDTSPRGLNVEGEADSYDFGVGAGFYLNATQEKWKNWRMYDYVVKELPKLLSENFSQLDTTKASISGHSMGGHGALTIYLRNLDKYKSVSAFAPITNPINCAWGQKAFTNYLGDNKAAWEEYDATCLISKYNNLSATILIDQGENDQFYPDQLLPSKFEEACKKVNAPLLLRLHPGYDHSYYFIATFIEDHISHHAQALEL

SEQ ID NO: 25379 - DNA, 1081 bp, Arabidopsis thaliana
  misc_feature (1)..(1081): Ceres Seq. ID no. 12322213
  misc_feature: MA Experiment ID: 108579 Result: Down-regulated in Transcription
  misc_feature: MA Experiment 108579 PARAMETER Experiment Name: At_4deg_Cold_cDNA_P Parameter: Temperature (deg C) Value: 4 vs. 22
  misc_feature: MA Experiment 108579 PARAMETER Experiment Name: At_4deg_Cold_cDNA_P Parameter: Timepoint (hr) Value: 6
  misc_feature: MA Experiment 108579 PARAMETER Experiment Name: At_4deg_Cold_cDNA_P Parameter: Tissue Value: Aerial
  misc_feature: MA Experiment ID: 20000180 Result: Up-regulated in Transcription
  misc_feature: MA Experiment 20000180 PARAMETER Experiment Name: At_Germinating_Seeds_P Parameter: Age (hr) Value: 24 vs. 0
  misc_feature: MA Experiment 20000180 PARAMETER Experiment Name: At_Germinating_Seeds_P Parameter: Tissue Value: Germinating Seeds
  misc_feature: MA Experiment ID: 20000437 Result: Down-regulated in Transcription
  misc_feature: MA Experiment 20000437 PARAMETER Experiment Name: At_Drought_P Parameter: Age (day) Value: 8
  misc_feature: MA Experiment 20000437 PARAMETER Experiment Name: At_Drought_P Parameter: Organism Value: A. thaliana
  misc_feature: MA Experiment 20000437 PARAMETER Experiment Name: At_Drought_P Parameter: Plant Line Value: WS
  misc_feature: MA Experiment 20000437 PARAMETER Experiment Name: At_Drought_P Parameter: Timepoint (hr) Value: 24
  misc_feature: MA Experiment 20000437 PARAMETER Experiment Name: At_Drought_P Parameter: Tissue Value: Whole Plant
  misc_feature: MA Experiment 20000437 PARAMETER Experiment Name: At_Drought_P Parameter: Treatment Value: Drought vs. No Drought
attttctaccaatcgtcgtcgtctctcacgcaaattcttcattcgttctgtggaaacacagaaatggagactccatatccgaaactcatcgatccttcaaagactcgaataggatggattggcatcgggataatgggatcggccatggtttctcatattatcgccgcaggctattctgtcacagtttacgctcgcgacctccggaaaacaaaagatctgcaaaccaaaggagctcgcatagccaatagccccaaagaggttagcggagatgagcgacgttgtgttcacgattgttggaaacttcaacgatgtccgatcgttgcttctcggtgacgatggtgtactctctggtcttacgcccggtggagtaacagtggacatgactagtagcaaaccaggattggcgcgtgaaatacacgcagaagcgaggcgtaggaattgttgggcggtggatgcgccggtatcaggtggagacgctggagcacgagaggggacgttagggattttcgccggcggagattcagagattgtggagtggttgtccccggtgatgaagaatatagggactgttacttatatgggagaagcagggagtgggcaaagctgcaagatagggaatcagattgctggtgcgagcaacctggttggacttgctgaagggatagtgttcgctgagaaagcgggtttagatacagtgaaatggctcgaggcggtgaaggatggtgcagctggatcggcggttatgcggctgtttggggagatgatggtgaagagggattatagggcgactggctttgcggagtatatggtgaaagatttgggaatggctgcagaggcggcgatgcctggtgctgctctgagcaagcagttgttcactggaatggtggctaatggagatggcaagttaggtattcaaggcgtcgtctctgttattagaagacttaacggcatatcctgaaaacacttgtgttccaatgatttcacgatcaactaggcaaacttgtcttcgatttggtttaagttgataataagaagaacatcgagtctcaccaatctcaataagaaacaaagggcatttatg

SEQ ID NO: 25380 - protein, 229 aa, Arabidopsis thaliana
  peptide (1)..(229): Ceres Seq. ID no. 12322214
  misc_feature (1)..(106): Pfam Name: NAD binding domain of 6-phosphogluconate dehydrogenase Pfam Description: NAD binding domain of 6-phosphogluconate
  misc_feature (1)..(106): Pfam Name: NAD binding domain of 6-phosphogluconate dehydrogenase Pfam Description: NAD binding domain of 6-phosphogluconate
  misc_feature (1)..(218): Homolog of NCBI NO: 16078460 NR Description: similar to 3-hydroxyisobutyrate dehydrogenase
  misc_feature (1)..(225): Homolog of NCBI NO: 15898379 NR Description: Oxidoreductase [Sulfolobus solfataricus]
  misc_feature (1)..(218): Homolog of NCBI NO: 15896585 NR Description: Dehydrogenase related to 3-hydroxyisobutyrate
  misc_feature (1)..(216): Homolog of NCBI NO: 30022129 NR Description: 3-hydroxyisobutyrate dehydrogenase [Bacillus
  misc_feature (1)..(228): Homolog of NCBI NO: 32472744 NR Description: 3-hydroxyisobutyrate dehydrogenase [Pirellula
  misc_feature (1)..(218): Homolog of NCBI NO: 16078460 NR Description: similar to 3-hydroxyisobutyrate dehydrogenase
  misc_feature (1)..(218): Homolog of NCBI NO: 15896585 NR Description: Dehydrogenase related to 3-hydroxyisobutyrate
  misc_feature (1)..(228): Homolog of NCBI NO: 32472744 NR Description: 3-hydroxyisobutyrate dehydrogenase [Pirellula
  misc_feature (1)..(229): Homolog of NCBI NO: 18409781 NR Description: putative dehydrogenase
  misc_feature (1)..(229): Homolog of NCBI NO: 25283629 NR Description: probable dehydrogenase F23N20.17
  misc_feature (1)..(229): Homolog of NCBI NO: 30698779 NR Description: dehydrogenase -related [Arabidopsis thaliana]
  misc_feature (1)..(226): Homolog of NCBI NO: 34909392 NR Description: putative dehydrogenase [Oryza sativa (japonica
  misc_feature (1)..(229): Homolog of NCBI NO: 15233455 NR Description: putative protein
  misc_feature (1)..(216): Homolog of NCBI NO: 30022129 NR Description: 3-hydroxyisobutyrate dehydrogenase [Bacillus
  misc_feature (1)..(225): Homolog of NCBI NO: 15898379 NR Description: Oxidoreductase [Sulfolobus solfataricus]
  misc_feature (1)..(229): Homolog of NCBI NO: 15233455 NR Description: putative protein
  misc_feature (1)..(226): Homolog of NCBI NO: 34909392 NR Description: putative dehydrogenase [Oryza sativa (japonica
  misc_feature (1)..(229): Homolog of NCBI NO: 30698779 NR Description: dehydrogenase -related [Arabidopsis thaliana]
  misc_feature (1)..(229): Homolog of NCBI NO: 25283629 NR Description: probable dehydrogenase F23N20.17
  misc_feature (1)..(229): Homolog of NCBI NO: 18409781 NR Description: putative dehydrogenase
MSDVVFTIVGNFNDVRSLLLGDDGVLSGLTPGGVTVDMTSSKPGLAREIHAEARRRNCWAVDAPVSGGDAGAREGTLGIFAGGDSEIVEWLSPVMKNIGTVTYMGEAGSGQSCKIGNQIAGASNLVGLAEGIVFAEKAGLDTVKWLEAVKDGAAGSAVMRLFGEMMVKRDYRATGFAEYMVKDLGMAAEAAMPGAALSKQLFTGMVANGDGKLGIQGVVSVIRRLNGIS

SEQ ID NO: 25381 - protein, 192 aa, Arabidopsis thaliana
  peptide (1)..(192): Ceres Seq. ID no. 12322215
  misc_feature (1)..(69): Pfam Name: NAD binding domain of 6-phosphogluconate dehydrogenase Pfam Description: NAD binding domain of 6-phosphogluconate
  misc_feature (1)..(69): Pfam Name: NAD binding domain of 6-phosphogluconate dehydrogenase Pfam Description: NAD binding domain of 6-phosphogluconate
  misc_feature (1)..(181): Homolog of NCBI NO: 16078460 NR Description: similar to 3-hydroxyisobutyrate dehydrogenase
  misc_feature (1)..(188): Homolog of NCBI NO: 15898379 NR Description: Oxidoreductase [Sulfolobus solfataricus]
  misc_feature (1)..(181): Homolog of NCBI NO: 15896585 NR Description: Dehydrogenase related to 3-hydroxyisobutyrate
  misc_feature (1)..(179): Homolog of NCBI NO: 30022129 NR Description: 3-hydroxyisobutyrate dehydrogenase [Bacillus
  misc_feature (1)..(191): Homolog of NCBI NO: 32472744 NR Description: 3-hydroxyisobutyrate dehydrogenase [Pirellula
  misc_feature (1)..(181): Homolog of NCBI NO: 16078460 NR Description: similar to 3-hydroxyisobutyrate dehydrogenase
  misc_feature (1)..(181): Homolog of NCBI NO: 15896585 NR Description: Dehydrogenase related to 3-hydroxyisobutyrate
  misc_feature (1)..(191): Homolog of NCBI NO: 32472744 NR Description: 3-hydroxyisobutyrate dehydrogenase [Pirellula
  misc_feature (1)..(192): Homolog of NCBI NO: 18409781 NR Description: putative dehydrogenase
  misc_feature (1)..(192): Homolog of NCBI NO: 25283629 NR Description: probable dehydrogenase F23N20.17
  misc_feature (1)..(192): Homolog of NCBI NO: 30698779 NR Description: dehydrogenase -related [Arabidopsis thaliana]
  misc_feature (1)..(189): Homolog of NCBI NO: 34909392 NR Description: putative dehydrogenase [Oryza sativa (japonica
  misc_feature (1)..(192): Homolog of NCBI NO: 15233455 NR Description: putative protein
  misc_feature (1)..(179): Homolog of NCBI NO: 30022129 NR Description: 3-hydroxyisobutyrate dehydrogenase [Bacillus
  misc_feature (1)..(188): Homolog of NCBI NO: 15898379 NR Description: Oxidoreductase [Sulfolobus solfataricus]
  misc_feature (1)..(192): Homolog of NCBI NO: 15233455 NR Description: putative protein
  misc_feature (1)..(189): Homolog of NCBI NO: 34909392 NR Description: putative dehydrogenase [Oryza sativa (japonica
  misc_feature (1)..(192): Homolog of NCBI NO: 30698779 NR Description: dehydrogenase -related [Arabidopsis thaliana]
  misc_feature (1)..(192): Homolog of NCBI NO: 25283629 NR Description: probable dehydrogenase F23N20.17
  misc_feature (1)..(192): Homolog of NCBI NO: 18409781 NR Description: putative dehydrogenase
MTSSKPGLAREIHAEARRRNCWAVDAPVSGGDAGAREGTLGIFAGGDSEIVEWLSPVMKNIGTVTYMGEAGSGQSCKIGNQIAGASNLVGLAEGIVFAEKAGLDTVKWLEAVKDGAAGSAVMRLFGEMMVKRDYRATGFAEYMVKDLGMAAEAAMPGAALSKQLFTGMVANGDGKLGIQGVVSVIRRLNGIS

SEQ ID NO: 25382 - protein, 135 aa, Arabidopsis thaliana
  peptide (1)..(135): Ceres Seq. ID no. 12322216
  misc_feature (1)..(124): Homolog of NCBI NO: 16078460 NR Description: similar to 3-hydroxyisobutyrate dehydrogenase
  misc_feature (1)..(131): Homolog of NCBI NO: 15898379 NR Description: Oxidoreductase [Sulfolobus solfataricus]
  misc_feature (1)..(124): Homolog of NCBI NO: 15896585 NR Description: Dehydrogenase related to 3-hydroxyisobutyrate
  misc_feature (1)..(122): Homolog of NCBI NO: 30022129 NR Description: 3-hydroxyisobutyrate dehydrogenase [Bacillus
  misc_feature (1)..(134): Homolog of NCBI NO: 32472744 NR Description: 3-hydroxyisobutyrate dehydrogenase [Pirellula
  misc_feature (1)..(135): Homolog of NCBI NO: 15233455 NR Description: putative protein
  misc_feature (1)..(132): Homolog of NCBI NO: 34909392 NR Description: putative dehydrogenase [Oryza sativa (japonica
  misc_feature (1)..(135): Homolog of NCBI NO: 30698779 NR Description: dehydrogenase -related [Arabidopsis thaliana]
  misc_feature (1)..(135): Homolog of NCBI NO: 25283629 NR Description: probable dehydrogenase F23N20.17
  misc_feature (1)..(135): Homolog of NCBI NO: 18409781 NR Description: putative dehydrogenase
  misc_feature (1)..(124): Homolog of NCBI NO: 16078460 NR Description: similar to 3-hydroxyisobutyrate dehydrogenase
  misc_feature (1)..(131): Homolog of NCBI NO: 15898379 NR Description: Oxidoreductase [Sulfolobus solfataricus]
  misc_feature (1)..(124): Homolog of NCBI NO: 15896585 NR Description: Dehydrogenase related to 3-hydroxyisobutyrate
  misc_feature (1)..(122): Homolog of NCBI NO: 30022129 NR Description: 3-hydroxyisobutyrate dehydrogenase [Bacillus
  misc_feature (1)..(134): Homolog of NCBI NO: 32472744 NR Description: 3-hydroxyisobutyrate dehydrogenase [Pirellula
  misc_feature (1)..(135): Homolog of NCBI NO: 15233455 NR Description: putative protein
  misc_feature (1)..(132): Homolog of NCBI NO: 34909392 NR Description: putative dehydrogenase [Oryza sativa (japonica
  misc_feature (1)..(135): Homolog of NCBI NO: 30698779 NR Description: dehydrogenase -related [Arabidopsis thaliana]
  misc_feature (1)..(135): Homolog of NCBI NO: 25283629 NR Description: probable dehydrogenase F23N20.17
  misc_feature (1)..(135): Homolog of NCBI NO: 18409781 NR Description: putative dehydrogenase
MKNIGTVTYMGEAGSGQSCKIGNQIAGASNLVGLAEGIVFAEKAGLDTVKWLEAVKDGAAGSAVMRLFGEMMVKRDYRATGFAEYMVKDLGMAAEAAMPGAALSKQLFTGMVANGDGKLGIQGVVSVIRRLNGIS

SEQ ID NO: 25383 - DNA, 1304 bp, Arabidopsis thaliana
  misc_feature (1)..(1304): Ceres Seq. ID no. 12739232
  misc_feature: MA Experiment ID: 108434 Result: Down-regulated in Transcription
  misc_feature: MA Experiment 108434 PARAMETER Experiment Name: At_Root_Tips_cDNA_P Parameter: Tissue Value: Root Tips
  misc_feature: MA Experiment ID: 108462 Result: Up-regulated in Transcription
  misc_feature: MA Experiment 108462 PARAMETER Experiment Name: At_Germinating_Seeds_cDNA_P Parameter: Age (day) Value: 2 vs. 0
  misc_feature: MA Experiment 108462 PARAMETER Experiment Name: At_Germinating_Seeds_cDNA_P Parameter: Tissue Value: Germinating Seeds
  misc_feature: MA Experiment ID: 108488 Result: Down-regulated in Transcription
  misc_feature: MA Experiment ID: 108569 Result: Up-regulated in Transcription
  misc_feature: MA Experiment 108569 PARAMETER Experiment Name: At_0.001%_MeJA__cDNA_P Parameter: Timepoint (hr) Value: 6
  misc_feature: MA Experiment 108569 PARAMETER Experiment Name: At_0.001%_MeJA__cDNA_P Parameter: Tissue Value: Aerial
  misc_feature: MA Experiment 108569 PARAMETER Experiment Name: At_0.001%_MeJA__cDNA_P Parameter: Treatment Value: 0.001% MeJA vs. No Treatment
  misc_feature: MA Experiment ID: 108573 Result: Up-regulated in Transcription
  misc_feature: MA Experiment 108573 PARAMETER Experiment Name: At_Drought_cDNA_P Parameter: Timepoint (hr) Value: 6
  misc_feature: MA Experiment 108573 PARAMETER Experiment Name: At_Drought_cDNA_P Parameter: Tissue Value: Aerial
  misc_feature: MA Experiment 108573 PARAMETER Experiment Name: At_Drought_cDNA_P Parameter: Treatment Value: Drought vs. No Drought
  misc_feature: MA Experiment ID: 108595 Result: Down-regulated in Transcription
  misc_feature: MA Experiment 108595 PARAMETER Experiment Name: At_Ler-pi_Ovule_cDNA_P Parameter: Plant Line Value: null
  misc_feature: MA Experiment ID: 108605 Result: Up-regulated in Transcription
  misc_feature: MA Experiment 108605 PARAMETER Experiment Name: At_100uM_ABA_cDNA_P Parameter: Timepoint (hr) Value: 6
  misc_feature: MA Experiment 108605 PARAMETER Experiment Name: At_100uM_ABA_cDNA_P Parameter: Tissue Value: Aerial
  misc_feature: MA Experiment 108605 PARAMETER Experiment Name: At_100uM_ABA_cDNA_P Parameter: Treatment Value: 100uM ABA vs. No Treatment
  misc_feature: MA Experiment ID: 108607 Result: Up-regulated in Transcription
  misc_feature: MA Experiment 108607 PARAMETER Experiment Name: At_100uM_ABA_cDNA_P Parameter: Timepoint (hr) Value: 4
  misc_feature: MA Experiment 108607 PARAMETER Experiment Name: At_100uM_ABA_cDNA_P Parameter: Tissue Value: Aerial
  misc_feature: MA Experiment 108607 PARAMETER Experiment Name: At_100uM_ABA_cDNA_P Parameter: Treatment Value: 100uM ABA vs. No Treatment
  misc_feature: MA Experiment ID: 20000087 Result: Down-regulated in Transcription
  misc_feature: MA Experiment 20000087 PARAMETER Experiment Name: At_100uM_ABA_Mutants_cDNA_P Parameter: Plant Line Value: WS
  misc_feature: MA Experiment 20000087 PARAMETER Experiment Name: At_100uM_ABA_Mutants_cDNA_P Parameter: Timepoint (hr) Value: 6
  misc_feature: MA Experiment 20000087 PARAMETER Experiment Name: At_100uM_ABA_Mutants_cDNA_P Parameter: Tissue Value: Aerial
  misc_feature: MA Experiment 20000087 PARAMETER Experiment Name: At_100uM_ABA_Mutants_cDNA_P Parameter: Treatment Value: 100uM ABA vs. No Treatment
  misc_feature: MA Experiment ID: 20000169 Result: Up-regulated in Transcription
  misc_feature: MA Experiment 20000169 PARAMETER Experiment Name: At_100uM_ABA_P Parameter: Age (day) Value: 14
  misc_feature: MA Experiment 20000169 PARAMETER Experiment Name: At_100uM_ABA_P Parameter: Organism Value: A. thaliana
  misc_feature: MA Experiment 20000169 PARAMETER Experiment Name: At_100uM_ABA_P Parameter: Plant Line Value: WS
  misc_feature: MA Experiment 20000169 PARAMETER Experiment Name: At_100uM_ABA_P Parameter: Timepoint (hr) Value: 6
  misc_feature: MA Experiment 20000169 PARAMETER Experiment Name: At_100uM_ABA_P Parameter: Tissue Value: Aerial
  misc_feature: MA Experiment 20000169 PARAMETER Experiment Name: At_100uM_ABA_P Parameter: Treatment Value: 100uM ABA vs. No Treatment
  misc_feature: MA Experiment ID: 20000173 Result: Down-regulated in Transcription
  misc_feature: MA Experiment 20000173 PARAMETER Experiment Name: At_42deg_Heat_P Parameter: Age (day) Value: 14
  misc_feature: MA Experiment 20000173 PARAMETER Experiment Name: At_42deg_Heat_P Parameter: Organism Value: A. thaliana
  misc_feature: MA Experiment 20000173 PARAMETER Experiment Name: At_42deg_Heat_P Parameter: Plant Line Value: WS
  misc_feature: MA Experiment 20000173 PARAMETER Experiment Name: At_42deg_Heat_P Parameter: Temperature (deg C) Value: 42 vs. 22
  misc_feature: MA Experiment 20000173 PARAMETER Experiment Name: At_42deg_Heat_P Parameter: Timepoint (hr) Value: 6
  misc_feature: MA Experiment 20000173 PARAMETER Experiment Name: At_42deg_Heat_P Parameter: Tissue Value: Aerial
  misc_feature: MA Experiment ID: 20000179 Result: Down-regulated in Transcription
  misc_feature: MA Experiment 20000179 PARAMETER Experiment Name: At_Germinating_Seeds_P Parameter: Age (hr) Value: 6 vs. 0
  misc_feature: MA Experiment 20000179 PARAMETER Experiment Name: At_Germinating_Seeds_P Parameter: Tissue Value: Germinating Seeds
  misc_feature: MA Experiment ID: 20000180 Result: Down-regulated in Transcription
  misc_feature: MA Experiment 20000180 PARAMETER Experiment Name: At_Germinating_Seeds_P Parameter: Age (hr) Value: 24 vs. 0
  misc_feature: MA Experiment 20000180 PARAMETER Experiment Name: At_Germinating_Seeds_P Parameter: Tissue Value: Germinating Seeds
  misc_feature: MA Experiment ID: 20000182 Result: Up-regulated in Transcription
  misc_feature: MA Experiment 20000182 PARAMETER Experiment Name: At_2mM_SA_P Parameter: Age (day) Value: 14
  misc_feature: MA Experiment 20000182 PARAMETER Experiment Name: At_2mM_SA_P Parameter: Organism Value: A. thaliana
  misc_feature: MA Experiment 20000182 PARAMETER Experiment Name: At_2mM_SA_P Parameter: Plant Line Value: WS
  misc_feature: MA Experiment 20000182 PARAMETER Experiment Name: At_2mM_SA_P Parameter: Timepoint (hr) Value: 6
  misc_feature: MA Experiment 20000182 PARAMETER Experiment Name: At_2mM_SA_P Parameter: Tissue Value: Aerial
  misc_feature: MA Experiment 20000182 PARAMETER Experiment Name: At_2mM_SA_P Parameter: Treatment Value: 2mM SA vs. No Treatment
  misc_feature: MA Experiment ID: 20000184 Result: Down-regulated in Transcription
  misc_feature: MA Experiment 20000184 PARAMETER Experiment Name: At_Shoots__P Parameter: Age (day) Value: 7
  misc_feature: MA Experiment 20000184 PARAMETER Experiment Name: At_Shoots__P Parameter: Tissue Value: Shoots vs. Whole Plant
  misc_feature: MA Experiment ID: 20000227 Result: Down-regulated in Transcription
  misc_feature: MA Experiment 20000227 PARAMETER Experiment Name: At_Root-Tips-vs-Tops_P Parameter: Tissue Value: Root Tips vs. Root Tops
  misc_feature: MA Experiment ID: 20000234 Result: Down-regulated in Transcription
  misc_feature: MA Experiment 20000234 PARAMETER Experiment Name: At_Siliques_P Parameter: Age (day) Value: 21
  misc_feature: MA Experiment 20000234 PARAMETER Experiment Name: At_Siliques_P Parameter: Organism Value: A. thaliana
  misc_feature: MA Experiment 20000234 PARAMETER Experiment Name: At_Siliques_P Parameter: Plant Line Value: WS
  misc_feature: MA Experiment 20000234 PARAMETER Experiment Name: At_Siliques_P Parameter: Tissue Value: Less Than 5mm Siliques vs. Whole Plant
  misc_feature: MA Experiment ID: 20000235 Result: Down-regulated in Transcription
  misc_feature: MA Experiment 20000235 PARAMETER Experiment Name: At_Siliques_P Parameter: Age (day) Value: 21
  misc_feature: MA Experiment 20000235 PARAMETER Experiment Name: At_Siliques_P Parameter: Organism Value: A. thaliana
  misc_feature: MA Experiment 20000235 PARAMETER Experiment Name: At_Siliques_P Parameter: Plant Line Value: WS
  misc_feature: MA Experiment 20000235 PARAMETER Experiment Name: At_Siliques_P Parameter: Tissue Value: 5-10mm Siliques vs. Whole Plant
  misc_feature: MA Experiment ID: 20000264 Result: Down-regulated in Transcription
  misc_feature: MA Experiment 20000264 PARAMETER Experiment Name: At_Open_Flower_P Parameter: Age (day) Value: 21
  misc_feature: MA Experiment 20000264 PARAMETER Experiment Name: At_Open_Flower_P Parameter: Plant Line Value: WS
  misc_feature: MA Experiment 20000264 PARAMETER Experiment Name: At_Open_Flower_P Parameter: Tissue Value: Open Flower vs. Whole Plant
  misc_feature: MA Experiment ID: 20000265 Result: Down-regulated in Transcription
  misc_feature: MA Experiment 20000265 PARAMETER Experiment Name: At_Open_Flower_P Parameter: Age (day) Value: 21
  misc_feature: MA Experiment 20000265 PARAMETER Experiment Name: At_Open_Flower_P Parameter: Plant Line Value: WS
  misc_feature: MA Experiment 20000265 PARAMETER Experiment Name: At_Open_Flower_P Parameter: Tissue Value: Closed Flower vs. Whole Plant
  misc_feature: MA Experiment ID: 20000286 Result: Down-regulated in Transcription
  misc_feature: MA Experiment 20000286 PARAMETER Experiment Name: At_Open_Flower_P Parameter: Age (day) Value: 21
  misc_feature: MA Experiment 20000286 PARAMETER Experiment Name: At_Open_Flower_P Parameter: Plant Line Value: WS
  misc_feature: MA Experiment 20000286 PARAMETER Experiment Name: At_Open_Flower_P Parameter: Tissue Value: Half Open vs. Whole Plant
  misc_feature: MA Experiment ID: 20000308 Result: Up-regulated in Transcription
  misc_feature: MA Experiment 20000308 PARAMETER Experiment Name: At_100mM_NaCl__P Parameter: Age (day) Value: 17
  misc_feature: MA Experiment 20000308 PARAMETER Experiment Name: At_100mM_NaCl__P Parameter: Organism Value: A. thaliana
  misc_feature: MA Experiment 20000308 PARAMETER Experiment Name: At_100mM_NaCl__P Parameter: Plant Line Value: WS
  misc_feature: MA Experiment 20000308 PARAMETER Experiment Name: At_100mM_NaCl__P Parameter: Timepoint (hr) Value: 72
  misc_feature: MA Experiment 20000308 PARAMETER Experiment Name: At_100mM_NaCl__P Parameter: Tissue Value: Whole Plant
  misc_feature: MA Experiment 20000308 PARAMETER Experiment Name: At_100mM_NaCl__P Parameter: Treatment Value: 100mM NaCl vs. No Treatment
  misc_feature: MA Experiment ID: 20000438 Result: Down-regulated in Transcription
  misc_feature: MA Experiment 20000438 PARAMETER Experiment Name: At_Shoots__P Parameter: Age (day) Value: 14
  misc_feature: MA Experiment 20000438 PARAMETER Experiment Name: At_Shoots__P Parameter: Tissue Value: Shoots vs. Whole Plant
  misc_feature: MA Experiment ID: 20000453 Result: Up-regulated in Transcription
  misc_feature: MA Experiment 20000453 PARAMETER Experiment Name: At_100uM_ABA_P Parameter: Age (day) Value: 15
  misc_feature: MA Experiment 20000453 PARAMETER Experiment Name: At_100uM_ABA_P Parameter: Organism Value: A. thaliana
  misc_feature: MA Experiment 20000453 PARAMETER Experiment Name: At_100uM_ABA_P Parameter: Plant Line Value: WS
  misc_feature: MA Experiment 20000453 PARAMETER Experiment Name: At_100uM_ABA_P Parameter: Timepoint (hr) Value: 24
  misc_feature: MA Experiment 20000453 PARAMETER Experiment Name: At_100uM_ABA_P Parameter: Tissue Value: Aerial
  misc_feature: MA Experiment 20000453 PARAMETER Experiment Name: At_100uM_ABA_P Parameter: Treatment Value: 100uM ABA vs. No Treatment
  misc_feature: MA Experiment ID: 20000455 Result: Up-regulated in Transcription
  misc_feature: MA Experiment 20000455 PARAMETER Experiment Name: At_100uM_ABA_P Parameter: Age (day) Value: 16
  misc_feature: MA Experiment 20000455 PARAMETER Experiment Name: At_100uM_ABA_P Parameter: Organism Value: A. thaliana
  misc_feature: MA Experiment 20000455 PARAMETER Experiment Name: At_100uM_ABA_P Parameter: Plant Line Value: WS
  misc_feature: MA Experiment 20000455 PARAMETER Experiment Name: At_100uM_ABA_P Parameter: Timepoint (hr) Value: 48
  misc_feature: MA Experiment 20000455 PARAMETER Experiment Name: At_100uM_ABA_P Parameter: Tissue Value: Aerial
  misc_feature: MA Experiment 20000455 PARAMETER Experiment Name: At_100uM_ABA_P Parameter: Treatment Value: 100uM ABA vs. No Treatment
  misc_feature: MA Experiment ID: 20000460 Result: Up-regulated in Transcription
  misc_feature: MA Experiment 20000460 PARAMETER Experiment Name: At_10percent_PEG_P Parameter: Age (day) Value: 12
  misc_feature: MA Experiment 20000460 PARAMETER Experiment Name: At_10percent_PEG_P Parameter: Organism Value: A. thaliana
  misc_feature: MA Experiment 20000460 PARAMETER Experiment Name: At_10percent_PEG_P Parameter: Plant Line Value: WS
  misc_feature: MA Experiment 20000460 PARAMETER Experiment Name: At_10percent_PEG_P Parameter: Timepoint (day) Value: 12
  misc_feature: MA Experiment 20000460 PARAMETER Experiment Name: At_10percent_PEG_P Parameter: Tissue Value: Whole Plant
  misc_feature: MA Experiment 20000460 PARAMETER Experiment Name: At_10percent_PEG_P Parameter: Treatment Value: 10percent PEG vs. No Treatment
  misc_feature: MA Experiment ID: 20000495 Result: Down-regulated in Transcription
  misc_feature: MA Experiment 20000495 PARAMETER Experiment Name: At_Guard_Cells_P Parameter: Harvest Date Value: 8/2/2002
  misc_feature: MA Experiment 20000495 PARAMETER Experiment Name: At_Guard_Cells_P Parameter: Organism Value: A. thaliana
  misc_feature: MA Experiment 20000495 PARAMETER Experiment Name: At_Guard_Cells_P Parameter: Tissue Value: Guard Cells vs. Leaves
  misc_feature: MA Experiment ID: 20000527 Result: Down-regulated in Transcription
  misc_feature: MA Experiment 20000527 PARAMETER Experiment Name: At_10percent_PEG_P Parameter: Age (day) Value: 20
  misc_feature: MA Experiment 20000527 PARAMETER Experiment Name: At_10percent_PEG_P Parameter: Organism Value: A. thaliana
  misc_feature: MA Experiment 20000527 PARAMETER Experiment Name: At_10percent_PEG_P Parameter: Plant Line Value: WS
  misc_feature: MA Experiment 20000527 PARAMETER Experiment Name: At_10percent_PEG_P Parameter: Timepoint (day) Value: 20
  misc_feature: MA Experiment 20000527 PARAMETER Experiment Name: At_10percent_PEG_P Parameter: Tissue Value: Whole Plant
  misc_feature: MA Experiment 20000527 PARAMETER Experiment Name: At_10percent_PEG_P Parameter: Treatment Value: 10percent PEG vs. No Treatment
  misc_feature: MA Experiment ID: 20000573 Result: Up-regulated in Transcription
  misc_feature: MA Experiment 20000573 PARAMETER Experiment Name: At_100uM_ABA_Mutants__P Parameter: Organism Value: A. thaliana
  misc_feature: MA Experiment 20000573 PARAMETER Experiment Name: At_100uM_ABA_Mutants__P Parameter: Plant Line Value: CS22 vs. Ler wt
  misc_feature: MA Experiment 20000573 PARAMETER Experiment Name: At_100uM_ABA_Mutants__P Parameter: Timepoint (hr) Value: N/A
  misc_feature: MA Experiment 20000573 PARAMETER Experiment Name: At_100uM_ABA_Mutants__P Parameter: Tissue Value: Whole Plant
  misc_feature: MA Experiment 20000573 PARAMETER Experiment Name: At_100uM_ABA_Mutants__P Parameter: Treatment Value: None
  misc_feature: MA Experiment ID: 20000574 Result: Up-regulated in Transcription
  misc_feature: MA Experiment 20000574 PARAMETER Experiment Name: At_100uM_ABA_Mutants__P Parameter: Organism Value: A. thaliana
  misc_feature: MA Experiment 20000574 PARAMETER Experiment Name: At_100uM_ABA_Mutants__P Parameter: Plant Line Value: CS23 vs. Ler wt
  misc_feature: MA Experiment 20000574 PARAMETER Experiment Name: At_100uM_ABA_Mutants__P Parameter: Timepoint (hr) Value: N/A
  misc_feature: MA Experiment 20000574 PARAMETER Experiment Name: At_100uM_ABA_Mutants__P Parameter: Tissue Value: Whole Plant
  misc_feature: MA Experiment 20000574 PARAMETER Experiment Name: At_100uM_ABA_Mutants__P Parameter: Treatment Value: None
  misc_feature: MA Experiment ID: 20000576 Result: Down-regulated in Transcription
  misc_feature: MA Experiment 20000576 PARAMETER Experiment Name: At_100uM_ABA_Mutants__P Parameter: Organism Value: A. thaliana
  misc_feature: MA Experiment 20000576 PARAMETER Experiment Name: At_100uM_ABA_Mutants__P Parameter: Plant Line Value: CS23
  misc_feature: MA Experiment 20000576 PARAMETER Experiment Name: At_100uM_ABA_Mutants__P Parameter: Timepoint (hr) Value: 6
  misc_feature: MA Experiment 20000576 PARAMETER Experiment Name: At_100uM_ABA_Mutants__P Parameter: Tissue Value: Whole Plant
  misc_feature: MA Experiment 20000576 PARAMETER Experiment Name: At_100uM_ABA_Mutants__P Parameter: Treatment Value: 1uM ABA vs. No Treatment
  misc_feature: MA Experiment ID: 20000794 Result: Down-regulated in Transcription
  misc_feature: MA Experiment 20000794 PARAMETER Experiment Name: At_Petals_P Parameter: Age (day) Value: 23-25 days
  misc_feature: MA Experiment 20000794 PARAMETER Experiment Name: At_Petals_P Parameter: Plant Line Value: WS
  misc_feature: MA Experiment 20000794 PARAMETER Experiment Name: At_Petals_P Parameter: Tissue Value: Petals vs. Whole plant
  misc_feature: MA Experiment ID: 20001248 Result: Up-regulated in Transcription
  misc_feature: MA Experiment 20001248 PARAMETER Experiment Name: At_Far-red-induction_P Parameter: Age (day) Value: 7
  misc_feature: MA Experiment 20001248 PARAMETER Experiment Name: At_Far-red-induction_P Parameter: Light Value: Far-red vs. White
  misc_feature: MA Experiment 20001248 PARAMETER Experiment Name: At_Far-red-induction_P Parameter: Organism Value: A. thaliana
  misc_feature: MA Experiment 20001248 PARAMETER Experiment Name: At_Far-red-induction_P Parameter: Plant Line Value: Columbia
  misc_feature: MA Experiment 20001248 PARAMETER Experiment Name: At_Far-red-induction_P Parameter: Timepoint (hr) Value: 4
  misc_feature: MA Experiment 20001248 PARAMETER Experiment Name: At_Far-red-induction_P Parameter: Tissue Value: Whole Plant
  misc_feature: MA Experiment ID: 20001450 Result: Up-regulated in Transcription
  misc_feature: MA Experiment 20001450 PARAMETER Experiment Name: At_Far-red-induction_P Parameter: Age (day) Value: 7
  misc_feature: MA Experiment 20001450 PARAMETER Experiment Name: At_Far-red-induction_P Parameter: Light Value: Far-red vs. White
  misc_feature: MA Experiment 20001450 PARAMETER Experiment Name: At_Far-red-induction_P Parameter: Organism Value: A. thaliana
  misc_feature: MA Experiment 20001450 PARAMETER Experiment Name: At_Far-red-induction_P Parameter: Plant Line Value: Columbia
  misc_feature: MA Experiment 20001450 PARAMETER Experiment Name: At_Far-red-induction_P Parameter: Timepoint (hr) Value: 8
  misc_feature: MA Experiment 20001450 PARAMETER Experiment Name: At_Far-red-induction_P Parameter: Tissue Value: Whole Plant
  misc_feature: MA Experiment ID: 20001451 Result: Up-regulated in Transcription
  misc_feature: MA Experiment 20001451 PARAMETER Experiment Name: At_Far-red-induction_P Parameter: Age (day) Value: 7
  misc_feature: MA Experiment 20001451 PARAMETER Experiment Name: At_Far-red-induction_P Parameter: Light Value: Far-red vs. White
  misc_feature: MA Experiment 20001451 PARAMETER Experiment Name: At_Far-red-induction_P Parameter: Organism Value: A. thaliana
  misc_feature: MA Experiment 20001451 PARAMETER Experiment Name: At_Far-red-induction_P Parameter: Plant Line Value: Columbia
  misc_feature: MA Experiment 20001451 PARAMETER Experiment Name: At_Far-red-induction_P Parameter: Timepoint (hr) Value: 24
  misc_feature: MA Experiment 20001451 PARAMETER Experiment Name: At_Far-red-induction_P Parameter: Tissue Value: Whole Plant
  misc_feature: MA Experiment ID: 20001556 Result: Up-regulated in Transcription
  misc_feature: MA Experiment 20001556 PARAMETER Experiment Name: At_Drought_Soil_Dry_P Parameter: Age (day) Value: 26
  misc_feature: MA Experiment 20001556 PARAMETER Experiment Name: At_Drought_Soil_Dry_P Parameter: Organism Value: A. thaliana
  misc_feature: MA Experiment 20001556 PARAMETER Experiment Name: At_Drought_Soil_Dry_P Parameter: Plant Line Value: WS
  misc_feature: MA Experiment 20001556 PARAMETER Experiment Name: At_Drought_Soil_Dry_P Parameter: Post Timepoint (hr) Value: None
  misc_feature: MA Experiment 20001556 PARAMETER Experiment Name: At_Drought_Soil_Dry_P Parameter: Post-Treatment Value: None
  misc_feature: MA Experiment 20001556 PARAMETER Experiment Name: At_Drought_Soil_Dry_P Parameter: Timepoint (day) Value: 12
  misc_feature: MA Experiment 20001556 PARAMETER Experiment Name: At_Drought_Soil_Dry_P Parameter: Treatment Value: Drought vs. No Drought
  misc_feature: MA Experiment ID: 20001557 Result: Up-regulated in Transcription
  misc_feature: MA Experiment 20001557 PARAMETER Experiment Name: At_Drought_Soil_Dry_P Parameter: Age (day) Value: 27
  misc_feature: MA Experiment 20001557 PARAMETER Experiment Name: At_Drought_Soil_Dry_P Parameter: Organism Value: A. thaliana
  misc_feature: MA Experiment 20001557 PARAMETER Experiment Name: At_Drought_Soil_Dry_P Parameter: Plant Line Value: WS
  misc_feature: MA Experiment 20001557 PARAMETER Experiment Name: At_Drought_Soil_Dry_P Parameter: Post Timepoint (hr) Value: 3
  misc_feature: MA Experiment 20001557 PARAMETER Experiment Name: At_Drought_Soil_Dry_P Parameter: Post-Treatment Value: Re-Water vs. No Drought
  misc_feature: MA Experiment 20001557 PARAMETER Experiment Name: At_Drought_Soil_Dry_P Parameter: Timepoint (day) Value: 13
  misc_feature: MA Experiment 20001557 PARAMETER Experiment Name: At_Drought_Soil_Dry_P Parameter: Treatment Value: Drought vs. No Drought
  misc_feature: MA Experiment ID: 20001558 Result: Up-regulated in Transcription
  misc_feature: MA Experiment 20001558 PARAMETER Experiment Name: At_Drought_Soil_Dry_P Parameter: Age (day) Value: 27
  misc_feature: MA Experiment 20001558 PARAMETER Experiment Name: At_Drought_Soil_Dry_P Parameter: Organism Value: A. thaliana
  misc_feature: MA Experiment 20001558 PARAMETER Experiment Name: At_Drought_Soil_Dry_P Parameter: Plant Line Value: WS
  misc_feature: MA Experiment 20001558 PARAMETER Experiment Name: At_Drought_Soil_Dry_P Parameter: Post Timepoint (hr) Value: 6
  misc_feature: MA Experiment 20001558 PARAMETER Experiment Name: At_Drought_Soil_Dry_P Parameter: Post-Treatment Value: Re-Water vs. No Drought
  misc_feature: MA Experiment 20001558 PARAMETER Experiment Name: At_Drought_Soil_Dry_P Parameter: Timepoint (day) Value: 13
  misc_feature: MA Experiment 20001558 PARAMETER Experiment Name: At_Drought_Soil_Dry_P Parameter: Treatment Value: Drought vs. No Drought
  misc_feature: MA Experiment ID: 20001560 Result: Up-regulated in Transcription
  misc_feature: MA Experiment 20001560 PARAMETER Experiment Name: At_Drought_Soil_Dry_P Parameter: Age (day) Value: 28
  misc_feature: MA Experiment 20001560 PARAMETER Experiment Name: At_Drought_Soil_Dry_P Parameter: Organism Value: A. thaliana
  misc_feature: MA Experiment 20001560 PARAMETER Experiment Name: At_Drought_Soil_Dry_P Parameter: Plant Line Value: WS
  misc_feature: MA Experiment 20001560 PARAMETER Experiment Name: At_Drought_Soil_Dry_P Parameter: Post Timepoint (hr) Value: None
  misc_feature: MA Experiment 20001560 PARAMETER Experiment Name: At_Drought_Soil_Dry_P Parameter: Post-Treatment Value: None
  misc_feature: MA Experiment 20001560 PARAMETER Experiment Name: At_Drought_Soil_Dry_P Parameter: Timepoint (day) Value: 14
  misc_feature: MA Experiment 20001560 PARAMETER Experiment Name: At_Drought_Soil_Dry_P Parameter: Treatment Value: Drought vs. No Drought
  misc_feature: MA Experiment ID: 20001768 Result: Up-regulated in Transcription
  misc_feature: MA Experiment 20001768 PARAMETER Experiment Name: At_Far-red-enriched-adult_P Parameter: Age (day) Value: 28
  misc_feature: MA Experiment 20001768 PARAMETER Experiment Name: At_Far-red-enriched-adult_P Parameter: Light Value: Far-red enriched vs. White
  misc_feature: MA Experiment 20001768 PARAMETER Experiment Name: At_Far-red-enriched-adult_P Parameter: Organism Value: A. thaliana
  misc_feature: MA Experiment 20001768 PARAMETER Experiment Name: At_Far-red-enriched-adult_P Parameter: Plant Line Value: Columbia
  misc_feature: MA Experiment 20001768 PARAMETER Experiment Name: At_Far-red-enriched-adult_P Parameter: Timepoint (hr) Value: 1
  misc_feature: MA Experiment 20001768 PARAMETER Experiment Name: At_Far-red-enriched-adult_P Parameter: Tissue Value: Aerial
  misc_feature: MA Experiment ID: 20001772 Result: Down-regulated in Transcription
  misc_feature: MA Experiment 20001772 PARAMETER Experiment Name: At_Far-red-enriched-adult_P Parameter: Age (day) Value: 29
  misc_feature: MA Experiment 20001772 PARAMETER Experiment Name: At_Far-red-enriched-adult_P Parameter: Light Value: Far-red enriched vs. White
  misc_feature: MA Experiment 20001772 PARAMETER Experiment Name: At_Far-red-enriched-adult_P Parameter: Organism Value: A. thaliana
  misc_feature: MA Experiment 20001772 PARAMETER Experiment Name: At_Far-red-enriched-adult_P Parameter: Plant Line Value: Columbia
  misc_feature: MA Experiment 20001772 PARAMETER Experiment Name: At_Far-red-enriched-adult_P Parameter: Timepoint (hr) Value: 24
  misc_feature: MA Experiment 20001772 PARAMETER Experiment Name: At_Far-red-enriched-adult_P Parameter: Tissue Value: Aerial
  misc_feature: MA Experiment ID: 20001905 Result: Up-regulated in Transcription
  misc_feature: MA Experiment 20001905 PARAMETER Experiment Name: At_Drought_Reproduction_P Parameter: Age (day) Value: 40
  misc_feature: MA Experiment 20001905 PARAMETER Experiment Name: At_Drought_Reproduction_P Parameter: Organism Value: A. thaliana
  misc_feature: MA Experiment 20001905 PARAMETER Experiment Name: At_Drought_Reproduction_P Parameter: Plant Line Value: WS
  misc_feature: MA Experiment 20001905 PARAMETER Experiment Name: At_Drought_Reproduction_P Parameter: Timepoint (day) Value: 10
  misc_feature: MA Experiment 20001905 PARAMETER Experiment Name: At_Drought_Reproduction_P Parameter: Tissue Value: Rosettes
  misc_feature: MA Experiment 20001905 PARAMETER Experiment Name: At_Drought_Reproduction_P Parameter: Treatment Value: Drought vs. No Drought
  misc_feature: MA Experiment ID: 20001906 Result: Up-regulated in Transcription
  misc_feature: MA Experiment 20001906 PARAMETER Experiment Name: At_Drought_Reproduction_P Parameter: Age (day) Value: 35
  misc_feature: MA Experiment 20001906 PARAMETER Experiment Name: At_Drought_Reproduction_P Parameter: Organism Value: A. thaliana
  misc_feature: MA Experiment 20001906 PARAMETER Experiment Name: At_Drought_Reproduction_P Parameter: Plant Line Value: WS
  misc_feature: MA Experiment 20001906 PARAMETER Experiment Name: At_Drought_Reproduction_P Parameter: Timepoint (day) Value: 5
  misc_feature: MA Experiment 20001906 PARAMETER Experiment Name: At_Drought_Reproduction_P Parameter: Tissue Value: Siliques
  misc_feature: MA Experiment 20001906 PARAMETER Experiment Name: At_Drought_Reproduction_P Parameter: Treatment Value: Drought vs. No Drought
  misc_feature: MA Experiment ID: 20001907 Result: Up-regulated in Transcription
  misc_feature: MA Experiment 20001907 PARAMETER Experiment Name: At_Drought_Reproduction_P Parameter: Age (day) Value: 37
  misc_feature: MA Experiment 20001907 PARAMETER Experiment Name: At_Drought_Reproduction_P Parameter: Organism Value: A. thaliana
  misc_feature: MA Experiment 20001907 PARAMETER Experiment Name: At_Drought_Reproduction_P Parameter: Plant Line Value: WS
  misc_feature: MA Experiment 20001907 PARAMETER Experiment Name: At_Drought_Reproduction_P Parameter: Timepoint (day) Value: 7
  misc_feature: MA Experiment 20001907 PARAMETER Experiment Name: At_Drought_Reproduction_P Parameter: Tissue Value: Siliques
  misc_feature: MA Experiment 20001907 PARAMETER Experiment Name: At_Drought_Reproduction_P Parameter: Treatment Value: Drought vs. No Drought
  misc_feature: MA Experiment ID: 20001911 Result: Up-regulated in Transcription
  misc_feature: MA Experiment 20001911 PARAMETER Experiment Name: At_Drought_Reproduction_P Parameter: Age (day) Value: 40
  misc_feature: MA Experiment 20001911 PARAMETER Experiment Name: At_Drought_Reproduction_P Parameter: Organism Value: A. thaliana
  misc_feature: MA Experiment 20001911 PARAMETER Experiment Name: At_Drought_Reproduction_P Parameter: Plant Line Value: WS
  misc_feature: MA Experiment 20001911 PARAMETER Experiment Name: At_Drought_Reproduction_P Parameter: Timepoint (day) Value: 10
  misc_feature: MA Experiment 20001911 PARAMETER Experiment Name: At_Drought_Reproduction_P Parameter: Tissue Value: Flowers
  misc_feature: MA Experiment 20001911 PARAMETER Experiment Name: At_Drought_Reproduction_P Parameter: Treatment Value: Drought vs. No Drought
atatcgaagtaagactaaagctcaagttaaaacagaaaaaatgtcaacttcagaaaacactccgtttaatggcgttgcctcatccaccattgttcgagctaccattgtccaagcctccaccgtctacaacgatactcccgccactctagaaaaggcgaacaagtttattgtggaggctgcaagcaagggatcggagctggttgtgttcccggaggcgtttatcggtggttatcctcgaggttttaggtttggtttaggggtgggagttcataacgaagaagggcgtgatgagttccgcaagtaccatgcttctgctattaaagttcctggccctgaagtagaaaagttggcggagttggccgggaagaacaatgtgtacttggtaatgggagcgatagagaaggatgggtatacactctattgcacagcacttttcttcagtccacaaggtcagttcttgggtaagcaccgtaaactcatgcccacaagtttggaacgttgcatttggggtcaaggagacggatcaaccatccccgtttacgacactccgattggaaaactcggtgctgctatttgctgggagaataggatgcccctctacagaactgctttgtacgccaaaggcattgagctttattgtgcacctactgctgatggttcgaaagaatggcaatcgtcgatgcttcacattgcgatcgaaggtggatgtttcgtattgtcggcttgccagttctgccttcgtaaagatttccctgatcatcctgactacttgtttaccgattggtacgacgacaaagagcctgactctattgtttcccaaggtggaagtgttattatttcacctttgggacaggttcttgcgggaccaaactttgaatcagagggtctcatcacagctgatcttgatcttggtgatgtagcaagagctaagttgtacttcgattcggttggacattactcgagaccagatgttttacacttgaccgtaaatgagcacccgaagaaaccggtcacattcatttcgaaggtggagaaagcggaagatgactcaaacaagtaatcggttgtgattcgtcagttcatgtcactcctatgaaggagtcaagttcaaaatgttatgttgagtttcaaacttttatgctaaactttttttcttaattttcgttaataatggaagagaaccaattctcttgtatctaaagattatccatctatcatccaatttgagtgttcaattctggatgttgtgttaccctacattctacaaccatgtagccaattattatgaatctggctttgatttc

SEQ ID NO: 25384 - protein, 352 aa, Arabidopsis thaliana
  peptide (1)..(352): Ceres Seq. ID no. 12739233
  misc_feature (27)..(350): Homolog of NCBI NO: 15242205 NR Description: Nitrilase 4 (sp P46011)
  misc_feature (11)..(350): Homolog of NCBI NO: 14211396 NR Description: nitrilase-like protein [Brassica napus]
  misc_feature (11)..(352): Homolog of NCBI NO: 21593107 NR Description: nitrilase 3 [Arabidopsis thaliana]
  misc_feature (11)..(352): Homolog of NCBI NO: 15229936 NR Description: nitrilase 3
  misc_feature (11)..(352): Homolog of NCBI NO: 16226740 NR Description: AT3g44310/T10D17_100 [Arabidopsis thaliana]
  misc_feature (11)..(352): Homolog of NCBI NO: 417381 NR Description: Nitrilase 1
  misc_feature (11)..(352): Homolog of NCBI NO: 30692067 NR Description: nitrilase 1 [Arabidopsis thaliana]
  misc_feature (14)..(352): Homolog of NCBI NO: 25290267 NR Description: nitrilase (EC 3.5.5.1) 2 [imported] - Arabidopsis
  misc_feature (14)..(352): Homolog of NCBI NO: 25290266 NR Description: nitrilase (EC 3.5.5.1) 2 [imported] - Arabidopsis
  misc_feature (14)..(352): Homolog of NCBI NO: 15229932 NR Description: nitrilase 2
YRSKTKAQVKTEKMSTSENTPFNGVASSTIVRATIVQASTVYNDTPATLEKANKFIVEAASKGSELVVFPEAFIGGYPRGFRFGLGVGVHNEEGRDEFRKYHASAIKVPGPEVEKLAELAGKNNVYLVMGAIEKDGYTLYCTALFFSPQGQFLGKHRKLMPTSLERCIWGQGDGSTIPVYDTPIGKLGAAICWENRMPLYRTALYAKGIELYCAPTADGSKEWQSSMLHIAIEGGCFVLSACQFCLRKDFPDHPDYLFTDWYDDKEPDSIVSQGGSVIISPLGQVLAGPNFESEGLITADLDLGDVARAKLYFDSVGHYSRPDVLHLTVNEHPKKPVTFISKVEKAEDDSNK

SEQ ID NO: 25385 - protein, 339 aa, Arabidopsis thaliana
  peptide (1)..(339): Ceres Seq. ID no. 12739234
  misc_feature (14)..(337): Homolog of NCBI NO: 15242205 NR Description: Nitrilase 4 (sp P46011)
  misc_feature (1)..(337): Homolog of NCBI NO: 14211396 NR Description: nitrilase-like protein [Brassica napus]
  misc_feature (1)..(339): Homolog of NCBI NO: 21593107 NR Description: nitrilase 3 [Arabidopsis thaliana]
  misc_feature (1)..(339): Homolog of NCBI NO: 15229936 NR Description: nitrilase 3
  misc_feature (1)..(339): Homolog of NCBI NO: 16226740 NR Description: AT3g44310/T10D17_100 [Arabidopsis thaliana]
  misc_feature (1)..(339): Homolog of NCBI NO: 417381 NR Description: Nitrilase 1
  misc_feature (1)..(339): Homolog of NCBI NO: 30692067 NR Description: nitrilase 1 [Arabidopsis thaliana]
  misc_feature (1)..(339): Homolog of NCBI NO: 25290267 NR Description: nitrilase (EC 3.5.5.1) 2 [imported] - Arabidopsis
  misc_feature (1)..(339): Homolog of NCBI NO: 25290266 NR Description: nitrilase (EC 3.5.5.1) 2 [imported] - Arabidopsis
  misc_feature (1)..(339): Homolog of NCBI NO: 15229932 NR Description: nitrilase 2
MSTSENTPFNGVASSTIVRATIVQASTVYNDTPATLEKANKFIVEAASKGSELVVFPEAFIGGYPRGFRFGLGVGVHNEEGRDEFRKYHASAIKVPGPEVEKLAELAGKNNVYLVMGAIEKDGYTLYCTALFFSPQGQFLGKHRKLMPTSLERCIWGQGDGSTIPVYDTPIGKLGAAICWENRMPLYRTALYAKGIELYCAPTADGSKEWQSSMLHIAIEGGCFVLSACQFCLRKDFPDHPDYLFTDWYDDKEPDSIVSQGGSVIISPLGQVLAGPNFESEGLITADLDLGDVARAKLYFDSVGHYSRPDVLHLTVNEHPKKPVTFISKVEKAEDDSNK

SEQ ID NO: 25386 - protein, 224 aa, Arabidopsis thaliana
  peptide (1)..(224): Ceres Seq. ID no. 12739235
  misc_feature (1)..(222): Homolog of NCBI NO: 15242205 NR Description: Nitrilase 4 (sp P46011)
  misc_feature (1)..(222): Homolog of NCBI NO: 14211396 NR Description: nitrilase-like protein [Brassica napus]
  misc_feature (1)..(224): Homolog of NCBI NO: 21593107 NR Description: nitrilase 3 [Arabidopsis thaliana]
  misc_feature (1)..(224): Homolog of NCBI NO: 15229936 NR Description: nitrilase 3
  misc_feature (1)..(224): Homolog of NCBI NO: 16226740 NR Description: AT3g44310/T10D17_100 [Arabidopsis thaliana]
  misc_feature (1)..(224): Homolog of NCBI NO: 417381 NR Description: Nitrilase 1
  misc_feature (1)..(224): Homolog of NCBI NO: 30692067 NR Description: nitrilase 1 [Arabidopsis thaliana]
  misc_feature (1)..(224): Homolog of NCBI NO: 25290267 NR Description: nitrilase (EC 3.5.5.1) 2 [imported] - Arabidopsis
  misc_feature (1)..(224): Homolog of NCBI NO: 25290266 NR Description: nitrilase (EC 3.5.5.1) 2 [imported] - Arabidopsis
  misc_feature (1)..(224): Homolog of NCBI NO: 15229932 NR Description: nitrilase 2
MGAIEKDGYTLYCTALFFSPQGQFLGKHRKLMPTSLERCIWGQGDGSTIPVYDTPIGKLGAAICWENRMPLYRTALYAKGIELYCAPTADGSKEWQSSMLHIAIEGGCFVLSACQFCLRKDFPDHPDYLFTDWYDDKEPDSIVSQGGSVIISPLGQVLAGPNFESEGLITADLDLGDVARAKLYFDSVGHYSRPDVLHLTVNEHPKKPVTFISKVEKAEDDSNK

SEQ ID NO: 25387 - DNA, 1815 bp, Arabidopsis thaliana
  misc_feature (1)..(1815): Ceres Seq. ID no. 12335562
  misc_feature: MA Experiment ID: 108488 Result: Up-regulated in Transcription
  misc_feature: MA Experiment ID: 108573 Result: Up-regulated in Transcription
  misc_feature: MA Experiment 108573 PARAMETER Experiment Name: At_Drought_cDNA_P Parameter: Timepoint (hr) Value: 6
  misc_feature: MA Experiment 108573 PARAMETER Experiment Name: At_Drought_cDNA_P Parameter: Tissue Value: Aerial
  misc_feature: MA Experiment 108573 PARAMETER Experiment Name: At_Drought_cDNA_P Parameter: Treatment Value: Drought vs. No Drought
  misc_feature: MA Experiment ID: 108595 Result: Down-regulated in Transcription
  misc_feature: MA Experiment 108595 PARAMETER Experiment Name: At_Ler-pi_Ovule_cDNA_P Parameter: Plant Line Value: null
aaatctcatctctttattctctctctctatctcttctcctcaagaaccctaaaaatctccagaaaaaagatcccaaatttcgtatttcaacgatctgaatctctctctctttcgggtttattttgtttcccgatatggtttagaatttgtgatttaaatggaagctgacgtgtcaatttcctgaaaaaacccttatcgcgaaattttccagattaccaaaaaaaaaaagattgaaacttttttcgatttgtttgaagaagaagcacggtaggaacgacgacgatgaatcgtgctttggtcctacttttatatgtttgtactgtttcttgtttagcttcaagcaaagttattttgatgaggaataacatcactctctcttttgatgacatcgaagctaacttcgctccgtcagtgaagggtacaggtgaaattggagtggtttatgtggctgagcctcttgacgcttgtcaaaatcttatgaataaaccagaacagagctccaatgaaacttctccttttgtgttgattgttagaggaggctgtagttttgaagagaaagttagaaaagctcagagagctggtttcaaagctgctattatctatgacaatgaagaccgtggaacattgatagcaatggcaggtaactctggaggtataaggattcatgcggtctttgttacgaaagaaacgggagaagttttaaaggagtatgcgggtttccccgatacgaaagtttggttgatcccaagttttgagaactcggcgtggtctattatggcggtttcgtttatctcgctgcttgcaatgtcggctgttctcgctacttgtttctttgtgcgtaggcatcgaataagaaggcggacatctcggtcctctcgagtgcgtgagtttcacggtatgagccgccgcttggtgaaagcaatgccgagtcttatattcagttcgtttcatgaagataacactactgcattcacttgtgctatttgccttgaagactacactgttggagacaagctcaggctcttaccttgctgtcacaagtttcatgctgcgtgtgttgactcatggttaacctcttggagaactttctgtccggtgtgcaaacgagatgcaagaacgagcacgggagagcctccagcttcagagagcacgccattgctctcatctgctgcatcgtctttcacttcttcctctctgcactcttcagtcagatcatctgcactattgattggtccttccttgggctcattaccaacttcaatctctttctctcccgcatacgcaagctcatcctatattagacaatcattccagtcttcctctaaccgtcgatcacctccaataagcgtaagtcgaagctcagtggatctcagacaacaagcagcttctccatctccatcaccatcacagagatcatacatttcccatatggcttctccacagtcactaggttacccaactatctcccctttcaacacgaggtacatgtcaccgtatagacctagcccgagcaatgcatcacctgcaatggctggatcatcgaattatccgttgaatccactgcgttacagtgaatcagctggaactttctctccatacgcctctgcaaactcgcttccagactgttagaaagtctacagaaccaaccactcttggttcaggtcatataagattatttcttttgcatttgagttttactacgaaacgtacttctggcgtttgtgtgtggtgtgtgtgtgtgtaacgatgcttttatagtcttttggttgagatgaaacatcatcggatttaggttagagagattttaacacttcg

SEQ ID NO: 25388 - protein, 448 aa, Arabidopsis thaliana
  peptide (1)..(448): Ceres Seq. ID no. 12335563
  misc_feature (43)..(144): Pfam Name: PA domain Pfam Description: PA domain
  misc_feature (41)..(302): Homolog of NCBI NO: 15219668 NR Description: integral membrane protein, putative; protein id:
  misc_feature (1)..(446): Homolog of NCBI NO: 15233945 NR Description: putative protein; protein id: At4g09560.1
  misc_feature (1)..(302): Homolog of NCBI NO: 15219670 NR Description: integral membrane protein, putative; protein id:
  misc_feature (1)..(401): Homolog of NCBI NO: 25403460 NR Description: protein F15O4.19 [imported] - Arabidopsis
  misc_feature (5)..(433): Homolog of NCBI NO: 15219930 NR Description: putative RING zinc finger protein; protein id:
  misc_feature (9)..(439): Homolog of NCBI NO: 38637053 NR Description: putative ReMembR-H2 protein
  misc_feature (3)..(425): Homolog of NCBI NO: 19071633 NR Description: putative integral membrane protein
  misc_feature (25)..(448): Homolog of NCBI NO: 25406132 NR Description: unknown protein F17M19.13 [imported] -
  misc_feature (5)..(448): Homolog of NCBI NO: 6942149 NR Description: ReMembR-H2 protein JR702 [Arabidopsis thaliana]
  misc_feature (1)..(448): Homolog of NCBI NO: 22330577 NR Description: unknown protein
MNRALVLLLYVCTVSCLASSKVILMRNNITLSFDDIEANFAPSVKGTGEIGVVYVAEPLDACQNLMNKPEQSSNETSPFVLIVRGGCSFEEKVRKAQRAGFKAAIIYDNEDRGTLIAMAGNSGGIRIHAVFVTKETGEVLKEYAGFPDTKVWLIPSFENSAWSIMAVSFISLLAMSAVLATCFFVRRHRIRRRTSRSSRVREFHGMSRRLVKAMPSLIFSSFHEDNTTAFTCAICLEDYTVGDKLRLLPCCHKFHAACVDSWLTSWRTFCPVCKRDARTSTGEPPASESTPLLSSAASSFTSSSLHSSVRSSALLIGPSLGSLPTSISFSPAYASSSYIRQSFQSSSNRRSPPISVSRSSVDLRQQAASPSPSPSQRSYISHMASPQSLGYPTISPFNTRYMSPYRPSPSNASPAMAGSSNYPLNPLRYSESAGTFSPYASANSLPDC

SEQ ID NO: 25389 - protein, 424 aa, Arabidopsis thaliana
  peptide (1)..(424): Ceres Seq. ID no. 12335564
  misc_feature (19)..(120): Pfam Name: PA domain Pfam Description: PA domain
  misc_feature (17)..(278): Homolog of NCBI NO: 15219668 NR Description: integral membrane protein, putative; protein id:
  misc_feature (1)..(422): Homolog of NCBI NO: 15233945 NR Description: putative protein; protein id: At4g09560.1
  misc_feature (1)..(278): Homolog of NCBI NO: 15219670 NR Description: integral membrane protein, putative; protein id:
  misc_feature (1)..(377): Homolog of NCBI NO: 25403460 NR Description: protein F15O4.19 [imported] - Arabidopsis
  misc_feature (1)..(409): Homolog of NCBI NO: 15219930 NR Description: putative RING zinc finger protein; protein id:
  misc_feature (1)..(415): Homolog of NCBI NO: 38637053 NR Description: putative ReMembR-H2 protein
  misc_feature (1)..(401): Homolog of NCBI NO: 19071633 NR Description: putative integral membrane protein
  misc_feature (1)..(424): Homolog of NCBI NO: 25406132 NR Description: unknown protein F17M19.13 [imported] -
  misc_feature (1)..(424): Homolog of NCBI NO: 6942149 NR Description: ReMembR-H2 protein JR702 [Arabidopsis thaliana]
  misc_feature (1)..(424): Homolog of NCBI NO: 22330577 NR Description: unknown protein
MRNNITLSFDDIEANFAPSVKGTGEIGVVYVAEPLDACQNLMNKPEQSSNETSPFVLIVRGGCSFEEKVRKAQRAGFKAAIIYDNEDRGTLIAMAGNSGGIRIHAVFVTKETGEVLKEYAGFPDTKVWLIPSFENSAWSIMAVSFISLLAMSAVLATCFFVRRHRIRRRTSRSSRVREFHGMSRRLVKAMPSLIFSSFHEDNTTAFTCAICLEDYTVGDKLRLLPCCHKFHAACVDSWLTSWRTFCPVCKRDARTSTGEPPASESTPLLSSAASSFTSSSLHSSVRSSALLIGPSLGSLPTSISFSPAYASSSYIRQSFQSSSNRRSPPISVSRSSVDLRQQAASPSPSPSQRSYISHMASPQSLGYPTISPFNTRYMSPYRPSPSNASPAMAGSSNYPLNPLRYSESAGTFSPYASANSLPDC

SEQ ID NO: 25390 - protein, 383 aa, Arabidopsis thaliana
  peptide (1)..(383): Ceres Seq. ID no. 12335565
  misc_feature (1)..(79): Pfam Name: PA domain Pfam Description: PA domain
  misc_feature (1)..(237): Homolog of NCBI NO: 15219668 NR Description: integral membrane protein, putative; protein id:
  misc_feature (1)..(381): Homolog of NCBI NO: 15233945 NR Description: putative protein; protein id: At4g09560.1
  misc_feature (1)..(237): Homolog of NCBI NO: 15219670 NR Description: integral membrane protein, putative; protein id:
  misc_feature (1)..(336): Homolog of NCBI NO: 25403460 NR Description: protein F15O4.19 [imported] - Arabidopsis
  misc_feature (1)..(368): Homolog of NCBI NO: 15219930 NR Description: putative RING zinc finger protein; protein id:
  misc_feature (1)..(374): Homolog of NCBI NO: 38637053 NR Description: putative ReMembR-H2 protein
  misc_feature (1)..(360): Homolog of NCBI NO: 19071633 NR Description: putative integral membrane protein
  misc_feature (1)..(383): Homolog of NCBI NO: 25406132 NR Description: unknown protein F17M19.13 [imported] -
  misc_feature (1)..(383): Homolog of NCBI NO: 6942149 NR Description: ReMembR-H2 protein JR702 [Arabidopsis thaliana]
  misc_feature (1)..(383): Homolog of NCBI NO: 22330577 NR Description: unknown protein
MNKPEQSSNETSPFVLIVRGGCSFEEKVRKAQRAGFKAAIIYDNEDRGTLIAMAGNSGGIRIHAVFVTKETGEVLKEYAGFPDTKVWLIPSFENSAWSIMAVSFISLLAMSAVLATCFFVRRHRIRRRTSRSSRVREFHGMSRRLVKAMPSLIFSSFHEDNTTAFTCAICLEDYTVGDKLRLLPCCHKFHAACVDSWLTSWRTFCPVCKRDARTSTGEPPASESTPLLSSAASSFTSSSLHSSVRSSALLIGPSLGSLPTSISFSPAYASSSYIRQSFQSSSNRRSPPISVSRSSVDLRQQAASPSPSPSQRSYISHMASPQSLGYPTISPFNTRYMSPYRPSPSNASPAMAGSSNYPLNPLRYSESAGTFSPYASANSLPDC

SEQ ID NO: 25391 - DNA, 1197 bp, Arabidopsis thaliana
  misc_feature (1)..(1197): Ceres Seq. ID no. 12326979
  misc_feature: MA Experiment ID: 108434 Result: Up-regulated in Transcription
  misc_feature: MA Experiment 108434 PARAMETER Experiment Name: At_Root_Tips_cDNA_P Parameter: Tissue Value: Root Tips
  misc_feature: MA Experiment ID: 108462 Result: Down-regulated in Transcription
  misc_feature: MA Experiment 108462 PARAMETER Experiment Name: At_Germinating_Seeds_cDNA_P Parameter: Age (day) Value: 2 vs. 0
  misc_feature: MA Experiment 108462 PARAMETER Experiment Name: At_Germinating_Seeds_cDNA_P Parameter: Tissue Value: Germinating Seeds
  misc_feature: MA Experiment ID: 108463 Result: Down-regulated in Transcription
  misc_feature: MA Experiment 108463 PARAMETER Experiment Name: At_Germinating_Seeds_cDNA_P Parameter: Age (day) Value: 3 vs. 0
  misc_feature: MA Experiment 108463 PARAMETER Experiment Name: At_Germinating_Seeds_cDNA_P Parameter: Tissue Value: Germinating Seeds
  misc_feature: MA Experiment ID: 108464 Result: Down-regulated in Transcription
  misc_feature: MA Experiment 108464 PARAMETER Experiment Name: At_Germinating_Seeds_cDNA_P Parameter: Age (day) Value: 4 vs. 0
  misc_feature: MA Experiment 108464 PARAMETER Experiment Name: At_Germinating_Seeds_cDNA_P Parameter: Tissue Value: Germinating Seeds
  misc_feature: MA Experiment ID: 108569 Result: Down-regulated in Transcription
  misc_feature: MA Experiment 108569 PARAMETER Experiment Name: At_0.001%_MeJA__cDNA_P Parameter: Timepoint (hr) Value: 6
  misc_feature: MA Experiment 108569 PARAMETER Experiment Name: At_0.001%_MeJA__cDNA_P Parameter: Tissue Value: Aerial
  misc_feature: MA Experiment 108569 PARAMETER Experiment Name: At_0.001%_MeJA__cDNA_P Parameter: Treatment Value: 0.001% MeJA vs. No Treatment
  misc_feature: MA Experiment ID: 108572 Result: Down-regulated in Transcription
  misc_feature: MA Experiment 108572 PARAMETER Experiment Name: At_Drought_cDNA_P Parameter: Timepoint (hr) Value: 1
  misc_feature: MA Experiment 108572 PARAMETER Experiment Name: At_Drought_cDNA_P Parameter: Tissue Value: Aerial
  misc_feature: MA Experiment 108572 PARAMETER Experiment Name: At_Drought_cDNA_P Parameter: Treatment Value: Drought vs. No Drought
  misc_feature: MA Experiment ID: 108573 Result: Down-regulated in Transcription
  misc_feature: MA Experiment 108573 PARAMETER Experiment Name: At_Drought_cDNA_P Parameter: Timepoint (hr) Value: 6
  misc_feature: MA Experiment 108573 PARAMETER Experiment Name: At_Drought_cDNA_P Parameter: Tissue Value: Aerial
  misc_feature: MA Experiment 108573 PARAMETER Experiment Name: At_Drought_cDNA_P Parameter: Treatment Value: Drought vs. No Drought
  misc_feature: MA Experiment ID: 20000090 Result: Up-regulated in Transcription
  misc_feature: MA Experiment ID: 20000180 Result: Down-regulated in Transcription
  misc_feature: MA Experiment 20000180 PARAMETER Experiment Name: At_Germinating_Seeds_P Parameter: Age (hr) Value: 24 vs. 0
  misc_feature: MA Experiment 20000180 PARAMETER Experiment Name: At_Germinating_Seeds_P Parameter: Tissue Value: Germinating Seeds
  misc_feature: MA Experiment ID: 20000184 Result: Down-regulated in Transcription
  misc_feature: MA Experiment 20000184 PARAMETER Experiment Name: At_Shoots__P Parameter: Age (day) Value: 7
  misc_feature: MA Experiment 20000184 PARAMETER Experiment Name: At_Shoots__P Parameter: Tissue Value: Shoots vs. Whole Plant
  misc_feature: MA Experiment ID: 20000224 Result: Up-regulated in Transcription
  misc_feature: MA Experiment ID: 20000227 Result: Up-regulated in Transcription
  misc_feature: MA Experiment 20000227 PARAMETER Experiment Name: At_Root-Tips-vs-Tops_P Parameter: Tissue Value: Root Tips vs. Root Tops
  misc_feature: MA Experiment ID: 20000438 Result: Down-regulated in Transcription
  misc_feature: MA Experiment 20000438 PARAMETER Experiment Name: At_Shoots__P Parameter: Age (day) Value: 14
  misc_feature: MA Experiment 20000438 PARAMETER Experiment Name: At_Shoots__P Parameter: Tissue Value: Shoots vs. Whole Plant
  misc_feature: MA Experiment ID: 20001247 Result: Down-regulated in Transcription
  misc_feature: MA Experiment 20001247 PARAMETER Experiment Name: At_Far-red-induction_P Parameter: Age (day) Value: 7
  misc_feature: MA Experiment 20001247 PARAMETER Experiment Name: At_Far-red-induction_P Parameter: Light Value: Far-red vs. White
  misc_feature: MA Experiment 20001247 PARAMETER Experiment Name: At_Far-red-induction_P Parameter: Organism Value: A. thaliana
  misc_feature: MA Experiment 20001247 PARAMETER Experiment Name: At_Far-red-induction_P Parameter: Plant Line Value: Columbia
  misc_feature: MA Experiment 20001247 PARAMETER Experiment Name: At_Far-red-induction_P Parameter: Timepoint (hr) Value: 1
  misc_feature: MA Experiment 20001247 PARAMETER Experiment Name: At_Far-red-induction_P Parameter: Tissue Value: Whole Plant
  misc_feature: MA Experiment ID: 20001451 Result: Down-regulated in Transcription
  misc_feature: MA Experiment 20001451 PARAMETER Experiment Name: At_Far-red-induction_P Parameter: Age (day) Value: 7
  misc_feature: MA Experiment 20001451 PARAMETER Experiment Name: At_Far-red-induction_P Parameter: Light Value: Far-red vs. White
  misc_feature: MA Experiment 20001451 PARAMETER Experiment Name: At_Far-red-induction_P Parameter: Organism Value: A. thaliana
  misc_feature: MA Experiment 20001451 PARAMETER Experiment Name: At_Far-red-induction_P Parameter: Plant Line Value: Columbia
  misc_feature: MA Experiment 20001451 PARAMETER Experiment Name: At_Far-red-induction_P Parameter: Timepoint (hr) Value: 24
  misc_feature: MA Experiment 20001451 PARAMETER Experiment Name: At_Far-red-induction_P Parameter: Tissue Value: Whole Plant
  misc_feature: MA Experiment ID: 20001557 Result: Up-regulated in Transcription
  misc_feature: MA Experiment 20001557 PARAMETER Experiment Name: At_Drought_Soil_Dry_P Parameter: Age (day) Value: 27
  misc_feature: MA Experiment 20001557 PARAMETER Experiment Name: At_Drought_Soil_Dry_P Parameter: Organism Value: A. thaliana
  misc_feature: MA Experiment 20001557 PARAMETER Experiment Name: At_Drought_Soil_Dry_P Parameter: Plant Line Value: WS
  misc_feature: MA Experiment 20001557 PARAMETER Experiment Name: At_Drought_Soil_Dry_P Parameter: Post Timepoint (hr) Value: 3
  misc_feature: MA Experiment 20001557 PARAMETER Experiment Name: At_Drought_Soil_Dry_P Parameter: Post-Treatment Value: Re-Water vs. No Drought
  misc_feature: MA Experiment 20001557 PARAMETER Experiment Name: At_Drought_Soil_Dry_P Parameter: Timepoint (day) Value: 13
  misc_feature: MA Experiment 20001557 PARAMETER Experiment Name: At_Drought_Soil_Dry_P Parameter: Treatment Value: Drought vs. No Drought
  misc_feature: MA Experiment ID: 20001558 Result: Up-regulated in Transcription
  misc_feature: MA Experiment 20001558 PARAMETER Experiment Name: At_Drought_Soil_Dry_P Parameter: Age (day) Value: 27
  misc_feature: MA Experiment 20001558 PARAMETER Experiment Name: At_Drought_Soil_Dry_P Parameter: Organism Value: A. thaliana
  misc_feature: MA Experiment 20001558 PARAMETER Experiment Name: At_Drought_Soil_Dry_P Parameter: Plant Line Value: WS
  misc_feature: MA Experiment 20001558 PARAMETER Experiment Name: At_Drought_Soil_Dry_P Parameter: Post Timepoint (hr) Value: 6
  misc_feature: MA Experiment 20001558 PARAMETER Experiment Name: At_Drought_Soil_Dry_P Parameter: Post-Treatment Value: Re-Water vs. No Drought
  misc_feature: MA Experiment 20001558 PARAMETER Experiment Name: At_Drought_Soil_Dry_P Parameter: Timepoint (day) Value: 13
  misc_feature: MA Experiment 20001558 PARAMETER Experiment Name: At_Drought_Soil_Dry_P Parameter: Treatment Value: Drought vs. No Drought
aaaaagttttcattcttcctccactctctcaattccaaaacactgcgccgggaagacatggacaccgagatggagacagaacaaatataccaggtcgatgtcggaaatctcttggctttcaatcccaatcaccgcttctcatctgctccttcttcaaggggggagcttgtgaaggagatcctaacggagggaacaaaacttgttcaggaaatagccaataaacttttcaactttccttctactgaaacaaatgatggtcctattgtccaattgcctccgcctacaaccaaacttcctagagagaaacatattccaaggcctaagcctcctacgaagtgggaagagtttgcgcttaagaaaggtatacagaagcgcaagaaggaaaaagttgtatgggatgaacaaactaatcagtttaagcgtcgccatggttatgaccgtgttaacgatgataatgatgttcccatcattgaggcgaaagaatcagatgaaccaggagtagatccttttgccaagagactagatgataagaagaagagagttggaaagcaagaaaagaatagacttcagaatctgaaggctgctgaaaaagctggtgctttaccaagccatgtccaacttgctgcaacatcattgcccatatcaggaacgaaagctcaaccaaagaaaattggaaaggatgaacttggagatgtagcaggtttagccgctacttcaaccgctagtggtggaaaattcgataaaaagttgcctggagaaaaacctccaaagaagcagggcaaacatcacaagtatttaccggttgtatcagggcgtggggatgttaacgcagaaaaagaacagacaaataatgtactcagcaagatattctcaaagcattcgcatgagatcctcaatgttggcaaggcgataaacatgtacaacgtcaagaaggagaagaagaagtcaggaaggtcagacaagttgaaacctaagaaggacatcaccaagaagcctgccaacaaagccaagtgaagagactctcccatgtctaatttactcttctatctgtctccatcttctatcacaaaacaaattttgggttgctctgttaaagtaatactttatgagtacgtttattttaatcttattgacttcatattttgcaccataaaacaatttaaagctcgcaaggtctagaaatccagtttgattttc

SEQ ID NO: 25392 - protein, 337 aa, Arabidopsis thaliana
  peptide (1)..(337): Ceres Seq. ID no. 12326980
  misc_feature (20)..(196): Pfam Name: Ribosome biogenesis regulatory protein (RRS1) Pfam Description: Ribosome biogenesis regulatory protein (RRS1)
  misc_feature (12)..(337): Homolog of NCBI NO: 21362904 NR Description: Ribosome biogenesis regulatory protein homolog
  misc_feature (12)..(337): Homolog of NCBI NO: 14719402 NR Description: homolog of yeast ribosome biogenesis regulatory
  misc_feature (12)..(337): Homolog of NCBI NO: 434779 NR Description: KIAA0112 [Homo sapiens]
  misc_feature (12)..(337): Homolog of NCBI NO: 27713790 NR Description: similar to regulator for ribosome resistance
  misc_feature (31)..(337): Homolog of NCBI NO: 33585885 NR Description: Ribosome biogenesis regulatory protein homolog
  misc_feature (30)..(335): Homolog of NCBI NO: 32488712 NR Description: OSJNBa0088H09.13 [Oryza sativa (japonica
  misc_feature (20)..(177): Homolog of NCBI NO: 21362906 NR Description: Ribosome biogenesis regulatory protein homolog
  misc_feature (164)..(337): Homolog of NCBI NO: 21362906 NR Description: Ribosome biogenesis regulatory protein homolog
  misc_feature (20)..(337): Homolog of NCBI NO: 18404610 NR Description: expressed protein
  misc_feature (20)..(337): Homolog of NCBI NO: 21593609 NR Description: unknown [Arabidopsis thaliana]
KKFSFFLHSLNSKTLRREDMDTEMETEQIYQVDVGNLLAFNPNHRFSSAPSSRGELVKEILTEGTKLVQEIANKLFNFPSTETNDGPIVQLPPPTTKLPREKHIPRPKPPTKWEEFALKKGIQKRKKEKVVWDEQTNQFKRRHGYDRVNDDNDVPIIEAKESDEPGVDPFAKRLDDKKKRVGKQEKNRLQNLKAAEKAGALPSHVQLAATSLPISGTKAQPKKIGKDELGDVAGLAATSTASGGKFDKKLPGEKPPKKQGKHHKYLPVVSGRGDVNAEKEQTNNVLSKIFSKHSHEILNVGKAINMYNVKKEKKKSGRSDKLKPKKDITKKPANKAK

SEQ ID NO: 25393 - protein, 318 aa, Arabidopsis thaliana
  peptide (1)..(318): Ceres Seq. ID no. 12326981
  misc_feature (1)..(177): Pfam Name: Ribosome biogenesis regulatory protein (RRS1) Pfam Description: Ribosome biogenesis regulatory protein (RRS1)
  misc_feature (1)..(318): Homolog of NCBI NO: 21362904 NR Description: Ribosome biogenesis regulatory protein homolog
  misc_feature (1)..(318): Homolog of NCBI NO: 14719402 NR Description: homolog of yeast ribosome biogenesis regulatory
  misc_feature (1)..(318): Homolog of NCBI NO: 434779 NR Description: KIAA0112 [Homo sapiens]
  misc_feature (1)..(318): Homolog of NCBI NO: 27713790 NR Description: similar to regulator for ribosome resistance
  misc_feature (12)..(318): Homolog of NCBI NO: 33585885 NR Description: Ribosome biogenesis regulatory protein homolog
  misc_feature (11)..(316): Homolog of NCBI NO: 32488712 NR Description: OSJNBa0088H09.13 [Oryza sativa (japonica
  misc_feature (1)..(158): Homolog of NCBI NO: 21362906 NR Description: Ribosome biogenesis regulatory protein homolog
  misc_feature (145)..(318): Homolog of NCBI NO: 21362906 NR Description: Ribosome biogenesis regulatory protein homolog
  misc_feature (1)..(318): Homolog of NCBI NO: 18404610 NR Description: expressed protein
  misc_feature (1)..(318): Homolog of NCBI NO: 21593609 NR Description: unknown [Arabidopsis thaliana]
MDTEMETEQIYQVDVGNLLAFNPNHRFSSAPSSRGELVKEILTEGTKLVQEIANKLFNFPSTETNDGPIVQLPPPTTKLPREKHIPRPKPPTKWEEFALKKGIQKRKKEKVVWDEQTNQFKRRHGYDRVNDDNDVPIIEAKESDEPGVDPFAKRLDDKKKRVGKQEKNRLQNLKAAEKAGALPSHVQLAATSLPISGTKAQPKKIGKDELGDVAGLAATSTASGGKFDKKLPGEKPPKKQGKHHKYLPVVSGRGDVNAEKEQTNNVLSKIFSKHSHEILNVGKAINMYNVKKEKKKSGRSDKLKPKKDITKKPANKAK

SEQ ID NO: 25394 - protein, 314 aa, Arabidopsis thaliana
  peptide (1)..(314): Ceres Seq. ID no. 12326982
  misc_feature (1)..(173): Pfam Name: Ribosome biogenesis regulatory protein (RRS1) Pfam Description: Ribosome biogenesis regulatory protein (RRS1)
  misc_feature (1)..(314): Homolog of NCBI NO: 21362904 NR Description: Ribosome biogenesis regulatory protein homolog
  misc_feature (1)..(314): Homolog of NCBI NO: 14719402 NR Description: homolog of yeast ribosome biogenesis regulatory
  misc_feature (1)..(314): Homolog of NCBI NO: 434779 NR Description: KIAA0112 [Homo sapiens]
  misc_feature (1)..(314): Homolog of NCBI NO: 27713790 NR Description: similar to regulator for ribosome resistance
  misc_feature (8)..(314): Homolog of NCBI NO: 33585885 NR Description: Ribosome biogenesis regulatory protein homolog
  misc_feature (7)..(312): Homolog of NCBI NO: 32488712 NR Description: OSJNBa0088H09.13 [Oryza sativa (japonica
  misc_feature (1)..(154): Homolog of NCBI NO: 21362906 NR Description: Ribosome biogenesis regulatory protein homolog
  misc_feature (141)..(314): Homolog of NCBI NO: 21362906 NR Description: Ribosome biogenesis regulatory protein homolog
  misc_feature (1)..(314): Homolog of NCBI NO: 18404610 NR Description: expressed protein
  misc_feature (1)..(314): Homolog of NCBI NO: 21593609 NR Description: unknown [Arabidopsis thaliana]
METEQIYQVDVGNLLAFNPNHRFSSAPSSRGELVKEILTEGTKLVQEIANKLFNFPSTETNDGPIVQLPPPTTKLPREKHIPRPKPPTKWEEFALKKGIQKRKKEKVVWDEQTNQFKRRHGYDRVNDDNDVPIIEAKESDEPGVDPFAKRLDDKKKRVGKQEKNRLQNLKAAEKAGALPSHVQLAATSLPISGTKAQPKKIGKDELGDVAGLAATSTASGGKFDKKLPGEKPPKKQGKHHKYLPVVSGRGDVNAEKEQTNNVLSKIFSKHSHEILNVGKAINMYNVKKEKKKSGRSDKLKPKKDITKKPANKAK

SEQ ID NO: 25395 - DNA, 1876 bp, Arabidopsis thaliana
  misc_feature (1)..(1876): Ceres Seq. ID no. 12421228
  misc_feature: MA Experiment ID: 108434 Result: Down-regulated in Transcription
  misc_feature: MA Experiment 108434 PARAMETER Experiment Name: At_Root_Tips_cDNA_P Parameter: Tissue Value: Root Tips
  misc_feature: MA Experiment ID: 108461 Result: Up-regulated in Transcription
  misc_feature: MA Experiment 108461 PARAMETER Experiment Name: At_Germinating_Seeds_cDNA_P Parameter: Age (day) Value: 1 vs. 0
  misc_feature: MA Experiment 108461 PARAMETER Experiment Name: At_Germinating_Seeds_cDNA_P Parameter: Tissue Value: Germinating Seeds
  misc_feature: MA Experiment ID: 108462 Result: Up-regulated in Transcription
  misc_feature: MA Experiment 108462 PARAMETER Experiment Name: At_Germinating_Seeds_cDNA_P Parameter: Age (day) Value: 2 vs. 0
  misc_feature: MA Experiment 108462 PARAMETER Experiment Name: At_Germinating_Seeds_cDNA_P Parameter: Tissue Value: Germinating Seeds
  misc_feature: MA Experiment ID: 108463 Result: Up-regulated in Transcription
  misc_feature: MA Experiment 108463 PARAMETER Experiment Name: At_Germinating_Seeds_cDNA_P Parameter: Age (day) Value: 3 vs. 0
  misc_feature: MA Experiment 108463 PARAMETER Experiment Name: At_Germinating_Seeds_cDNA_P Parameter: Tissue Value: Germinating Seeds
  misc_feature: MA Experiment ID: 108464 Result: Up-regulated in Transcription
  misc_feature: MA Experiment 108464 PARAMETER Experiment Name: At_Germinating_Seeds_cDNA_P Parameter: Age (day) Value: 4 vs. 0
  misc_feature: MA Experiment 108464 PARAMETER Experiment Name: At_Germinating_Seeds_cDNA_P Parameter: Tissue Value: Germinating Seeds
  misc_feature: MA Experiment ID: 108488 Result: Up-regulated in Transcription
  misc_feature: MA Experiment ID: 108569 Result: Up-regulated in Transcription
  misc_feature: MA Experiment 108569 PARAMETER Experiment Name: At_0.001%_MeJA__cDNA_P Parameter: Timepoint (hr) Value: 6
  misc_feature: MA Experiment 108569 PARAMETER Experiment Name: At_0.001%_MeJA__cDNA_P Parameter: Tissue Value: Aerial
  misc_feature: MA Experiment 108569 PARAMETER Experiment Name: At_0.001%_MeJA__cDNA_P Parameter: Treatment Value: 0.001% MeJA vs. No Treatment
  misc_feature: MA Experiment ID: 20000069 Result: Down-regulated in Transcription
  misc_feature: MA Experiment 20000069 PARAMETER Experiment Name: At_100uM_ABA_Mutants_cDNA_P Parameter: Plant Line Value: CS23
  misc_feature: MA Experiment 20000069 PARAMETER Experiment Name: At_100uM_ABA_Mutants_cDNA_P Parameter: Timepoint (hr) Value: 6
  misc_feature: MA Experiment 20000069 PARAMETER Experiment Name: At_100uM_ABA_Mutants_cDNA_P Parameter: Tissue Value: Aerial
  misc_feature: MA Experiment 20000069 PARAMETER Experiment Name: At_100uM_ABA_Mutants_cDNA_P Parameter: Treatment Value: 100uM ABA vs. No Treatment
  misc_feature: MA Experiment ID: 20000071 Result: Down-regulated in Transcription
  misc_feature: MA Experiment 20000071 PARAMETER Experiment Name: At_100uM_ABA_Mutants_cDNA_P Parameter: Plant Line Value: CS8104
  misc_feature: MA Experiment 20000071 PARAMETER Experiment Name: At_100uM_ABA_Mutants_cDNA_P Parameter: Timepoint (hr) Value: 6
  misc_feature: MA Experiment 20000071 PARAMETER Experiment Name: At_100uM_ABA_Mutants_cDNA_P Parameter: Tissue Value: Aerial
  misc_feature: MA Experiment 20000071 PARAMETER Experiment Name: At_100uM_ABA_Mutants_cDNA_P Parameter: Treatment Value: 100uM ABA vs. No Treatment
  misc_feature: MA Experiment ID: 20000087 Result: Down-regulated in Transcription
  misc_feature: MA Experiment 20000087 PARAMETER Experiment Name: At_100uM_ABA_Mutants_cDNA_P Parameter: Plant Line Value: WS
  misc_feature: MA Experiment 20000087 PARAMETER Experiment Name: At_100uM_ABA_Mutants_cDNA_P Parameter: Timepoint (hr) Value: 6
  misc_feature: MA Experiment 20000087 PARAMETER Experiment Name: At_100uM_ABA_Mutants_cDNA_P Parameter: Tissue Value: Aerial
  misc_feature: MA Experiment 20000087 PARAMETER Experiment Name: At_100uM_ABA_Mutants_cDNA_P Parameter: Treatment Value: 100uM ABA vs. No Treatment
  misc_feature: MA Experiment ID: 20000090 Result: Down-regulated in Transcription
  misc_feature: MA Experiment ID: 20000117 Result: Down-regulated in Transcription
  misc_feature: MA Experiment 20000117 PARAMETER Experiment Name: At_100uM_ABA_Mutants_cDNA_P Parameter: Plant Line Value: Columbia
  misc_feature: MA Experiment 20000117 PARAMETER Experiment Name: At_100uM_ABA_Mutants_cDNA_P Parameter: Timepoint (hr) Value: 6
  misc_feature: MA Experiment 20000117 PARAMETER Experiment Name: At_100uM_ABA_Mutants_cDNA_P Parameter: Tissue Value: Aerial
  misc_feature: MA Experiment 20000117 PARAMETER Experiment Name: At_100uM_ABA_Mutants_cDNA_P Parameter: Treatment Value: 100uM ABA vs. No Treatment
  misc_feature: MA Experiment ID: 20000179 Result: Up-regulated in Transcription
  misc_feature: MA Experiment 20000179 PARAMETER Experiment Name: At_Germinating_Seeds_P Parameter: Age (hr) Value: 6 vs. 0
  misc_feature: MA Experiment 20000179 PARAMETER Experiment Name: At_Germinating_Seeds_P Parameter: Tissue Value: Germinating Seeds
  misc_feature: MA Experiment ID: 20000180 Result: Up-regulated in Transcription
  misc_feature: MA Experiment 20000180 PARAMETER Experiment Name: At_Germinating_Seeds_P Parameter: Age (hr) Value: 24 vs. 0
  misc_feature: MA Experiment 20000180 PARAMETER Experiment Name: At_Germinating_Seeds_P Parameter: Tissue Value: Germinating Seeds
  misc_feature: MA Experiment ID: 20000185 Result: Down-regulated in Transcription
  misc_feature: MA Experiment 20000185 PARAMETER Experiment Name: At_Roots__P Parameter: Age (day) Value: 7 vs. 21
  misc_feature: MA Experiment 20000185 PARAMETER Experiment Name: At_Roots__P Parameter: Organism Value: A. thaliana
  misc_feature: MA Experiment 20000185 PARAMETER Experiment Name: At_Roots__P Parameter: Tissue Value: Roots vs. Whole Plant
  misc_feature: MA Experiment ID: 20000234 Result: Up-regulated in Transcription
  misc_feature: MA Experiment 20000234 PARAMETER Experiment Name: At_Siliques_P Parameter: Age (day) Value: 21
  misc_feature: MA Experiment 20000234 PARAMETER Experiment Name: At_Siliques_P Parameter: Organism Value: A. thaliana
  misc_feature: MA Experiment 20000234 PARAMETER Experiment Name: At_Siliques_P Parameter: Plant Line Value: WS
  misc_feature: MA Experiment 20000234 PARAMETER Experiment Name: At_Siliques_P Parameter: Tissue Value: Less Than 5mm Siliques vs. Whole Plant
  misc_feature: MA Experiment ID: 20000438 Result: Up-regulated in Transcription
  misc_feature: MA Experiment 20000438 PARAMETER Experiment Name: At_Shoots__P Parameter: Age (day) Value: 14
  misc_feature: MA Experiment 20000438 PARAMETER Experiment Name: At_Shoots__P Parameter: Tissue Value: Shoots vs. Whole Plant
  misc_feature: MA Experiment ID: 20000439 Result: Down-regulated in Transcription
  misc_feature: MA Experiment 20000439 PARAMETER Experiment Name: At_Roots__P Parameter: Age (day) Value: 14 vs. 21
  misc_feature: MA Experiment 20000439 PARAMETER Experiment Name: At_Roots__P Parameter: Organism Value: A. thaliana
  misc_feature: MA Experiment 20000439 PARAMETER Experiment Name: At_Roots__P Parameter: Tissue Value: Roots vs. Whole Plant
  misc_feature: MA Experiment ID: 20000441 Result: Up-regulated in Transcription
  misc_feature: MA Experiment 20000441 PARAMETER Experiment Name: At_1uM_BR-BRZ__P Parameter: Tissue Value: Shoot Apices
  misc_feature: MA Experiment 20000441 PARAMETER Experiment Name: At_1uM_BR-BRZ__P Parameter: Treatment Value: 1uM BR vs. No Treatment
  misc_feature: MA Experiment ID: 20000495 Result: Up-regulated in Transcription
  misc_feature: MA Experiment 20000495 PARAMETER Experiment Name: At_Guard_Cells_P Parameter: Harvest Date Value: 8/2/2002
  misc_feature: MA Experiment 20000495 PARAMETER Experiment Name: At_Guard_Cells_P Parameter: Organism Value: A. thaliana
  misc_feature: MA Experiment 20000495 PARAMETER Experiment Name: At_Guard_Cells_P Parameter: Tissue Value: Guard Cells vs. Leaves
  misc_feature: MA Experiment ID: 20000496 Result: Up-regulated in Transcription
  misc_feature: MA Experiment 20000496 PARAMETER Experiment Name: At_Guard_Cells_P Parameter: Harvest Date Value: 7/19/2002
  misc_feature: MA Experiment 20000496 PARAMETER Experiment Name: At_Guard_Cells_P Parameter: Organism Value: Canola
  misc_feature: MA Experiment 20000496 PARAMETER Experiment Name: At_Guard_Cells_P Parameter: Tissue Value: Guard Cells vs. Leaves
  misc_feature: MA Experiment ID: 20001247 Result: Up-regulated in Transcription
  misc_feature: MA Experiment 20001247 PARAMETER Experiment Name: At_Far-red-induction_P Parameter: Age (day) Value: 7
  misc_feature: MA Experiment 20001247 PARAMETER Experiment Name: At_Far-red-induction_P Parameter: Light Value: Far-red vs. White
  misc_feature: MA Experiment 20001247 PARAMETER Experiment Name: At_Far-red-induction_P Parameter: Organism Value: A. thaliana
  misc_feature: MA Experiment 20001247 PARAMETER Experiment Name: At_Far-red-induction_P Parameter: Plant Line Value: Columbia
  misc_feature: MA Experiment 20001247 PARAMETER Experiment Name: At_Far-red-induction_P Parameter: Timepoint (hr) Value: 1
  misc_feature: MA Experiment 20001247 PARAMETER Experiment Name: At_Far-red-induction_P Parameter: Tissue Value: Whole Plant
  misc_feature: MA Experiment ID: 20001248 Result: Down-regulated in Transcription
  misc_feature: MA Experiment 20001248 PARAMETER Experiment Name: At_Far-red-induction_P Parameter: Age (day) Value: 7
  misc_feature: MA Experiment 20001248 PARAMETER Experiment Name: At_Far-red-induction_P Parameter: Light Value: Far-red vs. White
  misc_feature: MA Experiment 20001248 PARAMETER Experiment Name: At_Far-red-induction_P Parameter: Organism Value: A. thaliana
  misc_feature: MA Experiment 20001248 PARAMETER Experiment Name: At_Far-red-induction_P Parameter: Plant Line Value: Columbia
  misc_feature: MA Experiment 20001248 PARAMETER Experiment Name: At_Far-red-induction_P Parameter: Timepoint (hr) Value: 4
  misc_feature: MA Experiment 20001248 PARAMETER Experiment Name: At_Far-red-induction_P Parameter: Tissue Value: Whole Plant
  misc_feature: MA Experiment ID: 20001451 Result: Up-regulated in Transcription
  misc_feature: MA Experiment 20001451 PARAMETER Experiment Name: At_Far-red-induction_P Parameter: Age (day) Value: 7
  misc_feature: MA Experiment 20001451 PARAMETER Experiment Name: At_Far-red-induction_P Parameter: Light Value: Far-red vs. White
  misc_feature: MA Experiment 20001451 PARAMETER Experiment Name: At_Far-red-induction_P Parameter: Organism Value: A. thaliana
  misc_feature: MA Experiment 20001451 PARAMETER Experiment Name: At_Far-red-induction_P Parameter: Plant Line Value: Columbia
  misc_feature: MA Experiment 20001451 PARAMETER Experiment Name: At_Far-red-induction_P Parameter: Timepoint (hr) Value: 24
  misc_feature: MA Experiment 20001451 PARAMETER Experiment Name: At_Far-red-induction_P Parameter: Tissue Value: Whole Plant
  misc_feature: MA Experiment ID: 20001905 Result: Down-regulated in Transcription
  misc_feature: MA Experiment 20001905 PARAMETER Experiment Name: At_Drought_Reproduction_P Parameter: Age (day) Value: 40
  misc_feature: MA Experiment 20001905 PARAMETER Experiment Name: At_Drought_Reproduction_P Parameter: Organism Value: A. thaliana
  misc_feature: MA Experiment 20001905 PARAMETER Experiment Name: At_Drought_Reproduction_P Parameter: Plant Line Value: WS
  misc_feature: MA Experiment 20001905 PARAMETER Experiment Name: At_Drought_Reproduction_P Parameter: Timepoint (day) Value: 10
  misc_feature: MA Experiment 20001905 PARAMETER Experiment Name: At_Drought_Reproduction_P Parameter: Tissue Value: Rosettes
  misc_feature: MA Experiment 20001905 PARAMETER Experiment Name: At_Drought_Reproduction_P Parameter: Treatment Value: Drought vs. No Drought
gagagagtcaatcttcttctctgtttttgtctctttggctatatatattcaaacattgtgtgaacagaacacaaatcaacacaacacacacaactttgtgttctttaagttttgtttcagagatcaatggccgggactggattgtttgctgagattctggatggagaagtatacaaatactacgctgacggagagtggaaaacttcttcctccggtaagagtgtagccatcattaacccggccacgaggaagacacagtacaaggttcaagcatgcacgcaagaagaagtgaacgcagtgatggaacttgcgaaatcggctcagaaatcgtgggcaaagactcctctttggaaaagaactgagcttcttcacaaagcagctgcaatccttaaggacaacaaagctcccatggctgagtctcttgttaaagaaatcgctaaacccgctaaagattctgttactgaggttgtgaggtctggagatttgatctcttattgtgctgaagaaggtgttaggatcttaggtgaagggaagtttcttctctctgatagcttccccggtaatgaccgtactaagtactgcctcacttccaagattccactcggtgtggttttggctattcctccattcaattatccagttaatctcgctgtatcgaagatcgctcctgctttgatcgccggaaactcccttgtcctcaaacctccaactcaaggagctgtttcttgccttcacatggtacattgctttcacttagccggtttcccaaaaggtcttatcagctgcatcaccggaaaaggatctgagatcggcgatttcctcactatgcaccctgctgttaactgcattagtttcacgggtggtgataccggaatctcaatctcaaagaaagctggtatgatccctcttcaaatggaacttggaggtaaagatgcatgcattgttctagatgatgctgatcttgatttagttgcttccaatatcatcaaaggaggattctcttacagcgggcagagatgcactgcggttaaggtagtcctagtgatggaatcagtagcggatgagcttgttgagaaagtgaaagctaaagtggccaaactcacggtgggaccgcccgaagagaactccgatatcacggcagtggtgtcggaatcttcagctaatttcattgaaggattggtgatggatgctaaggagaaaggagcaacgttttgtcaagagtataaaagagaaggtaacttgatttggccgttgcttttggacaatgttagaccggacatgaggatcgcgtgggaggaaccattcggtcctgttgtgccggtcttgaggatcaattctgttgaagaagggattaatcattgcaatgcaagcaactttggccttcagggatgtgtattcactaaagacatcaacaaggcaatactgatcagtgatgcaatggagacaggaaccgttcagatcaactctgcgccagctcgtggaccggaccacttccctttccagggacttaaggacagtggaatagggtcacaaggtgtgacaaatagcatcaatttgatgactaaagtgaagaccactgtcattaacttgcctacaccttcttactctatgggttagtttccctttttttatgttcttcatcttagaatcaaaatcaatcatgtcatgtttgtattggattcaatcgaatactgcgaataaagggagtgattagcgtaagtactatggtttgtaatctctatgtaaccaataagaggatattatgagtgagaggtttggttgtgttgtgttataacaggggacggtttcatctcacgcctgtgattcgagcacacaaaactgaaaacttcttttgataattggagttttatcattt

SEQ ID NO: 25396 - protein, 496 aa, Arabidopsis thaliana
  peptide (1)..(496): Ceres Seq. ID no. 12421229
  misc_feature (1)..(496): Homolog of NCBI NO: 21780317 NR Description: nonphosphorylating glyceraldehyde-3-phosphate
  misc_feature (1)..(496): Homolog of NCBI NO: 21780314 NR Description: nonphosphorylating glyceraldehyde-3-phosphate
  misc_feature (22)..(496): Homolog of NCBI NO: 29367371 NR Description: NADH-dependent glyceraldehyde-3-phosphate
  misc_feature (1)..(496): Homolog of NCBI NO: 19880027 NR Description: glyceraldehyde-3-phosphate dehydrogenase [Oryza
  misc_feature (1)..(496): Homolog of NCBI NO: 2494075 NR Description: NADP-DEPENDENT GLYCERALDEHYDE-3-PHOSPHATE (NON-PHOSPHORYLATING GLYCERALDEHYDE 3-PHOSPHATE DEHYDROGENASE)
  misc_feature (1)..(496): Homolog of NCBI NO: 6425093 NR Description: nonreversible glyceraldehyde-3-phosphate
  misc_feature (1)..(496): Homolog of NCBI NO: 1084372 NR Description: glyceraldehyde-3-phosphate dehydrogenase (NADP)
  misc_feature (1)..(496): Homolog of NCBI NO: 2494076 NR Description: NADP-DEPENDENT GLYCERALDEHYDE-3-PHOSPHATE (NON-PHOSPHORYLATING GLYCERALDEHYDE 3-PHOSPHATE DEHYDROGENASE)
  misc_feature (1)..(496): Homolog of NCBI NO: 3913711 NR Description: NADP-dependent glyceraldehyde-3-phosphate (Non-phosphorylating glyceraldehyde 3-phosphate dehydrogenase)
  misc_feature (1)..(496): Homolog of NCBI NO: 15224111 NR Description: putative NADP-dependent
MAGTGLFAEILDGEVYKYYADGEWKTSSSGKSVAIINPATRKTQYKVQACTQEEVNAVMELAKSAQKSWAKTPLWKRTELLHKAAAILKDNKAPMAESLVKEIAKPAKDSVTEVVRSGDLISYCAEEGVRILGEGKFLLSDSFPGNDRTKYCLTSKIPLGVVLAIPPFNYPVNLAVSKIAPALIAGNSLVLKPPTQGAVSCLHMVHCFHLAGFPKGLISCITGKGSEIGDFLTMHPAVNCISFTGGDTGISISKKAGMIPLQMELGGKDACIVLDDADLDLVASNIIKGGFSYSGQRCTAVKVVLVMESVADELVEKVKAKVAKLTVGPPEENSDITAVVSESSANFIEGLVMDAKEKGATFCQEYKREGNLIWPLLLDNVRPDMRIAWEEPFGPVVPVLRINSVEEGINHCNASNFGLQGCVFTKDINKAILISDAMETGTVQINSAPARGPDHFPFQGLKDSGIGSQGVTNSINLMTKVKTTVINLPTPSYSMG

SEQ ID NO: 25397 - protein, 438 aa, Arabidopsis thaliana
  peptide (1)..(438): Ceres Seq. ID no. 12421230
  misc_feature (1)..(438): Homolog of NCBI NO: 21780317 NR Description: nonphosphorylating glyceraldehyde-3-phosphate
  misc_feature (1)..(438): Homolog of NCBI NO: 21780314 NR Description: nonphosphorylating glyceraldehyde-3-phosphate
  misc_feature (1)..(438): Homolog of NCBI NO: 29367371 NR Description: NADH-dependent glyceraldehyde-3-phosphate
  misc_feature (1)..(438): Homolog of NCBI NO: 19880027 NR Description: glyceraldehyde-3-phosphate dehydrogenase [Oryza
  misc_feature (1)..(438): Homolog of NCBI NO: 2494075 NR Description: NADP-DEPENDENT GLYCERALDEHYDE-3-PHOSPHATE (NON-PHOSPHORYLATING GLYCERALDEHYDE 3-PHOSPHATE DEHYDROGENASE)
  misc_feature (1)..(438): Homolog of NCBI NO: 6425093 NR Description: nonreversible glyceraldehyde-3-phosphate
  misc_feature (1)..(438): Homolog of NCBI NO: 1084372 NR Description: glyceraldehyde-3-phosphate dehydrogenase (NADP)
  misc_feature (1)..(438): Homolog of NCBI NO: 2494076 NR Description: NADP-DEPENDENT GLYCERALDEHYDE-3-PHOSPHATE (NON-PHOSPHORYLATING GLYCERALDEHYDE 3-PHOSPHATE DEHYDROGENASE)
  misc_feature (1)..(438): Homolog of NCBI NO: 3913711 NR Description: NADP-dependent glyceraldehyde-3-phosphate (Non-phosphorylating glyceraldehyde 3-phosphate dehydrogenase)
  misc_feature (1)..(438): Homolog of NCBI NO: 15224111 NR Description: putative NADP-dependent
MELAKSAQKSWAKTPLWKRTELLHKAAAILKDNKAPMAESLVKEIAKPAKDSVTEVVRSGDLISYCAEEGVRILGEGKFLLSDSFPGNDRTKYCLTSKIPLGVVLAIPPFNYPVNLAVSKIAPALIAGNSLVLKPPTQGAVSCLHMVHCFHLAGFPKGLISCITGKGSEIGDFLTMHPAVNCISFTGGDTGISISKKAGMIPLQMELGGKDACIVLDDADLDLVASNIIKGGFSYSGQRCTAVKVVLVMESVADELVEKVKAKVAKLTVGPPEENSDITAVVSESSANFIEGLVMDAKEKGATFCQEYKREGNLIWPLLLDNVRPDMRIAWEEPFGPVVPVLRINSVEEGINHCNASNFGLQGCVFTKDINKAILISDAMETGTVQINSAPARGPDHFPFQGLKDSGIGSQGVTNSINLMTKVKTTVINLPTPSYSMG

SEQ ID NO: 25398 - protein, 402 aa, Arabidopsis thaliana
  peptide (1)..(402): Ceres Seq. ID no. 12421231
  misc_feature (1)..(402): Homolog of NCBI NO: 21780314 NR Description: nonphosphorylating glyceraldehyde-3-phosphate
  misc_feature (1)..(402): Homolog of NCBI NO: 29367371 NR Description: NADH-dependent glyceraldehyde-3-phosphate
  misc_feature (1)..(402): Homolog of NCBI NO: 19880027 NR Description: glyceraldehyde-3-phosphate dehydrogenase [Oryza
  misc_feature (1)..(402): Homolog of NCBI NO: 2494075 NR Description: NADP-DEPENDENT GLYCERALDEHYDE-3-PHOSPHATE (NON-PHOSPHORYLATING GLYCERALDEHYDE 3-PHOSPHATE DEHYDROGENASE)
  misc_feature (1)..(402): Homolog of NCBI NO: 6425093 NR Description: nonreversible glyceraldehyde-3-phosphate
  misc_feature (1)..(402): Homolog of NCBI NO: 1084372 NR Description: glyceraldehyde-3-phosphate dehydrogenase (NADP)
  misc_feature (1)..(402): Homolog of NCBI NO: 2494076 NR Description: NADP-DEPENDENT GLYCERALDEHYDE-3-PHOSPHATE (NON-PHOSPHORYLATING GLYCERALDEHYDE 3-PHOSPHATE DEHYDROGENASE)
  misc_feature (1)..(402): Homolog of NCBI NO: 3913711 NR Description: NADP-dependent glyceraldehyde-3-phosphate (Non-phosphorylating glyceraldehyde 3-phosphate dehydrogenase)
  misc_feature (1)..(402): Homolog of NCBI NO: 15224111 NR Description: putative NADP-dependent
  misc_feature (1)..(402): Homolog of NCBI NO: 21780317 NR Description: nonphosphorylating glyceraldehyde-3-phosphate
MAESLVKEIAKPAKDSVTEVVRSGDLISYCAEEGVRILGEGKFLLSDSFPGNDRTKYCLTSKIPLGVVLAIPPFNYPVNLAVSKIAPALIAGNSLVLKPPTQGAVSCLHMVHCFHLAGFPKGLISCITGKGSEIGDFLTMHPAVNCISFTGGDTGISISKKAGMIPLQMELGGKDACIVLDDADLDLVASNIIKGGFSYSGQRCTAVKVVLVMESVADELVEKVKAKVAKLTVGPPEENSDITAVVSESSANFIEGLVMDAKEKGATFCQEYKREGNLIWPLLLDNVRPDMRIAWEEPFGPVVPVLRINSVEEGINHCNASNFGLQGCVFTKDINKAILISDAMETGTVQINSAPARGPDHFPFQGLKDSGIGSQGVTNSINLMTKVKTTVINLPTPSYSMG

SEQ ID NO: 25399 - DNA, 1352 bp, Arabidopsis thaliana
  misc_feature (1)..(1352): Ceres Seq. ID no. 12325276
  misc_feature: MA Experiment ID: 108434 Result: Down-regulated in Transcription
  misc_feature: MA Experiment 108434 PARAMETER Experiment Name: At_Root_Tips_cDNA_P Parameter: Tissue Value: Root Tips
  misc_feature: MA Experiment ID: 108435 Result: Up-regulated in Transcription
  misc_feature: MA Experiment 108435 PARAMETER Experiment Name: At_stm_Mutants_cDNA_P Parameter: Plant Line Value: wt Landsburg vs stm
  misc_feature: MA Experiment 108435 PARAMETER Experiment Name: At_stm_Mutants_cDNA_P Parameter: Tissue Value: Shoot Apical Meristem Region
  misc_feature: MA Experiment ID: 108462 Result: Up-regulated in Transcription
  misc_feature: MA Experiment 108462 PARAMETER Experiment Name: At_Germinating_Seeds_cDNA_P Parameter: Age (day) Value: 2 vs. 0
  misc_feature: MA Experiment 108462 PARAMETER Experiment Name: At_Germinating_Seeds_cDNA_P Parameter: Tissue Value: Germinating Seeds
  misc_feature: MA Experiment ID: 108463 Result: Up-regulated in Transcription
  misc_feature: MA Experiment 108463 PARAMETER Experiment Name: At_Germinating_Seeds_cDNA_P Parameter: Age (day) Value: 3 vs. 0
  misc_feature: MA Experiment 108463 PARAMETER Experiment Name: At_Germinating_Seeds_cDNA_P Parameter: Tissue Value: Germinating Seeds
  misc_feature: MA Experiment ID: 108464 Result: Up-regulated in Transcription
  misc_feature: MA Experiment 108464 PARAMETER Experiment Name: At_Germinating_Seeds_cDNA_P Parameter: Age (day) Value: 4 vs. 0
  misc_feature: MA Experiment 108464 PARAMETER Experiment Name: At_Germinating_Seeds_cDNA_P Parameter: Tissue Value: Germinating Seeds
  misc_feature: MA Experiment ID: 108573 Result: Up-regulated in Transcription
  misc_feature: MA Experiment 108573 PARAMETER Experiment Name: At_Drought_cDNA_P Parameter: Timepoint (hr) Value: 6
  misc_feature: MA Experiment 108573 PARAMETER Experiment Name: At_Drought_cDNA_P Parameter: Tissue Value: Aerial
  misc_feature: MA Experiment 108573 PARAMETER Experiment Name: At_Drought_cDNA_P Parameter: Treatment Value: Drought vs. No Drought
  misc_feature: MA Experiment ID: 108585 Result: Up-regulated in Transcription
  misc_feature: MA Experiment 108585 PARAMETER Experiment Name: At_5mM_NaNP_cDNA_P Parameter: Timepoint (hr) Value: 6
  misc_feature: MA Experiment 108585 PARAMETER Experiment Name: At_5mM_NaNP_cDNA_P Parameter: Tissue Value: Aerial
  misc_feature: MA Experiment 108585 PARAMETER Experiment Name: At_5mM_NaNP_cDNA_P Parameter: Treatment Value: null
  misc_feature: MA Experiment ID: 108595 Result: Up-regulated in Transcription
  misc_feature: MA Experiment 108595 PARAMETER Experiment Name: At_Ler-pi_Ovule_cDNA_P Parameter: Plant Line Value: null
  misc_feature: MA Experiment ID: 108605 Result: Up-regulated in Transcription
  misc_feature: MA Experiment 108605 PARAMETER Experiment Name: At_100uM_ABA_cDNA_P Parameter: Timepoint (hr) Value: 6
  misc_feature: MA Experiment 108605 PARAMETER Experiment Name: At_100uM_ABA_cDNA_P Parameter: Tissue Value: Aerial
  misc_feature: MA Experiment 108605 PARAMETER Experiment Name: At_100uM_ABA_cDNA_P Parameter: Treatment Value: 100uM ABA vs. No Treatment
  misc_feature: MA Experiment ID: 108609 Result: Up-regulated in Transcription
  misc_feature: MA Experiment 108609 PARAMETER Experiment Name: At_100uM_ABA_cDNA_P Parameter: Timepoint (hr) Value: 24
  misc_feature: MA Experiment 108609 PARAMETER Experiment Name: At_100uM_ABA_cDNA_P Parameter: Tissue Value: Aerial
  misc_feature: MA Experiment 108609 PARAMETER Experiment Name: At_100uM_ABA_cDNA_P Parameter: Treatment Value: 100uM ABA vs. No Treatment
  misc_feature: MA Experiment ID: 20000113 Result: Down-regulated in Transcription
  misc_feature: MA Experiment 20000113 PARAMETER Experiment Name: At_42deg_Heat_cDNA_P Parameter: Temperature (deg C) Value: 42 vs. 22
  misc_feature: MA Experiment 20000113 PARAMETER Experiment Name: At_42deg_Heat_cDNA_P Parameter: Timepoint (hr) Value: 8
  misc_feature: MA Experiment 20000113 PARAMETER Experiment Name: At_42deg_Heat_cDNA_P Parameter: Tissue Value: Aerial
  misc_feature: MA Experiment ID: 20000184 Result: Up-regulated in Transcription
  misc_feature: MA Experiment 20000184 PARAMETER Experiment Name: At_Shoots__P Parameter: Age (day) Value: 7
  misc_feature: MA Experiment 20000184 PARAMETER Experiment Name: At_Shoots__P Parameter: Tissue Value: Shoots vs. Whole Plant
  misc_feature: MA Experiment ID: 20000185 Result: Up-regulated in Transcription
  misc_feature: MA Experiment 20000185 PARAMETER Experiment Name: At_Roots__P Parameter: Age (day) Value: 7 vs. 21
  misc_feature: MA Experiment 20000185 PARAMETER Experiment Name: At_Roots__P Parameter: Organism Value: A. thaliana
  misc_feature: MA Experiment 20000185 PARAMETER Experiment Name: At_Roots__P Parameter: Tissue Value: Roots vs. Whole Plant
  misc_feature: MA Experiment ID: 20000286 Result: Up-regulated in Transcription
  misc_feature: MA Experiment 20000286 PARAMETER Experiment Name: At_Open_Flower_P Parameter: Age (day) Value: 21
  misc_feature: MA Experiment 20000286 PARAMETER Experiment Name: At_Open_Flower_P Parameter: Plant Line Value: WS
  misc_feature: MA Experiment 20000286 PARAMETER Experiment Name: At_Open_Flower_P Parameter: Tissue Value: Half Open vs. Whole Plant
  misc_feature: MA Experiment ID: 20001911 Result: Up-regulated in Transcription
  misc_feature: MA Experiment 20001911 PARAMETER Experiment Name: At_Drought_Reproduction_P Parameter: Age (day) Value: 40
  misc_feature: MA Experiment 20001911 PARAMETER Experiment Name: At_Drought_Reproduction_P Parameter: Organism Value: A. thaliana
  misc_feature: MA Experiment 20001911 PARAMETER Experiment Name: At_Drought_Reproduction_P Parameter: Plant Line Value: WS
  misc_feature: MA Experiment 20001911 PARAMETER Experiment Name: At_Drought_Reproduction_P Parameter: Timepoint (day) Value: 10
  misc_feature: MA Experiment 20001911 PARAMETER Experiment Name: At_Drought_Reproduction_P Parameter: Tissue Value: Flowers
  misc_feature: MA Experiment 20001911 PARAMETER Experiment Name: At_Drought_Reproduction_P Parameter: Treatment Value: Drought vs. No Drought
acatcaaaacttactacttcttcttcttcttcctttaccaaatcttttcttctttactctttttcatcgtcgagaaaaaatggagttggatcttacacctaagttgcccaagaaggtttacggaggagatggtggatcttactctgcctggtgcccagaggagttgccgatgctcaaacagggtaacattggagccgctaagcttgctcttgagaagaatggcttcgctgtccctcgttactctgattcctctaaggtcgcttatgttcttcaaggatctggaactgctggaattgttctcccagagaaggaggagaaggtgatcgcaatcaagcaaggtgattcgattgctcttccctttggtgtggtcacatggtggttcaacaacgaggatcctgagcttgttatcctcttccttggtgaaacccacaagggtcacaaagcagggcagttcactgagttctatcttactggcacaaacggtatcttcactggtttctccactgagtttgttggcagagcctgggaccttgatgagaacaccgtgaagaaacttgttggttctcaaaccggtaatggcattgtgaagcttgatgcgggctttaagatgccacagcccaaggaggagaaccgtgctgggtttgtcttgaactgtttggaggctcctcttgatgtagacatcaaggatggaggcagggtcgttgtcttgaacaccaagaaccttcctttggttggagaggttggctttggagctgatcttgttcggatcgatgcacactccatgtgttcgcctggtttctcttgtgactctgctcttcaggtgacttacattgtgggtggaagtggaagagtccaggtggttggtggtgatgggaaaagagttcttgagacccatatcaaagctggttctctcttcattgttccaaggttctttgtggtttctaagattgctgatgctgatggcatgtcttggttctccattgtcaccactcctgatccgatcttcacacatttggccgggaatacatcggtgtggaagtctttgtcccctgaggttttgcaggcagcgtttaaggtggctccggaggtggagaagtccttccgatccacgaggacttcatcagccattttcttccctccttccaactgaagaaggagaagaatgagaacaagaaccagcttttatcttttatcgtttgttgctttccctcagagatttttgagggtttttacttttcttgtgattcaaggaagtttcttagtctagttgtttaattctcttcctgccttttccccctggaccggttcttgttctcgttgttttaaaatattaaaaaatcgacctttcctat

SEQ ID NO: 25400 - protein, 382 aa, Arabidopsis thaliana
  peptide (1)..(382): Ceres Seq. ID no. 12325277
  misc_feature (31)..(183): Pfam Name: Cupin Pfam Description: Cupin
  misc_feature (31)..(101): Homolog of NCBI NO: 949869 NR Description: legumin; 11S-globulin [Ginkgo biloba]
  misc_feature (158)..(381): Homolog of NCBI NO: 949869 NR Description: legumin; 11S-globulin [Ginkgo biloba]
  misc_feature (27)..(206): Homolog of NCBI NO: 7595348 NR Description: globulin-like protein [Cucumis melo]
  misc_feature (29)..(382): Homolog of NCBI NO: 28950668 NR Description: legumin-like protein [Zea mays]
  misc_feature (25)..(382): Homolog of NCBI NO: 34906084 NR Description: putative legumin-like protein
  misc_feature (27)..(382): Homolog of NCBI NO: 37730876 NR Description: legumin-like protein [Zea mays]
  misc_feature (29)..(382): Homolog of NCBI NO: 28950670 NR Description: legumin-like protein [Zea mays]
  misc_feature (27)..(382): Homolog of NCBI NO: 15226926 NR Description: legumin-like protein; protein id: At2g28680.1
  misc_feature (27)..(382): Homolog of NCBI NO: 21593610 NR Description: globulin-like protein [Arabidopsis thaliana]
  misc_feature (27)..(382): Homolog of NCBI NO: 15223000 NR Description: globulin-like protein
HQNLLLLLLLPLPNLFFFTLFHRREKMELDLTPKLPKKVYGGDGGSYSAWCPEELPMLKQGNIGAAKLALEKNGFAVPRYSDSSKVAYVLQGSGTAGIVLPEKEEKVIAIKQGDSIALPFGVVTWWFNNEDPELVILFLGETHKGHKAGQFTEFYLTGTNGIFTGFSTEFVGRAWDLDENTVKKLVGSQTGNGIVKLDAGFKMPQPKEENRAGFVLNCLEAPLDVDIKDGGRVVVLNTKNLPLVGEVGFGADLVRIDAHSMCSPGFSCDSALQVTYIVGGSGRVQVVGGDGKRVLETHIKAGSLFIVPRFFVVSKIADADGMSWFSIVTTPDPIFTHLAGNTSVWKSLSPEVLQAAFKVAPEVEKSFRSTRTSSAIFFPPSN

SEQ ID NO: 25401 - protein, 356 aa, Arabidopsis thaliana
  peptide (1)..(356): Ceres Seq. ID no. 12325278
  misc_feature (5)..(157): Pfam Name: Cupin Pfam Description: Cupin
  misc_feature (5)..(75): Homolog of NCBI NO: 949869 NR Description: legumin; 11S-globulin [Ginkgo biloba]
  misc_feature (132)..(355): Homolog of NCBI NO: 949869 NR Description: legumin; 11S-globulin [Ginkgo biloba]
  misc_feature (1)..(180): Homolog of NCBI NO: 7595348 NR Description: globulin-like protein [Cucumis melo]
  misc_feature (3)..(356): Homolog of NCBI NO: 28950668 NR Description: legumin-like protein [Zea mays]
  misc_feature (1)..(356): Homolog of NCBI NO: 34906084 NR Description: putative legumin-like protein
  misc_feature (1)..(356): Homolog of NCBI NO: 37730876 NR Description: legumin-like protein [Zea mays]
  misc_feature (3)..(356): Homolog of NCBI NO: 28950670 NR Description: legumin-like protein [Zea mays]
  misc_feature (1)..(356): Homolog of NCBI NO: 15226926 NR Description: legumin-like protein; protein id: At2g28680.1
  misc_feature (1)..(356): Homolog of NCBI NO: 21593610 NR Description: globulin-like protein [Arabidopsis thaliana]
  misc_feature (1)..(356): Homolog of NCBI NO: 15223000 NR Description: globulin-like protein
MELDLTPKLPKKVYGGDGGSYSAWCPEELPMLKQGNIGAAKLALEKNGFAVPRYSDSSKVAYVLQGSGTAGIVLPEKEEKVIAIKQGDSIALPFGVVTWWFNNEDPELVILFLGETHKGHKAGQFTEFYLTGTNGIFTGFSTEFVGRAWDLDENTVKKLVGSQTGNGIVKLDAGFKMPQPKEENRAGFVLNCLEAPLDVDIKDGGRVVVLNTKNLPLVGEVGFGADLVRIDAHSMCSPGFSCDSALQVTYIVGGSGRVQVVGGDGKRVLETHIKAGSLFIVPRFFVVSKIADADGMSWFSIVTTPDPIFTHLAGNTSVWKSLSPEVLQAAFKVAPEVEKSFRSTRTSSAIFFPPSN

SEQ ID NO: 25402 - protein, 326 aa, Arabidopsis thaliana
  peptide (1)..(326): Ceres Seq. ID no. 12325279
  misc_feature (1)..(127): Pfam Name: Cupin Pfam Description: Cupin
  misc_feature (1)..(45): Homolog of NCBI NO: 949869 NR Description: legumin; 11S-globulin [Ginkgo biloba]
  misc_feature (102)..(325): Homolog of NCBI NO: 949869 NR Description: legumin; 11S-globulin [Ginkgo biloba]
  misc_feature (1)..(150): Homolog of NCBI NO: 7595348 NR Description: globulin-like protein [Cucumis melo]
  misc_feature (1)..(326): Homolog of NCBI NO: 28950668 NR Description: legumin-like protein [Zea mays]
  misc_feature (1)..(326): Homolog of NCBI NO: 34906084 NR Description: putative legumin-like protein
  misc_feature (1)..(326): Homolog of NCBI NO: 37730876 NR Description: legumin-like protein [Zea mays]
  misc_feature (1)..(326): Homolog of NCBI NO: 28950670 NR Description: legumin-like protein [Zea mays]
  misc_feature (1)..(326): Homolog of NCBI NO: 15226926 NR Description: legumin-like protein; protein id: At2g28680.1
  misc_feature (1)..(326): Homolog of NCBI NO: 21593610 NR Description: globulin-like protein [Arabidopsis thaliana]
  misc_feature (1)..(326): Homolog of NCBI NO: 15223000 NR Description: globulin-like protein
MLKQGNIGAAKLALEKNGFAVPRYSDSSKVAYVLQGSGTAGIVLPEKEEKVIAIKQGDSIALPFGVVTWWFNNEDPELVILFLGETHKGHKAGQFTEFYLTGTNGIFTGFSTEFVGRAWDLDENTVKKLVGSQTGNGIVKLDAGFKMPQPKEENRAGFVLNCLEAPLDVDIKDGGRVVVLNTKNLPLVGEVGFGADLVRIDAHSMCSPGFSCDSALQVTYIVGGSGRVQVVGGDGKRVLETHIKAGSLFIVPRFFVVSKIADADGMSWFSIVTTPDPIFTHLAGNTSVWKSLSPEVLQAAFKVAPEVEKSFRSTRTSSAIFFPPSN

SEQ ID NO: 25403 - DNA, 1436 bp, Arabidopsis thaliana
  misc_feature (1)..(1436): Ceres Seq. ID no. 12324868
  misc_feature: MA Experiment ID: 108594 Result: Down-regulated in Transcription
  misc_feature: MA Experiment 108594 PARAMETER Experiment Name: At_Ler-rhl_Root_cDNA_P Parameter: Plant Line Value: null
  misc_feature: MA Experiment ID: 108595 Result: Up-regulated in Transcription
  misc_feature: MA Experiment 108595 PARAMETER Experiment Name: At_Ler-pi_Ovule_cDNA_P Parameter: Plant Line Value: null
  misc_feature: MA Experiment ID: 20000184 Result: Down-regulated in Transcription
  misc_feature: MA Experiment 20000184 PARAMETER Experiment Name: At_Shoots__P Parameter: Age (day) Value: 7
  misc_feature: MA Experiment 20000184 PARAMETER Experiment Name: At_Shoots__P Parameter: Tissue Value: Shoots vs. Whole Plant
  misc_feature: MA Experiment ID: 20000185 Result: Up-regulated in Transcription
  misc_feature: MA Experiment 20000185 PARAMETER Experiment Name: At_Roots__P Parameter: Age (day) Value: 7 vs. 21
  misc_feature: MA Experiment 20000185 PARAMETER Experiment Name: At_Roots__P Parameter: Organism Value: A. thaliana
  misc_feature: MA Experiment 20000185 PARAMETER Experiment Name: At_Roots__P Parameter: Tissue Value: Roots vs. Whole Plant
  misc_feature: MA Experiment ID: 20000227 Result: Down-regulated in Transcription
  misc_feature: MA Experiment 20000227 PARAMETER Experiment Name: At_Root-Tips-vs-Tops_P Parameter: Tissue Value: Root Tips vs. Root Tops
  misc_feature: MA Experiment ID: 20000439 Result: Up-regulated in Transcription
  misc_feature: MA Experiment 20000439 PARAMETER Experiment Name: At_Roots__P Parameter: Age (day) Value: 14 vs. 21
  misc_feature: MA Experiment 20000439 PARAMETER Experiment Name: At_Roots__P Parameter: Organism Value: A. thaliana
  misc_feature: MA Experiment 20000439 PARAMETER Experiment Name: At_Roots__P Parameter: Tissue Value: Roots vs. Whole Plant
  misc_feature: MA Experiment ID: 20000495 Result: Up-regulated in Transcription
  misc_feature: MA Experiment 20000495 PARAMETER Experiment Name: At_Guard_Cells_P Parameter: Harvest Date Value: 8/2/2002
  misc_feature: MA Experiment 20000495 PARAMETER Experiment Name: At_Guard_Cells_P Parameter: Organism Value: A. thaliana
  misc_feature: MA Experiment 20000495 PARAMETER Experiment Name: At_Guard_Cells_P Parameter: Tissue Value: Guard Cells vs. Leaves
atatacacaaaccccttagagaaacaaaaagaatacaaaaagaagagagagattagttattaacttattcataataagtgtaattacttcgtatttacttttttttggttagcagtcgactagtaatcaataatgggttactgcgatggtaaatggacaccggtgattattatggttatgatcaattcagcgctgggtttagctaatgctttggttaaaaaagtactcgatggtggtgttaaccatatggttatcgcaacatatcgtcttgctatttcaaccctatttttggcaccaatcgcatttttttgggaacggaaaacgagaccgacactaacgctcaacatcttggttcagcttttcttcagtgctcttgttggggcaagtttgactcagtatttcttcctattggggctatcatacacatcggctacgttggcatgtgcttttattagcatgacgcctgcgattacattcgttatggctctaatattcagggtagagaagctaaacatgaaaagcaaagcaggtatggggatggtgatgggcgcgttgatatgcataggaggagctttattattaacaatgtacaaaggtgttcccttgacaaaacttcggaaactagaaacccatcagttgataaacaataaccacgctatgaaaccagagaattggataataggatgcgtacttctctttgcgggtagtagctgtttcgggtcgtggatgctgatacaagccaaagtgaacgagaaatacccttgtcaatactcgagtactgtcgtattatccttctttggcaccatccaatgcgcccttctaagcctcatcaaatctcgagatatcacggcttggatcctcacagataaacttgatatcgttaccattgtttacgcgggagcagtagcacaaggaatatgtacggttggaacgtcttggtgcatcagaaagagaggacctatctttacttctatatttaccccggtggggcttatatttgcaacactatttgatttcttgatccttcatcgtcaaattttcctaggaagtgttgtcggatctggggttgtaatcttcggactatacatattcttgttgggaaaagtcaggctaatgaaagaagagtgtgaaaagaagttaccttgtcgttttaatgaagatgatcaagaagaagatgatgatgaacaatacaaaaagggtcatcttatggttgttccaatgactccttgataagattagactttttttttttcttcttcttcacttcgtacattatttagtaaaaccattgaccggtgaaaattacatggactagtctaacaacggttcaaaaaactagtcacatgttttttttttttttgctttttcttttctttcccttttttttgttttgcaatgtaaaacttttattgcaataataaaaaaatctcctttgc

SEQ ID NO: 25404 - protein, 365 aa, Arabidopsis thaliana
  peptide (1)..(365): Ceres Seq. ID no. 12324869
  misc_feature (7)..(348): Homolog of NCBI NO: 15234179 NR Description: unknown protein
  misc_feature (7)..(324): Homolog of NCBI NO: 18378792 NR Description: expressed protein
  misc_feature (1)..(305): Homolog of NCBI NO: 30678880 NR Description: nodulin MtN21 family protein [Arabidopsis
  misc_feature (1)..(107): Homolog of NCBI NO: 7485384 NR Description: hypothetical protein F11O4.14 - Arabidopsis
  misc_feature (84)..(365): Homolog of NCBI NO: 7485384 NR Description: hypothetical protein F11O4.14 - Arabidopsis
  misc_feature (1)..(365): Homolog of NCBI NO: 15234185 NR Description: unknown protein; protein id: At4g01450.1
  misc_feature (1)..(142): Homolog of NCBI NO: 7486353 NR Description: hypothetical protein F3D13.3 - Arabidopsis
  misc_feature (84)..(158): Homolog of NCBI NO: 7486353 NR Description: hypothetical protein F3D13.3 - Arabidopsis
  misc_feature (184)..(365): Homolog of NCBI NO: 7486353 NR Description: hypothetical protein F3D13.3 - Arabidopsis
  misc_feature (1)..(365): Homolog of NCBI NO: 15234182 NR Description: hypothetical protein
MGYCDGKWTPVIIMVMINSALGLANALVKKVLDGGVNHMVIATYRLAISTLFLAPIAFFWERKTRPTLTLNILVQLFFSALVGASLTQYFFLLGLSYTSATLACAFISMTPAITFVMALIFRVEKLNMKSKAGMGMVMGALICIGGALLLTMYKGVPLTKLRKLETHQLINNNHAMKPENWIIGCVLLFAGSSCFGSWMLIQAKVNEKYPCQYSSTVVLSFFGTIQCALLSLIKSRDITAWILTDKLDIVTIVYAGAVAQGICTVGTSWCIRKRGPIFTSIFTPVGLIFATLFDFLILHRQIFLGSVVGSGVVIFGLYIFLLGKVRLMKEECEKKLPCRFNEDDQEEDDDEQYKKGHLMVVPMTP

SEQ ID NO: 25405 - protein, 352 aa, Arabidopsis thaliana
  peptide (1)..(352): Ceres Seq. ID no. 12324870
  misc_feature (1)..(335): Homolog of NCBI NO: 15234179 NR Description: unknown protein
  misc_feature (1)..(311): Homolog of NCBI NO: 18378792 NR Description: expressed protein
  misc_feature (1)..(292): Homolog of NCBI NO: 30678880 NR Description: nodulin MtN21 family protein [Arabidopsis
  misc_feature (1)..(94): Homolog of NCBI NO: 7485384 NR Description: hypothetical protein F11O4.14 - Arabidopsis
  misc_feature (71)..(352): Homolog of NCBI NO: 7485384 NR Description: hypothetical protein F11O4.14 - Arabidopsis
  misc_feature (1)..(352): Homolog of NCBI NO: 15234185 NR Description: unknown protein; protein id: At4g01450.1
  misc_feature (1)..(129): Homolog of NCBI NO: 7486353 NR Description: hypothetical protein F3D13.3 - Arabidopsis
  misc_feature (71)..(145): Homolog of NCBI NO: 7486353 NR Description: hypothetical protein F3D13.3 - Arabidopsis
  misc_feature (171)..(352): Homolog of NCBI NO: 7486353 NR Description: hypothetical protein F3D13.3 - Arabidopsis
  misc_feature (1)..(352): Homolog of NCBI NO: 15234182 NR Description: hypothetical protein
MVMINSALGLANALVKKVLDGGVNHMVIATYRLAISTLFLAPIAFFWERKTRPTLTLNILVQLFFSALVGASLTQYFFLLGLSYTSATLACAFISMTPAITFVMALIFRVEKLNMKSKAGMGMVMGALICIGGALLLTMYKGVPLTKLRKLETHQLINNNHAMKPENWIIGCVLLFAGSSCFGSWMLIQAKVNEKYPCQYSSTVVLSFFGTIQCALLSLIKSRDITAWILTDKLDIVTIVYAGAVAQGICTVGTSWCIRKRGPIFTSIFTPVGLIFATLFDFLILHRQIFLGSVVGSGVVIFGLYIFLLGKVRLMKEECEKKLPCRFNEDDQEEDDDEQYKKGHLMVVPMTP

SEQ ID NO: 25406 - protein, 350 aa, Arabidopsis thaliana
  peptide (1)..(350): Ceres Seq. ID no. 12324871
  misc_feature (1)..(333): Homolog of NCBI NO: 15234179 NR Description: unknown protein
  misc_feature (1)..(309): Homolog of NCBI NO: 18378792 NR Description: expressed protein
  misc_feature (1)..(290): Homolog of NCBI NO: 30678880 NR Description: nodulin MtN21 family protein [Arabidopsis
  misc_feature (1)..(92): Homolog of NCBI NO: 7485384 NR Description: hypothetical protein F11O4.14 - Arabidopsis
  misc_feature (69)..(350): Homolog of NCBI NO: 7485384 NR Description: hypothetical protein F11O4.14 - Arabidopsis
  misc_feature (1)..(350): Homolog of NCBI NO: 15234185 NR Description: unknown protein; protein id: At4g01450.1
  misc_feature (1)..(127): Homolog of NCBI NO: 7486353 NR Description: hypothetical protein F3D13.3 - Arabidopsis
  misc_feature (69)..(143): Homolog of NCBI NO: 7486353 NR Description: hypothetical protein F3D13.3 - Arabidopsis
  misc_feature (169)..(350): Homolog of NCBI NO: 7486353 NR Description: hypothetical protein F3D13.3 - Arabidopsis
  misc_feature (1)..(350): Homolog of NCBI NO: 15234182 NR Description: hypothetical protein
MINSALGLANALVKKVLDGGVNHMVIATYRLAISTLFLAPIAFFWERKTRPTLTLNILVQLFFSALVGASLTQYFFLLGLSYTSATLACAFISMTPAITFVMALIFRVEKLNMKSKAGMGMVMGALICIGGALLLTMYKGVPLTKLRKLETHQLINNNHAMKPENWIIGCVLLFAGSSCFGSWMLIQAKVNEKYPCQYSSTVVLSFFGTIQCALLSLIKSRDITAWILTDKLDIVTIVYAGAVAQGICTVGTSWCIRKRGPIFTSIFTPVGLIFATLFDFLILHRQIFLGSVVGSGVVIFGLYIFLLGKVRLMKEECEKKLPCRFNEDDQEEDDDEQYKKGHLMVVPMTP

SEQ ID NO: 25407 - DNA, 1254 bp, Arabidopsis thaliana
  misc_feature (1)..(1254): Ceres Seq. ID no. 12348619
  misc_feature: MA Experiment ID: 108434 Result: Down-regulated in Transcription
  misc_feature: MA Experiment 108434 PARAMETER Experiment Name: At_Root_Tips_cDNA_P Parameter: Tissue Value: Root Tips
  misc_feature: MA Experiment ID: 108435 Result: Down-regulated in Transcription
  misc_feature: MA Experiment 108435 PARAMETER Experiment Name: At_stm_Mutants_cDNA_P Parameter: Plant Line Value: wt Landsburg vs stm
  misc_feature: MA Experiment 108435 PARAMETER Experiment Name: At_stm_Mutants_cDNA_P Parameter: Tissue Value: Shoot Apical Meristem Region
  misc_feature: MA Experiment ID: 108461 Result: Up-regulated in Transcription
  misc_feature: MA Experiment 108461 PARAMETER Experiment Name: At_Germinating_Seeds_cDNA_P Parameter: Age (day) Value: 1 vs. 0
  misc_feature: MA Experiment 108461 PARAMETER Experiment Name: At_Germinating_Seeds_cDNA_P Parameter: Tissue Value: Germinating Seeds
  misc_feature: MA Experiment ID: 108462 Result: Up-regulated in Transcription
  misc_feature: MA Experiment 108462 PARAMETER Experiment Name: At_Germinating_Seeds_cDNA_P Parameter: Age (day) Value: 2 vs. 0
  misc_feature: MA Experiment 108462 PARAMETER Experiment Name: At_Germinating_Seeds_cDNA_P Parameter: Tissue Value: Germinating Seeds
  misc_feature: MA Experiment ID: 108463 Result: Up-regulated in Transcription
  misc_feature: MA Experiment 108463 PARAMETER Experiment Name: At_Germinating_Seeds_cDNA_P Parameter: Age (day) Value: 3 vs. 0
  misc_feature: MA Experiment 108463 PARAMETER Experiment Name: At_Germinating_Seeds_cDNA_P Parameter: Tissue Value: Germinating Seeds
  misc_feature: MA Experiment ID: 108464 Result: Up-regulated in Transcription
  misc_feature: MA Experiment 108464 PARAMETER Experiment Name: At_Germinating_Seeds_cDNA_P Parameter: Age (day) Value: 4 vs. 0
  misc_feature: MA Experiment 108464 PARAMETER Experiment Name: At_Germinating_Seeds_cDNA_P Parameter: Tissue Value: Germinating Seeds
  misc_feature: MA Experiment ID: 108469 Result: Down-regulated in Transcription
  misc_feature: MA Experiment ID: 108501 Result: Down-regulated in Transcription
  misc_feature: MA Experiment 108501 PARAMETER Experiment Name: At_ap2_floral_buds_cDNA_P Parameter: Plant Line Value: ap2 (Ler.)
  misc_feature: MA Experiment 108501 PARAMETER Experiment Name: At_ap2_floral_buds_cDNA_P Parameter: Tissue Value: Closed Flower
  misc_feature: MA Experiment ID: 108561 Result: Down-regulated in Transcription
  misc_feature: MA Experiment 108561 PARAMETER Experiment Name: At_100uM_ABA_cDNA_P Parameter: Timepoint (hr) Value: 6
  misc_feature: MA Experiment 108561 PARAMETER Experiment Name: At_100uM_ABA_cDNA_P Parameter: Tissue Value: Aerial
  misc_feature: MA Experiment 108561 PARAMETER Experiment Name: At_100uM_ABA_cDNA_P Parameter: Treatment Value: 100uM ABA vs. No Treatment
  misc_feature: MA Experiment ID: 108573 Result: Down-regulated in Transcription
  misc_feature: MA Experiment 108573 PARAMETER Experiment Name: At_Drought_cDNA_P Parameter: Timepoint (hr) Value: 6
  misc_feature: MA Experiment 108573 PARAMETER Experiment Name: At_Drought_cDNA_P Parameter: Tissue Value: Aerial
  misc_feature: MA Experiment 108573 PARAMETER Experiment Name: At_Drought_cDNA_P Parameter: Treatment Value: Drought vs. No Drought
  misc_feature: MA Experiment ID: 108574 Result: Up-regulated in Transcription
  misc_feature: MA Experiment 108574 PARAMETER Experiment Name: At_Wounding__cDNA_P Parameter: Timepoint (hr) Value: 1
  misc_feature: MA Experiment 108574 PARAMETER Experiment Name: At_Wounding__cDNA_P Parameter: Tissue Value: Aerial
  misc_feature: MA Experiment 108574 PARAMETER Experiment Name: At_Wounding__cDNA_P Parameter: Treatment Value: Wounding vs. No Wounding
  misc_feature: MA Experiment ID: 108576 Result: Down-regulated in Transcription
  misc_feature: MA Experiment 108576 PARAMETER Experiment Name: At_42deg_Heat_cDNA_P Parameter: Temperature (deg C) Value: 42 vs. 22
  misc_feature: MA Experiment 108576 PARAMETER Experiment Name: At_42deg_Heat_cDNA_P Parameter: Timepoint (hr) Value: 1
  misc_feature: MA Experiment 108576 PARAMETER Experiment Name: At_42deg_Heat_cDNA_P Parameter: Tissue Value: Aerial
  misc_feature: MA Experiment ID: 108577 Result: Down-regulated in Transcription
  misc_feature: MA Experiment 108577 PARAMETER Experiment Name: At_42deg_Heat_cDNA_P Parameter: Temperature (deg C) Value: 42 vs. 22
  misc_feature: MA Experiment 108577 PARAMETER Experiment Name: At_42deg_Heat_cDNA_P Parameter: Timepoint (hr) Value: 6
  misc_feature: MA Experiment 108577 PARAMETER Experiment Name: At_42deg_Heat_cDNA_P Parameter: Tissue Value: Aerial
  misc_feature: MA Experiment ID: 108595 Result: Down-regulated in Transcription
  misc_feature: MA Experiment 108595 PARAMETER Experiment Name: At_Ler-pi_Ovule_cDNA_P Parameter: Plant Line Value: null
  misc_feature: MA Experiment ID: 108605 Result: Down-regulated in Transcription
  misc_feature: MA Experiment 108605 PARAMETER Experiment Name: At_100uM_ABA_cDNA_P Parameter: Timepoint (hr) Value: 6
  misc_feature: MA Experiment 108605 PARAMETER Experiment Name: At_100uM_ABA_cDNA_P Parameter: Tissue Value: Aerial
  misc_feature: MA Experiment 108605 PARAMETER Experiment Name: At_100uM_ABA_cDNA_P Parameter: Treatment Value: 100uM ABA vs. No Treatment
  misc_feature: MA Experiment ID: 108607 Result: Down-regulated in Transcription
  misc_feature: MA Experiment 108607 PARAMETER Experiment Name: At_100uM_ABA_cDNA_P Parameter: Timepoint (hr) Value: 4
  misc_feature: MA Experiment 108607 PARAMETER Experiment Name: At_100uM_ABA_cDNA_P Parameter: Tissue Value: Aerial
  misc_feature: MA Experiment 108607 PARAMETER Experiment Name: At_100uM_ABA_cDNA_P Parameter: Treatment Value: 100uM ABA vs. No Treatment
  misc_feature: MA Experiment ID: 108608 Result: Down-regulated in Transcription
  misc_feature: MA Experiment 108608 PARAMETER Experiment Name: At_100uM_ABA_cDNA_P Parameter: Timepoint (hr) Value: 1
  misc_feature: MA Experiment 108608 PARAMETER Experiment Name: At_100uM_ABA_cDNA_P Parameter: Tissue Value: Aerial
  misc_feature: MA Experiment 108608 PARAMETER Experiment Name: At_100uM_ABA_cDNA_P Parameter: Treatment Value: 100uM ABA vs. No Treatment
  misc_feature: MA Experiment ID: 108668 Result: Down-regulated in Transcription
  misc_feature: MA Experiment 108668 PARAMETER Experiment Name: At_2mM_SA_cDNA_P Parameter: Plant Line Value: WS
  misc_feature: MA Experiment 108668 PARAMETER Experiment Name: At_2mM_SA_cDNA_P Parameter: Timepoint (hr) Value: 6
  misc_feature: MA Experiment 108668 PARAMETER Experiment Name: At_2mM_SA_cDNA_P Parameter: Treatment Value: 2mM SA vs. No Treatment
  misc_feature: MA Experiment ID: 20000090 Result: Down-regulated in Transcription
  misc_feature: MA Experiment ID: 20000112 Result: Down-regulated in Transcription
  misc_feature: MA Experiment 20000112 PARAMETER Experiment Name: At_42deg_Heat_cDNA_P Parameter: Temperature (deg C) Value: 42 vs. 22
  misc_feature: MA Experiment 20000112 PARAMETER Experiment Name: At_42deg_Heat_cDNA_P Parameter: Timepoint (hr) Value: 2
  misc_feature: MA Experiment 20000112 PARAMETER Experiment Name: At_42deg_Heat_cDNA_P Parameter: Tissue Value: Aerial
  misc_feature: MA Experiment ID: 20000113 Result: Down-regulated in Transcription
  misc_feature: MA Experiment 20000113 PARAMETER Experiment Name: At_42deg_Heat_cDNA_P Parameter: Temperature (deg C) Value: 42 vs. 22
  misc_feature: MA Experiment 20000113 PARAMETER Experiment Name: At_42deg_Heat_cDNA_P Parameter: Timepoint (hr) Value: 8
  misc_feature: MA Experiment 20000113 PARAMETER Experiment Name: At_42deg_Heat_cDNA_P Parameter: Tissue Value: Aerial
  misc_feature: MA Experiment ID: 20000166 Result: Down-regulated in Transcription
  misc_feature: MA Experiment 20000166 PARAMETER Experiment Name: At_100uM_ABA_P Parameter: Age (day) Value: 14
  misc_feature: MA Experiment 20000166 PARAMETER Experiment Name: At_100uM_ABA_P Parameter: Organism Value: A. thaliana
  misc_feature: MA Experiment 20000166 PARAMETER Experiment Name: At_100uM_ABA_P Parameter: Plant Line Value: WS
  misc_feature: MA Experiment 20000166 PARAMETER Experiment Name: At_100uM_ABA_P Parameter: Timepoint (hr) Value: 1
  misc_feature: MA Experiment 20000166 PARAMETER Experiment Name: At_100uM_ABA_P Parameter: Tissue Value: Aerial
  misc_feature: MA Experiment 20000166 PARAMETER Experiment Name: At_100uM_ABA_P Parameter: Treatment Value: 100uM ABA vs. No Treatment
  misc_feature: MA Experiment ID: 20000171 Result: Down-regulated in Transcription
  misc_feature: MA Experiment 20000171 PARAMETER Experiment Name: At_42deg_Heat_P Parameter: Age (day) Value: 14
  misc_feature: MA Experiment 20000171 PARAMETER Experiment Name: At_42deg_Heat_P Parameter: Organism Value: A. thaliana
  misc_feature: MA Experiment 20000171 PARAMETER Experiment Name: At_42deg_Heat_P Parameter: Plant Line Value: WS
  misc_feature: MA Experiment 20000171 PARAMETER Experiment Name: At_42deg_Heat_P Parameter: Temperature (deg C) Value: 42 vs. 22
  misc_feature: MA Experiment 20000171 PARAMETER Experiment Name: At_42deg_Heat_P Parameter: Timepoint (hr) Value: 1
  misc_feature: MA Experiment 20000171 PARAMETER Experiment Name: At_42deg_Heat_P Parameter: Tissue Value: Aerial
  misc_feature: MA Experiment ID: 20000173 Result: Down-regulated in Transcription
  misc_feature: MA Experiment 20000173 PARAMETER Experiment Name: At_42deg_Heat_P Parameter: Age (day) Value: 14
  misc_feature: MA Experiment 20000173 PARAMETER Experiment Name: At_42deg_Heat_P Parameter: Organism Value: A. thaliana
  misc_feature: MA Experiment 20000173 PARAMETER Experiment Name: At_42deg_Heat_P Parameter: Plant Line Value: WS
  misc_feature: MA Experiment 20000173 PARAMETER Experiment Name: At_42deg_Heat_P Parameter: Temperature (deg C) Value: 42 vs. 22
  misc_feature: MA Experiment 20000173 PARAMETER Experiment Name: At_42deg_Heat_P Parameter: Timepoint (hr) Value: 6
  misc_feature: MA Experiment 20000173 PARAMETER Experiment Name: At_42deg_Heat_P Parameter: Tissue Value: Aerial
  misc_feature: MA Experiment ID: 20000180 Result: Up-regulated in Transcription
  misc_feature: MA Experiment 20000180 PARAMETER Experiment Name: At_Germinating_Seeds_P Parameter: Age (hr) Value: 24 vs. 0
  misc_feature: MA Experiment 20000180 PARAMETER Experiment Name: At_Germinating_Seeds_P Parameter: Tissue Value: Germinating Seeds
  misc_feature: MA Experiment ID: 20000182 Result: Down-regulated in Transcription
  misc_feature: MA Experiment 20000182 PARAMETER Experiment Name: At_2mM_SA_P Parameter: Age (day) Value: 14
  misc_feature: MA Experiment 20000182 PARAMETER Experiment Name: At_2mM_SA_P Parameter: Organism Value: A. thaliana
  misc_feature: MA Experiment 20000182 PARAMETER Experiment Name: At_2mM_SA_P Parameter: Plant Line Value: WS
  misc_feature: MA Experiment 20000182 PARAMETER Experiment Name: At_2mM_SA_P Parameter: Timepoint (hr) Value: 6
  misc_feature: MA Experiment 20000182 PARAMETER Experiment Name: At_2mM_SA_P Parameter: Tissue Value: Aerial
  misc_feature: MA Experiment 20000182 PARAMETER Experiment Name: At_2mM_SA_P Parameter: Treatment Value: 2mM SA vs. No Treatment
  misc_feature: MA Experiment ID: 20000185 Result: Down-regulated in Transcription
  misc_feature: MA Experiment 20000185 PARAMETER Experiment Name: At_Roots__P Parameter: Age (day) Value: 7 vs. 21
  misc_feature: MA Experiment 20000185 PARAMETER Experiment Name: At_Roots__P Parameter: Organism Value: A. thaliana
  misc_feature: MA Experiment 20000185 PARAMETER Experiment Name: At_Roots__P Parameter: Tissue Value: Roots vs. Whole Plant
  misc_feature: MA Experiment ID: 20000211 Result: Up-regulated in Transcription
  misc_feature: MA Experiment 20000211 PARAMETER Experiment Name: At_0.001percent_MeJA__P Parameter: Age (day) Value: 14
  misc_feature: MA Experiment 20000211 PARAMETER Experiment Name: At_0.001percent_MeJA__P Parameter: Organism Value: A. thaliana
  misc_feature: MA Experiment 20000211 PARAMETER Experiment Name: At_0.001percent_MeJA__P Parameter: Plant Line Value: WS
  misc_feature: MA Experiment 20000211 PARAMETER Experiment Name: At_0.001percent_MeJA__P Parameter: Timepoint (hr) Value: 1
  misc_feature: MA Experiment 20000211 PARAMETER Experiment Name: At_0.001percent_MeJA__P Parameter: Tissue Value: Aerial
  misc_feature: MA Experiment 20000211 PARAMETER Experiment Name: At_0.001percent_MeJA__P Parameter: Treatment Value: 0.001percent MeJA vs. No Treatment
  misc_feature: MA Experiment ID: 20000224 Result: Up-regulated in Transcription
  misc_feature: MA Experiment ID: 20000227 Result: Down-regulated in Transcription
  misc_feature: MA Experiment 20000227 PARAMETER Experiment Name: At_Root-Tips-vs-Tops_P Parameter: Tissue Value: Root Tips vs. Root Tops
  misc_feature: MA Experiment ID: 20000436 Result: Down-regulated in Transcription
  misc_feature: MA Experiment 20000436 PARAMETER Experiment Name: At_Drought_P Parameter: Age (day) Value: 7
  misc_feature: MA Experiment 20000436 PARAMETER Experiment Name: At_Drought_P Parameter: Organism Value: A. thaliana
  misc_feature: MA Experiment 20000436 PARAMETER Experiment Name: At_Drought_P Parameter: Plant Line Value: WS
  misc_feature: MA Experiment 20000436 PARAMETER Experiment Name: At_Drought_P Parameter: Timepoint (hr) Value: 12
  misc_feature: MA Experiment 20000436 PARAMETER Experiment Name: At_Drought_P Parameter: Tissue Value: Whole Plant
  misc_feature: MA Experiment 20000436 PARAMETER Experiment Name: At_Drought_P Parameter: Treatment Value: Drought vs. No Drought
  misc_feature: MA Experiment ID: 20000437 Result: Down-regulated in Transcription
  misc_feature: MA Experiment 20000437 PARAMETER Experiment Name: At_Drought_P Parameter: Age (day) Value: 8
  misc_feature: MA Experiment 20000437 PARAMETER Experiment Name: At_Drought_P Parameter: Organism Value: A. thaliana
  misc_feature: MA Experiment 20000437 PARAMETER Experiment Name: At_Drought_P Parameter: Plant Line Value: WS
  misc_feature: MA Experiment 20000437 PARAMETER Experiment Name: At_Drought_P Parameter: Timepoint (hr) Value: 24
  misc_feature: MA Experiment 20000437 PARAMETER Experiment Name: At_Drought_P Parameter: Tissue Value: Whole Plant
  misc_feature: MA Experiment 20000437 PARAMETER Experiment Name: At_Drought_P Parameter: Treatment Value: Drought vs. No Drought
  misc_feature: MA Experiment ID: 20000438 Result: Up-regulated in Transcription
  misc_feature: MA Experiment 20000438 PARAMETER Experiment Name: At_Shoots__P Parameter: Age (day) Value: 14
  misc_feature: MA Experiment 20000438 PARAMETER Experiment Name: At_Shoots__P Parameter: Tissue Value: Shoots vs. Whole Plant
  misc_feature: MA Experiment ID: 20000439 Result: Down-regulated in Transcription
  misc_feature: MA Experiment 20000439 PARAMETER Experiment Name: At_Roots__P Parameter: Age (day) Value: 14 vs. 21
  misc_feature: MA Experiment 20000439 PARAMETER Experiment Name: At_Roots__P Parameter: Organism Value: A. thaliana
  misc_feature: MA Experiment 20000439 PARAMETER Experiment Name: At_Roots__P Parameter: Tissue Value: Roots vs. Whole Plant
  misc_feature: MA Experiment ID: 20000451 Result: Down-regulated in Transcription
  misc_feature: MA Experiment 20000451 PARAMETER Experiment Name: At_CS6879_Shoots-Roots_P Parameter: Age (day) Value: 14
  misc_feature: MA Experiment 20000451 PARAMETER Experiment Name: At_CS6879_Shoots-Roots_P Parameter: Organism Value: A. thaliana
  misc_feature: MA Experiment 20000451 PARAMETER Experiment Name: At_CS6879_Shoots-Roots_P Parameter: Plant Line Value: CS6879 vs. WS
  misc_feature: MA Experiment 20000451 PARAMETER Experiment Name: At_CS6879_Shoots-Roots_P Parameter: Tissue Value: Roots
  misc_feature: MA Experiment ID: 20001247 Result: Down-regulated in Transcription
  misc_feature: MA Experiment 20001247 PARAMETER Experiment Name: At_Far-red-induction_P Parameter: Age (day) Value: 7
  misc_feature: MA Experiment 20001247 PARAMETER Experiment Name: At_Far-red-induction_P Parameter: Light Value: Far-red vs. White
  misc_feature: MA Experiment 20001247 PARAMETER Experiment Name: At_Far-red-induction_P Parameter: Organism Value: A. thaliana
  misc_feature: MA Experiment 20001247 PARAMETER Experiment Name: At_Far-red-induction_P Parameter: Plant Line Value: Columbia
  misc_feature: MA Experiment 20001247 PARAMETER Experiment Name: At_Far-red-induction_P Parameter: Timepoint (hr) Value: 1
  misc_feature: MA Experiment 20001247 PARAMETER Experiment Name: At_Far-red-induction_P Parameter: Tissue Value: Whole Plant
  misc_feature: MA Experiment ID: 20001248 Result: Down-regulated in Transcription
  misc_feature: MA Experiment 20001248 PARAMETER Experiment Name: At_Far-red-induction_P Parameter: Age (day) Value: 7
  misc_feature: MA Experiment 20001248 PARAMETER Experiment Name: At_Far-red-induction_P Parameter: Light Value: Far-red vs. White
  misc_feature: MA Experiment 20001248 PARAMETER Experiment Name: At_Far-red-induction_P Parameter: Organism Value: A. thaliana
  misc_feature: MA Experiment 20001248 PARAMETER Experiment Name: At_Far-red-induction_P Parameter: Plant Line Value: Columbia
  misc_feature: MA Experiment 20001248 PARAMETER Experiment Name: At_Far-red-induction_P Parameter: Timepoint (hr) Value: 4
  misc_feature: MA Experiment 20001248 PARAMETER Experiment Name: At_Far-red-induction_P Parameter: Tissue Value: Whole Plant
  misc_feature: MA Experiment ID: 20001450 Result: Down-regulated in Transcription
  misc_feature: MA Experiment 20001450 PARAMETER Experiment Name: At_Far-red-induction_P Parameter: Age (day) Value: 7
  misc_feature: MA Experiment 20001450 PARAMETER Experiment Name: At_Far-red-induction_P Parameter: Light Value: Far-red vs. White
  misc_feature: MA Experiment 20001450 PARAMETER Experiment Name: At_Far-red-induction_P Parameter: Organism Value: A. thaliana
  misc_feature: MA Experiment 20001450 PARAMETER Experiment Name: At_Far-red-induction_P Parameter: Plant Line Value: Columbia
  misc_feature: MA Experiment 20001450 PARAMETER Experiment Name: At_Far-red-induction_P Parameter: Timepoint (hr) Value: 8
  misc_feature: MA Experiment 20001450 PARAMETER Experiment Name: At_Far-red-induction_P Parameter: Tissue Value: Whole Plant
  misc_feature: MA Experiment ID: 20001451 Result: Down-regulated in Transcription
  misc_feature: MA Experiment 20001451 PARAMETER Experiment Name: At_Far-red-induction_P Parameter: Age (day) Value: 7
  misc_feature: MA Experiment 20001451 PARAMETER Experiment Name: At_Far-red-induction_P Parameter: Light Value: Far-red vs. White
  misc_feature: MA Experiment 20001451 PARAMETER Experiment Name: At_Far-red-induction_P Parameter: Organism Value: A. thaliana
  misc_feature: MA Experiment 20001451 PARAMETER Experiment Name: At_Far-red-induction_P Parameter: Plant Line Value: Columbia
  misc_feature: MA Experiment 20001451 PARAMETER Experiment Name: At_Far-red-induction_P Parameter: Timepoint (hr) Value: 24
  misc_feature: MA Experiment 20001451 PARAMETER Experiment Name: At_Far-red-induction_P Parameter: Tissue Value: Whole Plant
  misc_feature: MA Experiment ID: 20001554 Result: Down-regulated in Transcription
  misc_feature: MA Experiment 20001554 PARAMETER Experiment Name: At_Drought_Soil_Dry_P Parameter: Age (day) Value: 21
  misc_feature: MA Experiment 20001554 PARAMETER Experiment Name: At_Drought_Soil_Dry_P Parameter: Organism Value: A. thaliana
  misc_feature: MA Experiment 20001554 PARAMETER Experiment Name: At_Drought_Soil_Dry_P Parameter: Plant Line Value: WS
  misc_feature: MA Experiment 20001554 PARAMETER Experiment Name: At_Drought_Soil_Dry_P Parameter: Post Timepoint (hr) Value: None
  misc_feature: MA Experiment 20001554 PARAMETER Experiment Name: At_Drought_Soil_Dry_P Parameter: Post-Treatment Value: None
  misc_feature: MA Experiment 20001554 PARAMETER Experiment Name: At_Drought_Soil_Dry_P Parameter: Timepoint (day) Value: 7
  misc_feature: MA Experiment 20001554 PARAMETER Experiment Name: At_Drought_Soil_Dry_P Parameter: Treatment Value: Drought vs. No Drought
  misc_feature: MA Experiment ID: 20001555 Result: Down-regulated in Transcription
  misc_feature: MA Experiment 20001555 PARAMETER Experiment Name: At_Drought_Soil_Dry_P Parameter: Age (day) Value: 24
  misc_feature: MA Experiment 20001555 PARAMETER Experiment Name: At_Drought_Soil_Dry_P Parameter: Organism Value: A. thaliana
  misc_feature: MA Experiment 20001555 PARAMETER Experiment Name: At_Drought_Soil_Dry_P Parameter: Plant Line Value: WS
  misc_feature: MA Experiment 20001555 PARAMETER Experiment Name: At_Drought_Soil_Dry_P Parameter: Post Timepoint (hr) Value: None
  misc_feature: MA Experiment 20001555 PARAMETER Experiment Name: At_Drought_Soil_Dry_P Parameter: Post-Treatment Value: None
  misc_feature: MA Experiment 20001555 PARAMETER Experiment Name: At_Drought_Soil_Dry_P Parameter: Timepoint (day) Value: 10
  misc_feature: MA Experiment 20001555 PARAMETER Experiment Name: At_Drought_Soil_Dry_P Parameter: Treatment Value: Drought vs. No Drought
  misc_feature: MA Experiment ID: 20001556 Result: Down-regulated in Transcription
  misc_feature: MA Experiment 20001556 PARAMETER Experiment Name: At_Drought_Soil_Dry_P Parameter: Age (day) Value: 26
  misc_feature: MA Experiment 20001556 PARAMETER Experiment Name: At_Drought_Soil_Dry_P Parameter: Organism Value: A. thaliana
  misc_feature: MA Experiment 20001556 PARAMETER Experiment Name: At_Drought_Soil_Dry_P Parameter: Plant Line Value: WS
  misc_feature: MA Experiment 20001556 PARAMETER Experiment Name: At_Drought_Soil_Dry_P Parameter: Post Timepoint (hr) Value: None
  misc_feature: MA Experiment 20001556 PARAMETER Experiment Name: At_Drought_Soil_Dry_P Parameter: Post-Treatment Value: None
  misc_feature: MA Experiment 20001556 PARAMETER Experiment Name: At_Drought_Soil_Dry_P Parameter: Timepoint (day) Value: 12
  misc_feature: MA Experiment 20001556 PARAMETER Experiment Name: At_Drought_Soil_Dry_P Parameter: Treatment Value: Drought vs. No Drought
  misc_feature: MA Experiment ID: 20001559 Result: Down-regulated in Transcription
  misc_feature: MA Experiment 20001559 PARAMETER Experiment Name: At_Drought_Soil_Dry_P Parameter: Age (day) Value: 28
  misc_feature: MA Experiment 20001559 PARAMETER Experiment Name: At_Drought_Soil_Dry_P Parameter: Organism Value: A. thaliana
  misc_feature: MA Experiment 20001559 PARAMETER Experiment Name: At_Drought_Soil_Dry_P Parameter: Plant Line Value: WS
  misc_feature: MA Experiment 20001559 PARAMETER Experiment Name: At_Drought_Soil_Dry_P Parameter: Post Timepoint (hr) Value: 29
  misc_feature: MA Experiment 20001559 PARAMETER Experiment Name: At_Drought_Soil_Dry_P Parameter: Post-Treatment Value: Re-Water vs. No Drought
  misc_feature: MA Experiment 20001559 PARAMETER Experiment Name: At_Drought_Soil_Dry_P Parameter: Timepoint (day) Value: 14
  misc_feature: MA Experiment 20001559 PARAMETER Experiment Name: At_Drought_Soil_Dry_P Parameter: Treatment Value: Drought vs. No Drought
  misc_feature: MA Experiment ID: 20001904 Result: Down-regulated in Transcription
  misc_feature: MA Experiment 20001904 PARAMETER Experiment Name: At_Drought_Reproduction_P Parameter: Age (day) Value: 37
  misc_feature: MA Experiment 20001904 PARAMETER Experiment Name: At_Drought_Reproduction_P Parameter: Organism Value: A. thaliana
  misc_feature: MA Experiment 20001904 PARAMETER Experiment Name: At_Drought_Reproduction_P Parameter: Plant Line Value: WS
  misc_feature: MA Experiment 20001904 PARAMETER Experiment Name: At_Drought_Reproduction_P Parameter: Timepoint (day) Value: 7
  misc_feature: MA Experiment 20001904 PARAMETER Experiment Name: At_Drought_Reproduction_P Parameter: Tissue Value: Rosettes
  misc_feature: MA Experiment 20001904 PARAMETER Experiment Name: At_Drought_Reproduction_P Parameter: Treatment Value: Drought vs. No Drought
  misc_feature: MA Experiment ID: 20001905 Result: Down-regulated in Transcription
  misc_feature: MA Experiment 20001905 PARAMETER Experiment Name: At_Drought_Reproduction_P Parameter: Age (day) Value: 40
  misc_feature: MA Experiment 20001905 PARAMETER Experiment Name: At_Drought_Reproduction_P Parameter: Organism Value: A. thaliana
  misc_feature: MA Experiment 20001905 PARAMETER Experiment Name: At_Drought_Reproduction_P Parameter: Plant Line Value: WS
  misc_feature: MA Experiment 20001905 PARAMETER Experiment Name: At_Drought_Reproduction_P Parameter: Timepoint (day) Value: 10
  misc_feature: MA Experiment 20001905 PARAMETER Experiment Name: At_Drought_Reproduction_P Parameter: Tissue Value: Rosettes
  misc_feature: MA Experiment 20001905 PARAMETER Experiment Name: At_Drought_Reproduction_P Parameter: Treatment Value: Drought vs. No Drought
  misc_feature: MA Experiment ID: 20001907 Result: Down-regulated in Transcription
  misc_feature: MA Experiment 20001907 PARAMETER Experiment Name: At_Drought_Reproduction_P Parameter: Age (day) Value: 37
  misc_feature: MA Experiment 20001907 PARAMETER Experiment Name: At_Drought_Reproduction_P Parameter: Organism Value: A. thaliana
  misc_feature: MA Experiment 20001907 PARAMETER Experiment Name: At_Drought_Reproduction_P Parameter: Plant Line Value: WS
  misc_feature: MA Experiment 20001907 PARAMETER Experiment Name: At_Drought_Reproduction_P Parameter: Timepoint (day) Value: 7
  misc_feature: MA Experiment 20001907 PARAMETER Experiment Name: At_Drought_Reproduction_P Parameter: Tissue Value: Siliques
  misc_feature: MA Experiment 20001907 PARAMETER Experiment Name: At_Drought_Reproduction_P Parameter: Treatment Value: Drought vs. No Drought
aagtctagagacgagaagcacgtggaaagaagaaactatcaagttggacttggatgatatatatgcagctgtggatttgaatcgtaaaccaaccaaccaatcagatggaccacactctttctcttcttccatttctcttcatcataatcatttcttccttccatgttttgcctgtttcacccacaccttcacacaaactaaaatccgccactaccatcagaaaactcaaccgcggaggaccttacatcggtctcgtgacggtcattgcgaccgaagaaaatgcttttctccgcagtgtcgatttcagacctgaccctactcatcccttcttggatctctctgggagacgttttcgaatagggaagattcatggaaagaaggttgtgtatgttagatgtgggagaggaatggtgaatggagcagcagcaacacaacagatgatagatgtgttcaatgtgaaagggatagtgcattttgggattgctggaaatatgaacaactcaatgtccataggagatgtgagcatccctaagcaaattacgaatgctggcttgtgggattggctgaatccagacaaagtaaagggagttgaggatatagcgtacttagatgtcggaaactataatgttccaaaaggagatggcgacaatgagttagggagtattggatataattacgagcaactatattcagtcactggtcacatcaatgcacctcagaatgtgttttggatcaacacaactcaagagtggcttcatcttgcagctgatctagagaagatggagctatcgcagtgtgtaaatgcaagtttgtgtcttccaaagaaaccaaaattggtagttggattgaaagcagccactgcttacatatttgtggataatgcagcctatagaaatttcttatacgatacttttggagtctcctcctctgatatggagagttctgcagtagccatgacatgcgcatcaaatgggtatccgataattgtgataaggggtttatcagatttagctggagaaggaggagataacactgttcataagtttggatctttggctgccactaacactgccaaagctgttttagagttcattaggaagctcccaccgtactaattcctctagtgtaacctatttatcatgaatgtttgaatctagttctctagttcatatcaacgaacccgtgacaacaaatgatttggattgttatcaaattccattttccatgatcgtaacaatgacaacacttttatcg

SEQ ID NO: 25408 - protein, 336 aa, Arabidopsis thaliana
  peptide (1)..(336): Ceres Seq. ID no. 12348620
  misc_feature (47)..(330): Pfam Name: Phosphorylase family Pfam Description: Phosphorylase family
  misc_feature (48)..(334): Homolog of NCBI NO: 421813 NR Description: storage protein, bark - cottonwood
  misc_feature (100)..(330): Homolog of NCBI NO: 34897886 NR Description: ESTs AU032452(S10068),C23571(S10068) correspond a region of the predicted gene.~Similar to P.trichocarpa x P.
  misc_feature (48)..(334): Homolog of NCBI NO: 481815 NR Description: vegetative storage protein win4.5 - western
  misc_feature (226)..(336): Homolog of NCBI NO: 7487319 NR Description: hypothetical protein T22A6.190 - Arabidopsis
  misc_feature (1)..(224): Homolog of NCBI NO: 7487318 NR Description: hypothetical protein T22A6.180 - Arabidopsis
  misc_feature (1)..(335): Homolog of NCBI NO: 7487317 NR Description: hypothetical protein T22A6.170 - Arabidopsis
  misc_feature (1)..(334): Homolog of NCBI NO: 21617914 NR Description: unknown [Arabidopsis thaliana]
  misc_feature (1)..(335): Homolog of NCBI NO: 18416327 NR Description: putative protein
  misc_feature (1)..(336): Homolog of NCBI NO: 21593613 NR Description: unknown [Arabidopsis thaliana]
  misc_feature (1)..(336): Homolog of NCBI NO: 30686500 NR Description: expressed protein [Arabidopsis thaliana]
MDHTLSLLPFLFIIIISSFHVLPVSPTPSHKLKSATTIRKLNRGGPYIGLVTVIATEENAFLRSVDFRPDPTHPFLDLSGRRFRIGKIHGKKVVYVRCGRGMVNGAAATQQMIDVFNVKGIVHFGIAGNMNNSMSIGDVSIPKQITNAGLWDWLNPDKVKGVEDIAYLDVGNYNVPKGDGDNELGSIGYNYEQLYSVTGHINAPQNVFWINTTQEWLHLAADLEKMELSQCVNASLCLPKKPKLVVGLKAATAYIFVDNAAYRNFLYDTFGVSSSDMESSAVAMTCASNGYPIIVIRGLSDLAGEGGDNTVHKFGSLAATNTAKAVLEFIRKLPPY

SEQ ID NO: 25409 - protein, 235 aa, Arabidopsis thaliana
  peptide (1)..(235): Ceres Seq. ID no. 12348621
  misc_feature (1)..(229): Pfam Name: Phosphorylase family Pfam Description: Phosphorylase family
  misc_feature (1)..(233): Homolog of NCBI NO: 421813 NR Description: storage protein, bark - cottonwood
  misc_feature (1)..(229): Homolog of NCBI NO: 34897886 NR Description: ESTs AU032452(S10068),C23571(S10068) correspond a region of the predicted gene.~Similar to P.trichocarpa x P.
  misc_feature (1)..(233): Homolog of NCBI NO: 481815 NR Description: vegetative storage protein win4.5 - western
  misc_feature (125)..(235): Homolog of NCBI NO: 7487319 NR Description: hypothetical protein T22A6.190 - Arabidopsis
  misc_feature (1)..(123): Homolog of NCBI NO: 7487318 NR Description: hypothetical protein T22A6.180 - Arabidopsis
  misc_feature (1)..(234): Homolog of NCBI NO: 7487317 NR Description: hypothetical protein T22A6.170 - Arabidopsis
  misc_feature (1)..(233): Homolog of NCBI NO: 21617914 NR Description: unknown [Arabidopsis thaliana]
  misc_feature (1)..(234): Homolog of NCBI NO: 18416327 NR Description: putative protein
  misc_feature (1)..(235): Homolog of NCBI NO: 21593613 NR Description: unknown [Arabidopsis thaliana]
  misc_feature (1)..(235): Homolog of NCBI NO: 30686500 NR Description: expressed protein [Arabidopsis thaliana]
MVNGAAATQQMIDVFNVKGIVHFGIAGNMNNSMSIGDVSIPKQITNAGLWDWLNPDKVKGVEDIAYLDVGNYNVPKGDGDNELGSIGYNYEQLYSVTGHINAPQNVFWINTTQEWLHLAADLEKMELSQCVNASLCLPKKPKLVVGLKAATAYIFVDNAAYRNFLYDTFGVSSSDMESSAVAMTCASNGYPIIVIRGLSDLAGEGGDNTVHKFGSLAATNTAKAVLEFIRKLPPY

SEQ ID NO: 25410 - protein, 225 aa, Arabidopsis thaliana
  peptide (1)..(225): Ceres Seq. ID no. 12348622
  misc_feature (1)..(219): Pfam Name: Phosphorylase family Pfam Description: Phosphorylase family
  misc_feature (1)..(223): Homolog of NCBI NO: 421813 NR Description: storage protein, bark - cottonwood
  misc_feature (1)..(219): Homolog of NCBI NO: 34897886 NR Description: ESTs AU032452(S10068),C23571(S10068) correspond a region of the predicted gene.~Similar to P.trichocarpa x P.
  misc_feature (1)..(223): Homolog of NCBI NO: 481815 NR Description: vegetative storage protein win4.5 - western
  misc_feature (115)..(225): Homolog of NCBI NO: 7487319 NR Description: hypothetical protein T22A6.190 - Arabidopsis
  misc_feature (1)..(113): Homolog of NCBI NO: 7487318 NR Description: hypothetical protein T22A6.180 - Arabidopsis
  misc_feature (1)..(224): Homolog of NCBI NO: 7487317 NR Description: hypothetical protein T22A6.170 - Arabidopsis
  misc_feature (1)..(223): Homolog of NCBI NO: 21617914 NR Description: unknown [Arabidopsis thaliana]
  misc_feature (1)..(224): Homolog of NCBI NO: 18416327 NR Description: putative protein
  misc_feature (1)..(225): Homolog of NCBI NO: 21593613 NR Description: unknown [Arabidopsis thaliana]
  misc_feature (1)..(225): Homolog of NCBI NO: 30686500 NR Description: expressed protein [Arabidopsis thaliana]
MIDVFNVKGIVHFGIAGNMNNSMSIGDVSIPKQITNAGLWDWLNPDKVKGVEDIAYLDVGNYNVPKGDGDNELGSIGYNYEQLYSVTGHINAPQNVFWINTTQEWLHLAADLEKMELSQCVNASLCLPKKPKLVVGLKAATAYIFVDNAAYRNFLYDTFGVSSSDMESSAVAMTCASNGYPIIVIRGLSDLAGEGGDNTVHKFGSLAATNTAKAVLEFIRKLPPY

SEQ ID NO: 25411 - DNA, 3261 bp, Arabidopsis thaliana
  misc_feature (1)..(3261): Ceres Seq. ID no. 12562116
  misc_feature: MA Experiment ID: 20000306 Result: Up-regulated in Transcription
  misc_feature: MA Experiment 20000306 PARAMETER Experiment Name: At_Germinating_Seeds_Sub_P Parameter: Age (hr) Value: 6 vs. 0
  misc_feature: MA Experiment 20000306 PARAMETER Experiment Name: At_Germinating_Seeds_Sub_P Parameter: Organism Value: A. thaliana
  misc_feature: MA Experiment 20000306 PARAMETER Experiment Name: At_Germinating_Seeds_Sub_P Parameter: Plant Line Value: WS
  misc_feature: MA Experiment 20000306 PARAMETER Experiment Name: At_Germinating_Seeds_Sub_P Parameter: Tissue Value: Germinating Seeds
  misc_feature: MA Experiment ID: 20000307 Result: Up-regulated in Transcription
  misc_feature: MA Experiment 20000307 PARAMETER Experiment Name: At_Germinating_Seeds_Sub_P Parameter: Age (hr) Value: 24 vs. 0
  misc_feature: MA Experiment 20000307 PARAMETER Experiment Name: At_Germinating_Seeds_Sub_P Parameter: Organism Value: A. thaliana
  misc_feature: MA Experiment 20000307 PARAMETER Experiment Name: At_Germinating_Seeds_Sub_P Parameter: Plant Line Value: WS
  misc_feature: MA Experiment 20000307 PARAMETER Experiment Name: At_Germinating_Seeds_Sub_P Parameter: Tissue Value: Germinating Seeds
  misc_feature: MA Experiment ID: 20000347 Result: Down-regulated in Transcription
  misc_feature: MA Experiment 20000347 PARAMETER Experiment Name: At_2mM_SA_Sub_P Parameter: Age (day) Value: 14
  misc_feature: MA Experiment 20000347 PARAMETER Experiment Name: At_2mM_SA_Sub_P Parameter: Organism Value: A. thaliana
  misc_feature: MA Experiment 20000347 PARAMETER Experiment Name: At_2mM_SA_Sub_P Parameter: Plant Line Value: WS
  misc_feature: MA Experiment 20000347 PARAMETER Experiment Name: At_2mM_SA_Sub_P Parameter: Timepoint (hr) Value: 6
  misc_feature: MA Experiment 20000347 PARAMETER Experiment Name: At_2mM_SA_Sub_P Parameter: Tissue Value: Aerial
  misc_feature: MA Experiment 20000347 PARAMETER Experiment Name: At_2mM_SA_Sub_P Parameter: Treatment Value: 2mM SA vs. No Treatment
  misc_feature: MA Experiment ID: 20000348 Result: Up-regulated in Transcription
  misc_feature: MA Experiment 20000348 PARAMETER Experiment Name: At_100uM_ABA_Sub_P Parameter: Age (day) Value: 14
  misc_feature: MA Experiment 20000348 PARAMETER Experiment Name: At_100uM_ABA_Sub_P Parameter: Organism Value: A. thaliana
  misc_feature: MA Experiment 20000348 PARAMETER Experiment Name: At_100uM_ABA_Sub_P Parameter: Plant Line Value: WS
  misc_feature: MA Experiment 20000348 PARAMETER Experiment Name: At_100uM_ABA_Sub_P Parameter: Timepoint (hr) Value: 1
  misc_feature: MA Experiment 20000348 PARAMETER Experiment Name: At_100uM_ABA_Sub_P Parameter: Tissue Value: Aerial
  misc_feature: MA Experiment 20000348 PARAMETER Experiment Name: At_100uM_ABA_Sub_P Parameter: Treatment Value: 100uM ABA vs. No Treatment
  misc_feature: MA Experiment ID: 20000355 Result: Up-regulated in Transcription
  misc_feature: MA Experiment 20000355 PARAMETER Experiment Name: At_Siliques_Sub_P Parameter: Age (day) Value: 21
  misc_feature: MA Experiment 20000355 PARAMETER Experiment Name: At_Siliques_Sub_P Parameter: Organism Value: A. thaliana
  misc_feature: MA Experiment 20000355 PARAMETER Experiment Name: At_Siliques_Sub_P Parameter: Plant Line Value: WS
  misc_feature: MA Experiment 20000355 PARAMETER Experiment Name: At_Siliques_Sub_P Parameter: Tissue Value: Less Than 5mm Siliques vs. Whole Plant
  misc_feature: MA Experiment ID: 20000440 Result: Up-regulated in Transcription
  misc_feature: MA Experiment 20000440 PARAMETER Experiment Name: At_Closed-Flower__Sub_P Parameter: Tissue Value: Closed Flower vs. Whole Plant
  misc_feature: MA Experiment ID: 20001807 Result: Up-regulated in Transcription
  misc_feature: MA Experiment 20001807 PARAMETER Experiment Name: At_50mM_NH4NO3_L-to-H_Sub_P Parameter: Timepoint (hr) Value: 6
  misc_feature: MA Experiment 20001807 PARAMETER Experiment Name: At_50mM_NH4NO3_L-to-H_Sub_P Parameter: Tissue Value: Leaf
  misc_feature: MA Experiment 20001807 PARAMETER Experiment Name: At_50mM_NH4NO3_L-to-H_Sub_P Parameter: Treatment Value: 50mM NH4NO3 vs 100mM Mannitol
tgtgttagcttcccatactgccactaacctttagcggttttctcatcttctctactcttctttctcttttctgagaaacccaaaagacaaaaacgaagaagaagattaggaaatcatcttgagaaacaggaggtagcaggagaatatgggggacaaggaagaagtccttgaggctgttttgaaagaaactgtggatctggagaatgtacctattgaagaagtttttgagagtctgagatgtagcagagaaggtctcactacagaagctgctgatgaaaggctggctctttttgggcataacaagctcgaagagaagaaggaaagcaaattcctgaaatttcttggtttcatgtggaaccctctttcttgggttatggaagctgctgctatcatggctattgctcttgctaatggaggagggaagccacctgattggcaagactttgttggtattattactctgcttgtgattaactccactatcagtttcatagaggagaacaatgccgggaatgctgctgctgcactcatggcacgtcttgccccaaaagcaaaggttcttcgagatggaagatggggtgagcaggatgctgcaattcttgttccgggtgatataatcagcataaagctcggggatattgttccagctgatgctcgccttctcgagggtgatccccttaaaatcgatcagtcttctcttaccggtgaatctctcccagtaaccaaaggtccaggggatggtgtgtattctggctccacttgcaaacagggagagcttgaagcagttgtgattgcaacgggagtccataccttctttggaaaggccgcacatcttgtcgatacgaccaaccacgttggccattttcaacaggtgttaactgccattgggaacttttgcatctgctctatcgcagtggggatgataattgagattgtcgttatgtatcccattcaacaccgtgcatatcgtcctggaattgataaccttcttgtgcttctcattggcggtatcccaattgccatgcctacagttctctctgtgaccatggccattggctcgcataggttatctcagcagggagcaataaccaagaggatgacagcgattgaggaaatggctggcatggatgtgctttgcagcgacaagaccggaactttaacattgaataaacttactgttgacaaaaatcttatcgaggttttcacgaaaggagtggatgcggatacagtagttctaatggcagctcaagcctctagactggaaaaccaagatgccattgatgctgctatagttgggatgcttgctgaccctaaagaggcacgggctggtgttcgagaggttcactttcttccattcaatcccactgacaagaggacggctcttacatatattgacagtgatggtaaaatgcatagggtcagcaaaggtgcacctgagcaaatcctaaatcttgcacacaatagagcagagattgagcggagagtacatgctgtaatagacaagttcgctgaacggggtttgcgatctcttgccgtggcataccaggaagttccggaagggacgaaagaaagtgctggaggcccttggcaatttatgggtctcatgcctctttttgacccacctaggcatgacagtgccgagacaattagaagggctttaaatcttggggtgaatgttaaaatgatcacaggggatcagttggctataggaaaagagactggccgccgtttaggaatgggaaccaacatgtacccctcatctgctttgcttggacagcacaaggatgagtctattggtgccttacccatcgatgatcttatagaaaaggccgacggctttgctggcgtttttcctgagcataaatatgagatagttaagcgactacaagcgaggaagcatatctgtggaatgacaggtgatggagtaaatgatgcgcctgctcttaaaaaggctgatattggcattgcagttgctgatgcaactgatgcagcacgtagtgcttcagatatcgttcttactgaacctggtcttagtgttatcatcagcgctgtcttaaccagccgtgctatcttccagagaatgaaaaattatacaatctatgcggtttccatcactatccgtattgttcttggcttcatgctgctagctcttatatggaagtttgactttccacccttcatggttcttatcattgccattctgaatgatggcacaattatgacaatatcaaaagacagagtgaaaccttcccctcttccagatagctggaaactctcagagatttttgcaactggcgttgtgtttgggagctacatggcgatgatgacagttatatttttctgggctgcatataaaaccgacttcttcccgcgaacatttggagtttcaaccctggagaaaacagcacatgatgatttccggaagcttgcctcggcaatatacctgcaagtcagcatcataagtcaggcgcttatctttgtgacccgatcacggagttggtcttatgtagaacgtcctgggatgttgcttgtggtagcctttatccttgcacaattggtggctactctaattgcagtctatgcgaattggagctttgctgcaatagaagggatcgggtggggatgggccggggtcatctggctttacaatatcgtattctatattcctcttgatatcatcaagttcttgattcgttatgcccttagcggaagagcctgggatcttgttatcgaacaaagggttgcattcacgaggcagaaggatttcgggaaagaacaaagggagctacaatgggcacatgcacagagaaccctgcacggtctgcaagcaccagatgctaagatgttcccggagcgaacccatttcaacgagctttcccaaatggccgaagaagctaagagaagagccgagatcgccaggttgcgggagcttcacacacttaagggtcatgttgaatctgttgtcagactaaaaggtctcgacattgaaaccattcaacaagcttacaccgtctgagagaagcatagagagagcccaagaaccgtctcaaactcattcaaaaaggtcaatattcctgtgtgaaacatcgatacaaattatgcatgtaagtatcagtttcttagtagagtctttttggttgggttttatttgttcttccgagttttaagatatgttctgttattatgatgaagtatgacagaaaatagaaacagagtcctcacaatgaaagacaaattttattctgaaatacatctgatgtt

SEQ ID NO: 25412 - protein, 956 aa, Arabidopsis thaliana
  peptide (1)..(956): Ceres Seq. ID no. 12562117
  misc_feature (327)..(613): Pfam Name: haloacid dehalogenase-like hydrolase Pfam Description: haloacid dehalogenase-like hydrolase
  misc_feature (765)..(812): Homolog of NCBI NO: 1709665 NR Description: Plasma membrane ATPase (Proton pump)
  misc_feature (1)..(755): Homolog of NCBI NO: 1709665 NR Description: Plasma membrane ATPase (Proton pump)
  misc_feature (763)..(817): Homolog of NCBI NO: 1709666 NR Description: Plasma membrane ATPase (Proton pump)
  misc_feature (14)..(741): Homolog of NCBI NO: 1709666 NR Description: Plasma membrane ATPase (Proton pump)
  misc_feature (761)..(812): Homolog of NCBI NO: 16751320 NR Description: putative plasma membrane-type proton ATPase
  misc_feature (1)..(751): Homolog of NCBI NO: 16751320 NR Description: putative plasma membrane-type proton ATPase
  misc_feature (1)..(856): Homolog of NCBI NO: 1709664 NR Description: Probable plasma membrane ATPase (Proton pump)
  misc_feature (13)..(850): Homolog of NCBI NO: 2652922 NR Description: plasma membrane (H+) ATPase [Uromyces fabae]
  misc_feature (13)..(850): Homolog of NCBI NO: 3348073 NR Description: plasma membrane H(+)-ATPase 1 [Filobasidiella
  misc_feature (13)..(850): Homolog of NCBI NO: 6691153 NR Description: plasma membrane H(+)-ATPase [Filobasidiella
MGDKEEVLEAVLKETVDLENVPIEEVFESLRCSREGLTTEAADERLALFGHNKLEEKKESKFLKFLGFMWNPLSWVMEAAAIMAIALANGGGKPPDWQDFVGIITLLVINSTISFIEENNAGNAAAALMARLAPKAKVLRDGRWGEQDAAILVPGDIISIKLGDIVPADARLLEGDPLKIDQSSLTGESLPVTKGPGDGVYSGSTCKQGELEAVVIATGVHTFFGKAAHLVDTTNHVGHFQQVLTAIGNFCICSIAVGMIIEIVVMYPIQHRAYRPGIDNLLVLLIGGIPIAMPTVLSVTMAIGSHRLSQQGAITKRMTAIEEMAGMDVLCSDKTGTLTLNKLTVDKNLIEVFTKGVDADTVVLMAAQASRLENQDAIDAAIVGMLADPKEARAGVREVHFLPFNPTDKRTALTYIDSDGKMHRVSKGAPEQILNLAHNRAEIERRVHAVIDKFAERGLRSLAVAYQEVPEGTKESAGGPWQFMGLMPLFDPPRHDSAETIRRALNLGVNVKMITGDQLAIGKETGRRLGMGTNMYPSSALLGQHKDESIGALPIDDLIEKADGFAGVFPEHKYEIVKRLQARKHICGMTGDGVNDAPALKKADIGIAVADATDAARSASDIVLTEPGLSVIISAVLTSRAIFQRMKNYTIYAVSITIRIVLGFMLLALIWKFDFPPFMVLIIAILNDGTIMTISKDRVKPSPLPDSWKLSEIFATGVVFGSYMAMMTVIFFWAAYKTDFFPRTFGVSTLEKTAHDDFRKLASAIYLQVSIISQALIFVTRSRSWSYVERPGMLLVVAFILAQLVATLIAVYANWSFAAIEGIGWGWAGVIWLYNIVFYIPLDIIKFLIRYALSGRAWDLVIEQRVAFTRQKDFGKEQRELQWAHAQRTLHGLQAPDAKMFPERTHFNELSQMAEEAKRRAEIARLRELHTLKGHVESVVRLKGLDIETIQQAYTV

SEQ ID NO: 25413 - protein, 888 aa, Arabidopsis thaliana
  peptide (1)..(888): Ceres Seq. ID no. 12562118
  misc_feature (259)..(545): Pfam Name: haloacid dehalogenase-like hydrolase Pfam Description: haloacid dehalogenase-like hydrolase
  misc_feature (697)..(744): Homolog of NCBI NO: 1709665 NR Description: Plasma membrane ATPase (Proton pump)
  misc_feature (1)..(687): Homolog of NCBI NO: 1709665 NR Description: Plasma membrane ATPase (Proton pump)
  misc_feature (695)..(749): Homolog of NCBI NO: 1709666 NR Description: Plasma membrane ATPase (Proton pump)
  misc_feature (1)..(673): Homolog of NCBI NO: 1709666 NR Description: Plasma membrane ATPase (Proton pump)
  misc_feature (693)..(744): Homolog of NCBI NO: 16751320 NR Description: putative plasma membrane-type proton ATPase
  misc_feature (1)..(683): Homolog of NCBI NO: 16751320 NR Description: putative plasma membrane-type proton ATPase
  misc_feature (1)..(788): Homolog of NCBI NO: 1709664 NR Description: Probable plasma membrane ATPase (Proton pump)
  misc_feature (1)..(782): Homolog of NCBI NO: 2652922 NR Description: plasma membrane (H+) ATPase [Uromyces fabae]
  misc_feature (1)..(782): Homolog of NCBI NO: 3348073 NR Description: plasma membrane H(+)-ATPase 1 [Filobasidiella
  misc_feature (1)..(782): Homolog of NCBI NO: 6691153 NR Description: plasma membrane H(+)-ATPase [Filobasidiella
MWNPLSWVMEAAAIMAIALANGGGKPPDWQDFVGIITLLVINSTISFIEENNAGNAAAALMARLAPKAKVLRDGRWGEQDAAILVPGDIISIKLGDIVPADARLLEGDPLKIDQSSLTGESLPVTKGPGDGVYSGSTCKQGELEAVVIATGVHTFFGKAAHLVDTTNHVGHFQQVLTAIGNFCICSIAVGMIIEIVVMYPIQHRAYRPGIDNLLVLLIGGIPIAMPTVLSVTMAIGSHRLSQQGAITKRMTAIEEMAGMDVLCSDKTGTLTLNKLTVDKNLIEVFTKGVDADTVVLMAAQASRLENQDAIDAAIVGMLADPKEARAGVREVHFLPFNPTDKRTALTYIDSDGKMHRVSKGAPEQILNLAHNRAEIERRVHAVIDKFAERGLRSLAVAYQEVPEGTKESAGGPWQFMGLMPLFDPPRHDSAETIRRALNLGVNVKMITGDQLAIGKETGRRLGMGTNMYPSSALLGQHKDESIGALPIDDLIEKADGFAGVFPEHKYEIVKRLQARKHICGMTGDGVNDAPALKKADIGIAVADATDAARSASDIVLTEPGLSVIISAVLTSRAIFQRMKNYTIYAVSITIRIVLGFMLLALIWKFDFPPFMVLIIAILNDGTIMTISKDRVKPSPLPDSWKLSEIFATGVVFGSYMAMMTVIFFWAAYKTDFFPRTFGVSTLEKTAHDDFRKLASAIYLQVSIISQALIFVTRSRSWSYVERPGMLLVVAFILAQLVATLIAVYANWSFAAIEGIGWGWAGVIWLYNIVFYIPLDIIKFLIRYALSGRAWDLVIEQRVAFTRQKDFGKEQRELQWAHAQRTLHGLQAPDAKMFPERTHFNELSQMAEEAKRRAEIARLRELHTLKGHVESVVRLKGLDIETIQQAYTV

SEQ ID NO: 25414 - protein, 880 aa, Arabidopsis thaliana
  peptide (1)..(880): Ceres Seq. ID no. 12562119
  misc_feature (251)..(537): Pfam Name: haloacid dehalogenase-like hydrolase Pfam Description: haloacid dehalogenase-like hydrolase
  misc_feature (689)..(736): Homolog of NCBI NO: 1709665 NR Description: Plasma membrane ATPase (Proton pump)
  misc_feature (1)..(679): Homolog of NCBI NO: 1709665 NR Description: Plasma membrane ATPase (Proton pump)
  misc_feature (687)..(741): Homolog of NCBI NO: 1709666 NR Description: Plasma membrane ATPase (Proton pump)
  misc_feature (1)..(665): Homolog of NCBI NO: 1709666 NR Description: Plasma membrane ATPase (Proton pump)
  misc_feature (685)..(736): Homolog of NCBI NO: 16751320 NR Description: putative plasma membrane-type proton ATPase
  misc_feature (1)..(675): Homolog of NCBI NO: 16751320 NR Description: putative plasma membrane-type proton ATPase
  misc_feature (1)..(780): Homolog of NCBI NO: 1709664 NR Description: Probable plasma membrane ATPase (Proton pump)
  misc_feature (1)..(774): Homolog of NCBI NO: 2652922 NR Description: plasma membrane (H+) ATPase [Uromyces fabae]
  misc_feature (1)..(774): Homolog of NCBI NO: 3348073 NR Description: plasma membrane H(+)-ATPase 1 [Filobasidiella
  misc_feature (1)..(774): Homolog of NCBI NO: 6691153 NR Description: plasma membrane H(+)-ATPase [Filobasidiella
MEAAAIMAIALANGGGKPPDWQDFVGIITLLVINSTISFIEENNAGNAAAALMARLAPKAKVLRDGRWGEQDAAILVPGDIISIKLGDIVPADARLLEGDPLKIDQSSLTGESLPVTKGPGDGVYSGSTCKQGELEAVVIATGVHTFFGKAAHLVDTTNHVGHFQQVLTAIGNFCICSIAVGMIIEIVVMYPIQHRAYRPGIDNLLVLLIGGIPIAMPTVLSVTMAIGSHRLSQQGAITKRMTAIEEMAGMDVLCSDKTGTLTLNKLTVDKNLIEVFTKGVDADTVVLMAAQASRLENQDAIDAAIVGMLADPKEARAGVREVHFLPFNPTDKRTALTYIDSDGKMHRVSKGAPEQILNLAHNRAEIERRVHAVIDKFAERGLRSLAVAYQEVPEGTKESAGGPWQFMGLMPLFDPPRHDSAETIRRALNLGVNVKMITGDQLAIGKETGRRLGMGTNMYPSSALLGQHKDESIGALPIDDLIEKADGFAGVFPEHKYEIVKRLQARKHICGMTGDGVNDAPALKKADIGIAVADATDAARSASDIVLTEPGLSVIISAVLTSRAIFQRMKNYTIYAVSITIRIVLGFMLLALIWKFDFPPFMVLIIAILNDGTIMTISKDRVKPSPLPDSWKLSEIFATGVVFGSYMAMMTVIFFWAAYKTDFFPRTFGVSTLEKTAHDDFRKLASAIYLQVSIISQALIFVTRSRSWSYVERPGMLLVVAFILAQLVATLIAVYANWSFAAIEGIGWGWAGVIWLYNIVFYIPLDIIKFLIRYALSGRAWDLVIEQRVAFTRQKDFGKEQRELQWAHAQRTLHGLQAPDAKMFPERTHFNELSQMAEEAKRRAEIARLRELHTLKGHVESVVRLKGLDIETIQQAYTV

SEQ ID NO: 25415 - DNA, 1801 bp, Arabidopsis thaliana
  misc_feature (1)..(1801): Ceres Seq. ID no. 13487593
  misc_feature: MA Experiment ID: 108463 Result: Up-regulated in Transcription
  misc_feature: MA Experiment 108463 PARAMETER Experiment Name: At_Germinating_Seeds_cDNA_P Parameter: Age (day) Value: 3 vs. 0
  misc_feature: MA Experiment 108463 PARAMETER Experiment Name: At_Germinating_Seeds_cDNA_P Parameter: Tissue Value: Germinating Seeds
  misc_feature: MA Experiment ID: 108473 Result: Up-regulated in Transcription
  misc_feature: MA Experiment 108473 PARAMETER Experiment Name: At_Drought_Flowers_cDNA_P Parameter: Timepoint (hr) Value: 7 d
  misc_feature: MA Experiment 108473 PARAMETER Experiment Name: At_Drought_Flowers_cDNA_P Parameter: Tissue Value: Flower
  misc_feature: MA Experiment 108473 PARAMETER Experiment Name: At_Drought_Flowers_cDNA_P Parameter: Treatment Value: Drought vs. No Drought
  misc_feature: MA Experiment ID: 108488 Result: Down-regulated in Transcription
  misc_feature: MA Experiment ID: 108561 Result: Up-regulated in Transcription
  misc_feature: MA Experiment 108561 PARAMETER Experiment Name: At_100uM_ABA_cDNA_P Parameter: Timepoint (hr) Value: 6
  misc_feature: MA Experiment 108561 PARAMETER Experiment Name: At_100uM_ABA_cDNA_P Parameter: Tissue Value: Aerial
  misc_feature: MA Experiment 108561 PARAMETER Experiment Name: At_100uM_ABA_cDNA_P Parameter: Treatment Value: 100uM ABA vs. No Treatment
  misc_feature: MA Experiment ID: 108572 Result: Up-regulated in Transcription
  misc_feature: MA Experiment 108572 PARAMETER Experiment Name: At_Drought_cDNA_P Parameter: Timepoint (hr) Value: 1
  misc_feature: MA Experiment 108572 PARAMETER Experiment Name: At_Drought_cDNA_P Parameter: Tissue Value: Aerial
  misc_feature: MA Experiment 108572 PARAMETER Experiment Name: At_Drought_cDNA_P Parameter: Treatment Value: Drought vs. No Drought
  misc_feature: MA Experiment ID: 108573 Result: Up-regulated in Transcription
  misc_feature: MA Experiment 108573 PARAMETER Experiment Name: At_Drought_cDNA_P Parameter: Timepoint (hr) Value: 6
  misc_feature: MA Experiment 108573 PARAMETER Experiment Name: At_Drought_cDNA_P Parameter: Tissue Value: Aerial
  misc_feature: MA Experiment 108573 PARAMETER Experiment Name: At_Drought_cDNA_P Parameter: Treatment Value: Drought vs. No Drought
  misc_feature: MA Experiment ID: 108579 Result: Down-regulated in Transcription
  misc_feature: MA Experiment 108579 PARAMETER Experiment Name: At_4deg_Cold_cDNA_P Parameter: Temperature (deg C) Value: 4 vs. 22
  misc_feature: MA Experiment 108579 PARAMETER Experiment Name: At_4deg_Cold_cDNA_P Parameter: Timepoint (hr) Value: 6
  misc_feature: MA Experiment 108579 PARAMETER Experiment Name: At_4deg_Cold_cDNA_P Parameter: Tissue Value: Aerial
  misc_feature: MA Experiment ID: 108585 Result: Up-regulated in Transcription
  misc_feature: MA Experiment 108585 PARAMETER Experiment Name: At_5mM_NaNP_cDNA_P Parameter: Timepoint (hr) Value: 6
  misc_feature: MA Experiment 108585 PARAMETER Experiment Name: At_5mM_NaNP_cDNA_P Parameter: Tissue Value: Aerial
  misc_feature: MA Experiment 108585 PARAMETER Experiment Name: At_5mM_NaNP_cDNA_P Parameter: Treatment Value: null
  misc_feature: MA Experiment ID: 108605 Result: Up-regulated in Transcription
  misc_feature: MA Experiment 108605 PARAMETER Experiment Name: At_100uM_ABA_cDNA_P Parameter: Timepoint (hr) Value: 6
  misc_feature: MA Experiment 108605 PARAMETER Experiment Name: At_100uM_ABA_cDNA_P Parameter: Tissue Value: Aerial
  misc_feature: MA Experiment 108605 PARAMETER Experiment Name: At_100uM_ABA_cDNA_P Parameter: Treatment Value: 100uM ABA vs. No Treatment
  misc_feature: MA Experiment ID: 108607 Result: Up-regulated in Transcription
  misc_feature: MA Experiment 108607 PARAMETER Experiment Name: At_100uM_ABA_cDNA_P Parameter: Timepoint (hr) Value: 4
  misc_feature: MA Experiment 108607 PARAMETER Experiment Name: At_100uM_ABA_cDNA_P Parameter: Tissue Value: Aerial
  misc_feature: MA Experiment 108607 PARAMETER Experiment Name: At_100uM_ABA_cDNA_P Parameter: Treatment Value: 100uM ABA vs. No Treatment
  misc_feature: MA Experiment ID: 108608 Result: Up-regulated in Transcription
  misc_feature: MA Experiment 108608 PARAMETER Experiment Name: At_100uM_ABA_cDNA_P Parameter: Timepoint (hr) Value: 1
  misc_feature: MA Experiment 108608 PARAMETER Experiment Name: At_100uM_ABA_cDNA_P Parameter: Tissue Value: Aerial
  misc_feature: MA Experiment 108608 PARAMETER Experiment Name: At_100uM_ABA_cDNA_P Parameter: Treatment Value: 100uM ABA vs. No Treatment
  misc_feature: MA Experiment ID: 108609 Result: Up-regulated in Transcription
  misc_feature: MA Experiment 108609 PARAMETER Experiment Name: At_100uM_ABA_cDNA_P Parameter: Timepoint (hr) Value: 24
  misc_feature: MA Experiment 108609 PARAMETER Experiment Name: At_100uM_ABA_cDNA_P Parameter: Tissue Value: Aerial
  misc_feature: MA Experiment 108609 PARAMETER Experiment Name: At_100uM_ABA_cDNA_P Parameter: Treatment Value: 100uM ABA vs. No Treatment
  misc_feature: MA Experiment ID: 108667 Result: Up-regulated in Transcription
  misc_feature: MA Experiment 108667 PARAMETER Experiment Name: At_2mM_SA_cDNA_P Parameter: Plant Line Value: WS
  misc_feature: MA Experiment 108667 PARAMETER Experiment Name: At_2mM_SA_cDNA_P Parameter: Timepoint (hr) Value: 1
  misc_feature: MA Experiment 108667 PARAMETER Experiment Name: At_2mM_SA_cDNA_P Parameter: Treatment Value: 2mM SA vs. No Treatment
  misc_feature: MA Experiment ID: 108668 Result: Up-regulated in Transcription
  misc_feature: MA Experiment 108668 PARAMETER Experiment Name: At_2mM_SA_cDNA_P Parameter: Plant Line Value: WS
  misc_feature: MA Experiment 108668 PARAMETER Experiment Name: At_2mM_SA_cDNA_P Parameter: Timepoint (hr) Value: 6
  misc_feature: MA Experiment 108668 PARAMETER Experiment Name: At_2mM_SA_cDNA_P Parameter: Treatment Value: 2mM SA vs. No Treatment
  misc_feature: MA Experiment ID: 20000070 Result: Up-regulated in Transcription
  misc_feature: MA Experiment 20000070 PARAMETER Experiment Name: At_100uM_ABA_Mutants_cDNA_P Parameter: Plant Line Value: CS24
  misc_feature: MA Experiment 20000070 PARAMETER Experiment Name: At_100uM_ABA_Mutants_cDNA_P Parameter: Timepoint (hr) Value: 6
  misc_feature: MA Experiment 20000070 PARAMETER Experiment Name: At_100uM_ABA_Mutants_cDNA_P Parameter: Tissue Value: Aerial
  misc_feature: MA Experiment 20000070 PARAMETER Experiment Name: At_100uM_ABA_Mutants_cDNA_P Parameter: Treatment Value: 100uM ABA vs. No Treatment
  misc_feature: MA Experiment ID: 20000071 Result: Up-regulated in Transcription
  misc_feature: MA Experiment 20000071 PARAMETER Experiment Name: At_100uM_ABA_Mutants_cDNA_P Parameter: Plant Line Value: CS8104
  misc_feature: MA Experiment 20000071 PARAMETER Experiment Name: At_100uM_ABA_Mutants_cDNA_P Parameter: Timepoint (hr) Value: 6
  misc_feature: MA Experiment 20000071 PARAMETER Experiment Name: At_100uM_ABA_Mutants_cDNA_P Parameter: Tissue Value: Aerial
  misc_feature: MA Experiment 20000071 PARAMETER Experiment Name: At_100uM_ABA_Mutants_cDNA_P Parameter: Treatment Value: 100uM ABA vs. No Treatment
  misc_feature: MA Experiment ID: 20000087 Result: Up-regulated in Transcription
  misc_feature: MA Experiment 20000087 PARAMETER Experiment Name: At_100uM_ABA_Mutants_cDNA_P Parameter: Plant Line Value: WS
  misc_feature: MA Experiment 20000087 PARAMETER Experiment Name: At_100uM_ABA_Mutants_cDNA_P Parameter: Timepoint (hr) Value: 6
  misc_feature: MA Experiment 20000087 PARAMETER Experiment Name: At_100uM_ABA_Mutants_cDNA_P Parameter: Tissue Value: Aerial
  misc_feature: MA Experiment 20000087 PARAMETER Experiment Name: At_100uM_ABA_Mutants_cDNA_P Parameter: Treatment Value: 100uM ABA vs. No Treatment
  misc_feature: MA Experiment ID: 20000088 Result: Up-regulated in Transcription
  misc_feature: MA Experiment 20000088 PARAMETER Experiment Name: At_100uM_ABA_Mutants_cDNA_P Parameter: Plant Line Value: Landsberg
  misc_feature: MA Experiment 20000088 PARAMETER Experiment Name: At_100uM_ABA_Mutants_cDNA_P Parameter: Timepoint (hr) Value: 6
  misc_feature: MA Experiment 20000088 PARAMETER Experiment Name: At_100uM_ABA_Mutants_cDNA_P Parameter: Tissue Value: Aerial
  misc_feature: MA Experiment 20000088 PARAMETER Experiment Name: At_100uM_ABA_Mutants_cDNA_P Parameter: Treatment Value: 100uM ABA vs. No Treatment
  misc_feature: MA Experiment ID: 20000089 Result: Up-regulated in Transcription
  misc_feature: MA Experiment ID: 20000117 Result: Up-regulated in Transcription
  misc_feature: MA Experiment 20000117 PARAMETER Experiment Name: At_100uM_ABA_Mutants_cDNA_P Parameter: Plant Line Value: Columbia
  misc_feature: MA Experiment 20000117 PARAMETER Experiment Name: At_100uM_ABA_Mutants_cDNA_P Parameter: Timepoint (hr) Value: 6
  misc_feature: MA Experiment 20000117 PARAMETER Experiment Name: At_100uM_ABA_Mutants_cDNA_P Parameter: Tissue Value: Aerial
  misc_feature: MA Experiment 20000117 PARAMETER Experiment Name: At_100uM_ABA_Mutants_cDNA_P Parameter: Treatment Value: 100uM ABA vs. No Treatment
  misc_feature: MA Experiment ID: 20000166 Result: Up-regulated in Transcription
  misc_feature: MA Experiment 20000166 PARAMETER Experiment Name: At_100uM_ABA_P Parameter: Age (day) Value: 14
  misc_feature: MA Experiment 20000166 PARAMETER Experiment Name: At_100uM_ABA_P Parameter: Organism Value: A. thaliana
  misc_feature: MA Experiment 20000166 PARAMETER Experiment Name: At_100uM_ABA_P Parameter: Plant Line Value: WS
  misc_feature: MA Experiment 20000166 PARAMETER Experiment Name: At_100uM_ABA_P Parameter: Timepoint (hr) Value: 1
  misc_feature: MA Experiment 20000166 PARAMETER Experiment Name: At_100uM_ABA_P Parameter: Tissue Value: Aerial
  misc_feature: MA Experiment 20000166 PARAMETER Experiment Name: At_100uM_ABA_P Parameter: Treatment Value: 100uM ABA vs. No Treatment
  misc_feature: MA Experiment ID: 20000169 Result: Up-regulated in Transcription
  misc_feature: MA Experiment 20000169 PARAMETER Experiment Name: At_100uM_ABA_P Parameter: Age (day) Value: 14
  misc_feature: MA Experiment 20000169 PARAMETER Experiment Name: At_100uM_ABA_P Parameter: Organism Value: A. thaliana
  misc_feature: MA Experiment 20000169 PARAMETER Experiment Name: At_100uM_ABA_P Parameter: Plant Line Value: WS
  misc_feature: MA Experiment 20000169 PARAMETER Experiment Name: At_100uM_ABA_P Parameter: Timepoint (hr) Value: 6
  misc_feature: MA Experiment 20000169 PARAMETER Experiment Name: At_100uM_ABA_P Parameter: Tissue Value: Aerial
  misc_feature: MA Experiment 20000169 PARAMETER Experiment Name: At_100uM_ABA_P Parameter: Treatment Value: 100uM ABA vs. No Treatment
  misc_feature: MA Experiment ID: 20000182 Result: Up-regulated in Transcription
  misc_feature: MA Experiment 20000182 PARAMETER Experiment Name: At_2mM_SA_P Parameter: Age (day) Value: 14
  misc_feature: MA Experiment 20000182 PARAMETER Experiment Name: At_2mM_SA_P Parameter: Organism Value: A. thaliana
  misc_feature: MA Experiment 20000182 PARAMETER Experiment Name: At_2mM_SA_P Parameter: Plant Line Value: WS
  misc_feature: MA Experiment 20000182 PARAMETER Experiment Name: At_2mM_SA_P Parameter: Timepoint (hr) Value: 6
  misc_feature: MA Experiment 20000182 PARAMETER Experiment Name: At_2mM_SA_P Parameter: Tissue Value: Aerial
  misc_feature: MA Experiment 20000182 PARAMETER Experiment Name: At_2mM_SA_P Parameter: Treatment Value: 2mM SA vs. No Treatment
  misc_feature: MA Experiment ID: 20000184 Result: Down-regulated in Transcription
  misc_feature: MA Experiment 20000184 PARAMETER Experiment Name: At_Shoots__P Parameter: Age (day) Value: 7
  misc_feature: MA Experiment 20000184 PARAMETER Experiment Name: At_Shoots__P Parameter: Tissue Value: Shoots vs. Whole Plant
  misc_feature: MA Experiment ID: 20000213 Result: Down-regulated in Transcription
  misc_feature: MA Experiment 20000213 PARAMETER Experiment Name: At_4deg_Cold_P Parameter: Timepoint (hr) Value: 2
  misc_feature: MA Experiment ID: 20000234 Result: Down-regulated in Transcription
  misc_feature: MA Experiment 20000234 PARAMETER Experiment Name: At_Siliques_P Parameter: Age (day) Value: 21
  misc_feature: MA Experiment 20000234 PARAMETER Experiment Name: At_Siliques_P Parameter: Organism Value: A. thaliana
  misc_feature: MA Experiment 20000234 PARAMETER Experiment Name: At_Siliques_P Parameter: Plant Line Value: WS
  misc_feature: MA Experiment 20000234 PARAMETER Experiment Name: At_Siliques_P Parameter: Tissue Value: Less Than 5mm Siliques vs. Whole Plant
  misc_feature: MA Experiment ID: 20000267 Result: Up-regulated in Transcription
  misc_feature: MA Experiment 20000267 PARAMETER Experiment Name: At_Drought_P Parameter: Age (day) Value: 7
  misc_feature: MA Experiment 20000267 PARAMETER Experiment Name: At_Drought_P Parameter: Organism Value: A. thaliana
  misc_feature: MA Experiment 20000267 PARAMETER Experiment Name: At_Drought_P Parameter: Plant Line Value: WS
  misc_feature: MA Experiment 20000267 PARAMETER Experiment Name: At_Drought_P Parameter: Timepoint (hr) Value: 6
  misc_feature: MA Experiment 20000267 PARAMETER Experiment Name: At_Drought_P Parameter: Tissue Value: Whole Plant
  misc_feature: MA Experiment 20000267 PARAMETER Experiment Name: At_Drought_P Parameter: Treatment Value: Drought vs. No Drought
  misc_feature: MA Experiment ID: 20000268 Result: Up-regulated in Transcription
  misc_feature: MA Experiment 20000268 PARAMETER Experiment Name: At_100mM_NaCl__P Parameter: Age (day) Value: 14
  misc_feature: MA Experiment 20000268 PARAMETER Experiment Name: At_100mM_NaCl__P Parameter: Organism Value: A. thaliana
  misc_feature: MA Experiment 20000268 PARAMETER Experiment Name: At_100mM_NaCl__P Parameter: Plant Line Value: WS
  misc_feature: MA Experiment 20000268 PARAMETER Experiment Name: At_100mM_NaCl__P Parameter: Timepoint (hr) Value: 6
  misc_feature: MA Experiment 20000268 PARAMETER Experiment Name: At_100mM_NaCl__P Parameter: Tissue Value: Whole Plant
  misc_feature: MA Experiment 20000268 PARAMETER Experiment Name: At_100mM_NaCl__P Parameter: Treatment Value: 100mM NaCl vs. No Treatment
  misc_feature: MA Experiment ID: 20000436 Result: Up-regulated in Transcription
  misc_feature: MA Experiment 20000436 PARAMETER Experiment Name: At_Drought_P Parameter: Age (day) Value: 7
  misc_feature: MA Experiment 20000436 PARAMETER Experiment Name: At_Drought_P Parameter: Organism Value: A. thaliana
  misc_feature: MA Experiment 20000436 PARAMETER Experiment Name: At_Drought_P Parameter: Plant Line Value: WS
  misc_feature: MA Experiment 20000436 PARAMETER Experiment Name: At_Drought_P Parameter: Timepoint (hr) Value: 12
  misc_feature: MA Experiment 20000436 PARAMETER Experiment Name: At_Drought_P Parameter: Tissue Value: Whole Plant
  misc_feature: MA Experiment 20000436 PARAMETER Experiment Name: At_Drought_P Parameter: Treatment Value: Drought vs. No Drought
  misc_feature: MA Experiment ID: 20000437 Result: Up-regulated in Transcription
  misc_feature: MA Experiment 20000437 PARAMETER Experiment Name: At_Drought_P Parameter: Age (day) Value: 8
  misc_feature: MA Experiment 20000437 PARAMETER Experiment Name: At_Drought_P Parameter: Organism Value: A. thaliana
  misc_feature: MA Experiment 20000437 PARAMETER Experiment Name: At_Drought_P Parameter: Plant Line Value: WS
  misc_feature: MA Experiment 20000437 PARAMETER Experiment Name: At_Drought_P Parameter: Timepoint (hr) Value: 24
  misc_feature: MA Experiment 20000437 PARAMETER Experiment Name: At_Drought_P Parameter: Tissue Value: Whole Plant
  misc_feature: MA Experiment 20000437 PARAMETER Experiment Name: At_Drought_P Parameter: Treatment Value: Drought vs. No Drought
  misc_feature: MA Experiment ID: 20000438 Result: Down-regulated in Transcription
  misc_feature: MA Experiment 20000438 PARAMETER Experiment Name: At_Shoots__P Parameter: Age (day) Value: 14
  misc_feature: MA Experiment 20000438 PARAMETER Experiment Name: At_Shoots__P Parameter: Tissue Value: Shoots vs. Whole Plant
  misc_feature: MA Experiment ID: 20000453 Result: Up-regulated in Transcription
  misc_feature: MA Experiment 20000453 PARAMETER Experiment Name: At_100uM_ABA_P Parameter: Age (day) Value: 15
  misc_feature: MA Experiment 20000453 PARAMETER Experiment Name: At_100uM_ABA_P Parameter: Organism Value: A. thaliana
  misc_feature: MA Experiment 20000453 PARAMETER Experiment Name: At_100uM_ABA_P Parameter: Plant Line Value: WS
  misc_feature: MA Experiment 20000453 PARAMETER Experiment Name: At_100uM_ABA_P Parameter: Timepoint (hr) Value: 24
  misc_feature: MA Experiment 20000453 PARAMETER Experiment Name: At_100uM_ABA_P Parameter: Tissue Value: Aerial
  misc_feature: MA Experiment 20000453 PARAMETER Experiment Name: At_100uM_ABA_P Parameter: Treatment Value: 100uM ABA vs. No Treatment
  misc_feature: MA Experiment ID: 20000455 Result: Up-regulated in Transcription
  misc_feature: MA Experiment 20000455 PARAMETER Experiment Name: At_100uM_ABA_P Parameter: Age (day) Value: 16
  misc_feature: MA Experiment 20000455 PARAMETER Experiment Name: At_100uM_ABA_P Parameter: Organism Value: A. thaliana
  misc_feature: MA Experiment 20000455 PARAMETER Experiment Name: At_100uM_ABA_P Parameter: Plant Line Value: WS
  misc_feature: MA Experiment 20000455 PARAMETER Experiment Name: At_100uM_ABA_P Parameter: Timepoint (hr) Value: 48
  misc_feature: MA Experiment 20000455 PARAMETER Experiment Name: At_100uM_ABA_P Parameter: Tissue Value: Aerial
  misc_feature: MA Experiment 20000455 PARAMETER Experiment Name: At_100uM_ABA_P Parameter: Treatment Value: 100uM ABA vs. No Treatment
  misc_feature: MA Experiment ID: 20000573 Result: Up-regulated in Transcription
  misc_feature: MA Experiment 20000573 PARAMETER Experiment Name: At_100uM_ABA_Mutants__P Parameter: Organism Value: A. thaliana
  misc_feature: MA Experiment 20000573 PARAMETER Experiment Name: At_100uM_ABA_Mutants__P Parameter: Plant Line Value: CS22 vs. Ler wt
  misc_feature: MA Experiment 20000573 PARAMETER Experiment Name: At_100uM_ABA_Mutants__P Parameter: Timepoint (hr) Value: N/A
  misc_feature: MA Experiment 20000573 PARAMETER Experiment Name: At_100uM_ABA_Mutants__P Parameter: Tissue Value: Whole Plant
  misc_feature: MA Experiment 20000573 PARAMETER Experiment Name: At_100uM_ABA_Mutants__P Parameter: Treatment Value: None
  misc_feature: MA Experiment ID: 20000574 Result: Up-regulated in Transcription
  misc_feature: MA Experiment 20000574 PARAMETER Experiment Name: At_100uM_ABA_Mutants__P Parameter: Organism Value: A. thaliana
  misc_feature: MA Experiment 20000574 PARAMETER Experiment Name: At_100uM_ABA_Mutants__P Parameter: Plant Line Value: CS23 vs. Ler wt
  misc_feature: MA Experiment 20000574 PARAMETER Experiment Name: At_100uM_ABA_Mutants__P Parameter: Timepoint (hr) Value: N/A
  misc_feature: MA Experiment 20000574 PARAMETER Experiment Name: At_100uM_ABA_Mutants__P Parameter: Tissue Value: Whole Plant
  misc_feature: MA Experiment 20000574 PARAMETER Experiment Name: At_100uM_ABA_Mutants__P Parameter: Treatment Value: None
  misc_feature: MA Experiment ID: 20000794 Result: Up-regulated in Transcription
  misc_feature: MA Experiment 20000794 PARAMETER Experiment Name: At_Petals_P Parameter: Age (day) Value: 23-25 days
  misc_feature: MA Experiment 20000794 PARAMETER Experiment Name: At_Petals_P Parameter: Plant Line Value: WS
  misc_feature: MA Experiment 20000794 PARAMETER Experiment Name: At_Petals_P Parameter: Tissue Value: Petals vs. Whole plant
  misc_feature: MA Experiment ID: 20001248 Result: Up-regulated in Transcription
  misc_feature: MA Experiment 20001248 PARAMETER Experiment Name: At_Far-red-induction_P Parameter: Age (day) Value: 7
  misc_feature: MA Experiment 20001248 PARAMETER Experiment Name: At_Far-red-induction_P Parameter: Light Value: Far-red vs. White
  misc_feature: MA Experiment 20001248 PARAMETER Experiment Name: At_Far-red-induction_P Parameter: Organism Value: A. thaliana
  misc_feature: MA Experiment 20001248 PARAMETER Experiment Name: At_Far-red-induction_P Parameter: Plant Line Value: Columbia
  misc_feature: MA Experiment 20001248 PARAMETER Experiment Name: At_Far-red-induction_P Parameter: Timepoint (hr) Value: 4
  misc_feature: MA Experiment 20001248 PARAMETER Experiment Name: At_Far-red-induction_P Parameter: Tissue Value: Whole Plant
  misc_feature: MA Experiment ID: 20001450 Result: Up-regulated in Transcription
  misc_feature: MA Experiment 20001450 PARAMETER Experiment Name: At_Far-red-induction_P Parameter: Age (day) Value: 7
  misc_feature: MA Experiment 20001450 PARAMETER Experiment Name: At_Far-red-induction_P Parameter: Light Value: Far-red vs. White
  misc_feature: MA Experiment 20001450 PARAMETER Experiment Name: At_Far-red-induction_P Parameter: Organism Value: A. thaliana
  misc_feature: MA Experiment 20001450 PARAMETER Experiment Name: At_Far-red-induction_P Parameter: Plant Line Value: Columbia
  misc_feature: MA Experiment 20001450 PARAMETER Experiment Name: At_Far-red-induction_P Parameter: Timepoint (hr) Value: 8
  misc_feature: MA Experiment 20001450 PARAMETER Experiment Name: At_Far-red-induction_P Parameter: Tissue Value: Whole Plant
  misc_feature: MA Experiment ID: 20001451 Result: Up-regulated in Transcription
  misc_feature: MA Experiment 20001451 PARAMETER Experiment Name: At_Far-red-induction_P Parameter: Age (day) Value: 7
  misc_feature: MA Experiment 20001451 PARAMETER Experiment Name: At_Far-red-induction_P Parameter: Light Value: Far-red vs. White
  misc_feature: MA Experiment 20001451 PARAMETER Experiment Name: At_Far-red-induction_P Parameter: Organism Value: A. thaliana
  misc_feature: MA Experiment 20001451 PARAMETER Experiment Name: At_Far-red-induction_P Parameter: Plant Line Value: Columbia
  misc_feature: MA Experiment 20001451 PARAMETER Experiment Name: At_Far-red-induction_P Parameter: Timepoint (hr) Value: 24
  misc_feature: MA Experiment 20001451 PARAMETER Experiment Name: At_Far-red-induction_P Parameter: Tissue Value: Whole Plant
  misc_feature: MA Experiment ID: 20001554 Result: Up-regulated in Transcription
  misc_feature: MA Experiment 20001554 PARAMETER Experiment Name: At_Drought_Soil_Dry_P Parameter: Age (day) Value: 21
  misc_feature: MA Experiment 20001554 PARAMETER Experiment Name: At_Drought_Soil_Dry_P Parameter: Organism Value: A. thaliana
  misc_feature: MA Experiment 20001554 PARAMETER Experiment Name: At_Drought_Soil_Dry_P Parameter: Plant Line Value: WS
  misc_feature: MA Experiment 20001554 PARAMETER Experiment Name: At_Drought_Soil_Dry_P Parameter: Post Timepoint (hr) Value: None
  misc_feature: MA Experiment 20001554 PARAMETER Experiment Name: At_Drought_Soil_Dry_P Parameter: Post-Treatment Value: None
  misc_feature: MA Experiment 20001554 PARAMETER Experiment Name: At_Drought_Soil_Dry_P Parameter: Timepoint (day) Value: 7
  misc_feature: MA Experiment 20001554 PARAMETER Experiment Name: At_Drought_Soil_Dry_P Parameter: Treatment Value: Drought vs. No Drought
  misc_feature: MA Experiment ID: 20001559 Result: Up-regulated in Transcription
  misc_feature: MA Experiment 20001559 PARAMETER Experiment Name: At_Drought_Soil_Dry_P Parameter: Age (day) Value: 28
  misc_feature: MA Experiment 20001559 PARAMETER Experiment Name: At_Drought_Soil_Dry_P Parameter: Organism Value: A. thaliana
  misc_feature: MA Experiment 20001559 PARAMETER Experiment Name: At_Drought_Soil_Dry_P Parameter: Plant Line Value: WS
  misc_feature: MA Experiment 20001559 PARAMETER Experiment Name: At_Drought_Soil_Dry_P Parameter: Post Timepoint (hr) Value: 29
  misc_feature: MA Experiment 20001559 PARAMETER Experiment Name: At_Drought_Soil_Dry_P Parameter: Post-Treatment Value: Re-Water vs. No Drought
  misc_feature: MA Experiment 20001559 PARAMETER Experiment Name: At_Drought_Soil_Dry_P Parameter: Timepoint (day) Value: 14
  misc_feature: MA Experiment 20001559 PARAMETER Experiment Name: At_Drought_Soil_Dry_P Parameter: Treatment Value: Drought vs. No Drought
  misc_feature: MA Experiment ID: 20001757 Result: Down-regulated in Transcription
  misc_feature: MA Experiment 20001757 PARAMETER Experiment Name: At_50mM_NH4NO3_L-to-H_P Parameter: Timepoint (hr) Value: 6
  misc_feature: MA Experiment 20001757 PARAMETER Experiment Name: At_50mM_NH4NO3_L-to-H_P Parameter: Tissue Value: Leaf
  misc_feature: MA Experiment 20001757 PARAMETER Experiment Name: At_50mM_NH4NO3_L-to-H_P Parameter: Treatment Value: 50mM NH4NO3 vs 100mM Mannitol
  misc_feature: MA Experiment ID: 20001904 Result: Up-regulated in Transcription
  misc_feature: MA Experiment 20001904 PARAMETER Experiment Name: At_Drought_Reproduction_P Parameter: Age (day) Value: 37
  misc_feature: MA Experiment 20001904 PARAMETER Experiment Name: At_Drought_Reproduction_P Parameter: Organism Value: A. thaliana
  misc_feature: MA Experiment 20001904 PARAMETER Experiment Name: At_Drought_Reproduction_P Parameter: Plant Line Value: WS
  misc_feature: MA Experiment 20001904 PARAMETER Experiment Name: At_Drought_Reproduction_P Parameter: Timepoint (day) Value: 7
  misc_feature: MA Experiment 20001904 PARAMETER Experiment Name: At_Drought_Reproduction_P Parameter: Tissue Value: Rosettes
  misc_feature: MA Experiment 20001904 PARAMETER Experiment Name: At_Drought_Reproduction_P Parameter: Treatment Value: Drought vs. No Drought
  misc_feature: MA Experiment ID: 20001905 Result: Up-regulated in Transcription
  misc_feature: MA Experiment 20001905 PARAMETER Experiment Name: At_Drought_Reproduction_P Parameter: Age (day) Value: 40
  misc_feature: MA Experiment 20001905 PARAMETER Experiment Name: At_Drought_Reproduction_P Parameter: Organism Value: A. thaliana
  misc_feature: MA Experiment 20001905 PARAMETER Experiment Name: At_Drought_Reproduction_P Parameter: Plant Line Value: WS
  misc_feature: MA Experiment 20001905 PARAMETER Experiment Name: At_Drought_Reproduction_P Parameter: Timepoint (day) Value: 10
  misc_feature: MA Experiment 20001905 PARAMETER Experiment Name: At_Drought_Reproduction_P Parameter: Tissue Value: Rosettes
  misc_feature: MA Experiment 20001905 PARAMETER Experiment Name: At_Drought_Reproduction_P Parameter: Treatment Value: Drought vs. No Drought
  misc_feature: MA Experiment ID: 20001906 Result: Up-regulated in Transcription
  misc_feature: MA Experiment 20001906 PARAMETER Experiment Name: At_Drought_Reproduction_P Parameter: Age (day) Value: 35
  misc_feature: MA Experiment 20001906 PARAMETER Experiment Name: At_Drought_Reproduction_P Parameter: Organism Value: A. thaliana
  misc_feature: MA Experiment 20001906 PARAMETER Experiment Name: At_Drought_Reproduction_P Parameter: Plant Line Value: WS
  misc_feature: MA Experiment 20001906 PARAMETER Experiment Name: At_Drought_Reproduction_P Parameter: Timepoint (day) Value: 5
  misc_feature: MA Experiment 20001906 PARAMETER Experiment Name: At_Drought_Reproduction_P Parameter: Tissue Value: Siliques
  misc_feature: MA Experiment 20001906 PARAMETER Experiment Name: At_Drought_Reproduction_P Parameter: Treatment Value: Drought vs. No Drought
  misc_feature: MA Experiment ID: 20001911 Result: Up-regulated in Transcription
  misc_feature: MA Experiment 20001911 PARAMETER Experiment Name: At_Drought_Reproduction_P Parameter: Age (day) Value: 40
  misc_feature: MA Experiment 20001911 PARAMETER Experiment Name: At_Drought_Reproduction_P Parameter: Organism Value: A. thaliana
  misc_feature: MA Experiment 20001911 PARAMETER Experiment Name: At_Drought_Reproduction_P Parameter: Plant Line Value: WS
  misc_feature: MA Experiment 20001911 PARAMETER Experiment Name: At_Drought_Reproduction_P Parameter: Timepoint (day) Value: 10
  misc_feature: MA Experiment 20001911 PARAMETER Experiment Name: At_Drought_Reproduction_P Parameter: Tissue Value: Flowers
  misc_feature: MA Experiment 20001911 PARAMETER Experiment Name: At_Drought_Reproduction_P Parameter: Treatment Value: Drought vs. No Drought
tgaaccattaggtgatttttttctctgatcttcgagttctgataattgctcttttttctctggctttgttatcgataatttctctggattttctttctggggtgaatttttgcgcagagatgggttcggcgaacaacgagtacgagtttctgagtgagattgggctgacttctcacaacttgggatcttacgttgctggcaaatggcaagccaacggacctcttgtttcaactctcaatcctgctaacaatcagccaattgctcaagttgtggaagcttctctagaggattacgagcaaggtttgaaagcttgcgaggaagcagctaaaatatggatgcaggttacggctcctaagagaggtgatatcgtcagacagattggggatgcactaagatccaaacttgactatcttggtcgtcttctttctcttgaaatgggaaagatccttgctgaaggtattggagaagttcaggaagtaattgacatgtgtgattttgctgttggtttgagccgacaactcaatggatcggttataccttcagaacgccctaaccacatgatgttggagatgtggaatcctcttggcattgttggtgttatcacagcgtttaattttccctgtgcagttcttggttggaatgcttgtattgctcttgtctgtggaaactgtgtagtctggaaaggtgctccaactacaccgttaataactatcgcaatgaccaagctagtagctgaagttttagagaaaaacaacttacccggtgccatttttacggccatgtgtggtggtgctgaaattggtgaagcaatagccaaagacacacgcattcccttagtatcctttactggaagctccagggtgggctcaatggtacaacaaacagtgaatgcgagatctgggaaaactttgcttgagttgagtggaaacaatgcaatcatagtcatggacgatgctgatatacagttagcggctcgatctgttctattcgctgcggttggaactgctggtcaacgttgcacaacttgccgtaggctgcttttgcatgagagtgtctatgacaaagtactcgagcaactgcttacctcatacaaacaagtcaaaatcggcaatcctcttgagaaagggacattgttaggaccattacatactcctgaatcaaaaaagaactttgagaaaggaattgaagtcatcaaatcccagggtggtaaaatactaacgggaggtaaagcagtcgaaggtgaaggaaactttgtggagcctacgataatcgagatatcagcagatgctgctgtcgtcaaagaagagctatttgctccggttctatatgttctaaagtttaagtcatttggagaggctgttgcgataaacaactcggttcctcaaggtctaagcagctcgatattcactcggaaccctgaaaacatcttcaggtggatcggaccactgggaagtgactgtggcattgtgaatgtgaacataccgacgaatggagctgagattggtggagcttttggaggcgagaaagcgactggtggtggtcgtgaagctggaagcgactcatggaaacagtacatgcgtcgatcgacttgtaccatcaactatggaaacgagttacctctagcgcaaggaattaacttcggttagatttttcagagatttactcgttaattaataatgttatgttggttcgatttcgatacttgtattgtatgccttgttctctccaagcctttgacttaagatgattacgcttttaatatatataaaaaaatattgaatatattttgattgttaatttg

SEQ ID NO: 25416 - protein, 508 aa, Arabidopsis thaliana; identical to SEQ ID NO: 24267
  peptide (1)..(508): Ceres Seq. ID no. 13487594
  misc_feature (1)..(508): Homolog of NCBI NO: 11995457 NR Description: aldehyde dehydrogenase [Oryza sativa]
  misc_feature (1)..(508): Homolog of NCBI NO: 25090068 NR Description: Aldehyde dehydrogenase family 7 member A1
  misc_feature (1)..(508): Homolog of NCBI NO: 118514 NR Description: Aldehyde dehydrogenase family 7 member A1
  misc_feature (1)..(490): Homolog of NCBI NO: 25090053 NR Description: Aldehyde dehydrogenase family 7 member A1
  misc_feature (1)..(508): Homolog of NCBI NO: 15221042 NR Description: aldehyde dehydrogenase, putative (ALDH)

SEQ ID NO: 25417 - protein, 436 aa, Arabidopsis thaliana; identical to SEQ ID NO: 24268
  peptide (1)..(436): Ceres Seq. ID no. 13487595
  misc_feature (1)..(436): Homolog of NCBI NO: 11995457 NR Description: aldehyde dehydrogenase [Oryza sativa]
  misc_feature (1)..(436): Homolog of NCBI NO: 25090068 NR Description: Aldehyde dehydrogenase family 7 member A1
  misc_feature (1)..(436): Homolog of NCBI NO: 118514 NR Description: Aldehyde dehydrogenase family 7 member A1
  misc_feature (1)..(418): Homolog of NCBI NO: 25090053 NR Description: Aldehyde dehydrogenase family 7 member A1
  misc_feature (1)..(436): Homolog of NCBI NO: 15221042 NR Description: aldehyde dehydrogenase, putative (ALDH)

SEQ ID NO: 25418 - protein, 403 aa, Arabidopsis thaliana
  peptide (1)..(403): Ceres Seq. ID no. 13487596
  misc_feature (1)..(403): Homolog of NCBI NO: 11995457 NR Description: aldehyde dehydrogenase [Oryza sativa]
  misc_feature (1)..(403): Homolog of NCBI NO: 25090068 NR Description: Aldehyde dehydrogenase family 7 member A1
  misc_feature (1)..(403): Homolog of NCBI NO: 118514 NR Description: Aldehyde dehydrogenase family 7 member A1
  misc_feature (1)..(385): Homolog of NCBI NO: 25090053 NR Description: Aldehyde dehydrogenase family 7 member A1
  misc_feature (1)..(403): Homolog of NCBI NO: 15221042 NR Description: aldehyde dehydrogenase, putative (ALDH)
MGKILAEGIGEVQEVIDMCDFAVGLSRQLNGSVIPSERPNHMMLEMWNPLGIVGVITAFNFPCAVLGWNACIALVCGNCVVWKGAPTTPLITIAMTKLVAEVLEKNNLPGAIFTAMCGGAEIGEAIAKDTRIPLVSFTGSSRVGSMVQQTVNARSGKTLLELSGNNAIIVMDDADIQLAARSVLFAAVGTAGQRCTTCRRLLLHESVYDKVLEQLLTSYKQVKIGNPLEKGTLLGPLHTPESKKNFEKGIEVIKSQGGKILTGGKAVEGEGNFVEPTIIEISADAAVVKEELFAPVLYVLKFKSFGEAVAINNSVPQGLSSSIFTRNPENIFRWIGPLGSDCGIVNVNIPTNGAEIGGAFGGEKATGGGREAGSDSWKQYMRRSTCTINYGNELPLAQGINFG

SEQ ID NO: 25419 - DNA, 1550 bp, Arabidopsis thaliana
  misc_feature (1)..(1550): Ceres Seq. ID no. 12327277
  misc_feature: MA Experiment ID: 108434 Result: Up-regulated in Transcription
  misc_feature: MA Experiment 108434 PARAMETER Experiment Name: At_Root_Tips_cDNA_P Parameter: Tissue Value: Root Tips
  misc_feature: MA Experiment ID: 108462 Result: Down-regulated in Transcription
  misc_feature: MA Experiment 108462 PARAMETER Experiment Name: At_Germinating_Seeds_cDNA_P Parameter: Age (day) Value: 2 vs. 0
  misc_feature: MA Experiment 108462 PARAMETER Experiment Name: At_Germinating_Seeds_cDNA_P Parameter: Tissue Value: Germinating Seeds
  misc_feature: MA Experiment ID: 108464 Result: Down-regulated in Transcription
  misc_feature: MA Experiment 108464 PARAMETER Experiment Name: At_Germinating_Seeds_cDNA_P Parameter: Age (day) Value: 4 vs. 0
  misc_feature: MA Experiment 108464 PARAMETER Experiment Name: At_Germinating_Seeds_cDNA_P Parameter: Tissue Value: Germinating Seeds
  misc_feature: MA Experiment ID: 20000495 Result: Up-regulated in Transcription
  misc_feature: MA Experiment 20000495 PARAMETER Experiment Name: At_Guard_Cells_P Parameter: Harvest Date Value: 8/2/2002
  misc_feature: MA Experiment 20000495 PARAMETER Experiment Name: At_Guard_Cells_P Parameter: Organism Value: A. thaliana
  misc_feature: MA Experiment 20000495 PARAMETER Experiment Name: At_Guard_Cells_P Parameter: Tissue Value: Guard Cells vs. Leaves
gagactgttttagctacggtcagcttttctctagcgtcggggcctcgatctcttgatttgagcttttcttaggtctgtctctctctgtacactctctccgccgtcgtatctcgccgtcgatttcaatttttccgacgatatgaagctcaccgttaaaactctcaagggcagtcattttgaaattagggttttaccctccgatacgataatggcggtgaagaagaatatagaagattcacaaggaaaagacaattatccatgtgggcagcaattgttgattcacaatggaaaagttttgaaagatgaaactagcctggtggagaacaaagttacggaggaaggatttctcgtcgttatgcttagcaagagcaaatctggaggttcagctggtcaggcttcggttcagacttcttctgtttcacagcctgtttccgctaccacatcttcgactaagcctgcagctccatctacaacccagtcttcacctgttcctgcttcacctattcctgctcaagaacaaccggcggcacagactgacacctatggacaagctgcgtcaacattagttagtggtagtagtcttgagcaaatggtccaacagataatggaaatgggaggtggaagttgggacaaagaaacagttactcgtgcacttcgtgcagcttataacaaccctgagagagcagtggattatttgtactctggaattcctcaaactgctgaagtagctgtgccagtacctgaggctcagattgcaggatccggtgcagcccctgttgcacctgcatctggaggacctaactcatctcctttggatttatttcctcaggaaacagttgctgctgctggctctggagatcttgggacacttgaatttcttagaaacaatgaccagttccaacaattacgcaccatggtccattccaaccctcaaattcttcagcccatgcttcaggaacttggaaagcaaaaccctcaacttctgaggctaattcaagaaaaccaggcagagtttcttcagttagtaaatgagccctatgagggttctgacggggagggggacatgttcgatcaacccgagcaagaaatgccacatgccattaacgttaccccagcagaacaagaagcgattcaacggctcgaggcaatgggatttgatagagccttagtaatagaagcgttcctcgcatgtgaccgaaatgaagaattggcagctaactatctattggagaactcaggtgactttgaagactgagttcacaaaacgttatctcttcttcgaaaaagttttggctcttttcttacgttgaattacatatcttccgtgaattaatgtgtgggatttgatctctctctctctgtgacttagtttgtcctttttttgttttgaatattattttctccgtttgcgatgggggcggttgttacgtttgtgatagatattgaagcagagagatacaaaagtgtgatcacataattctcgagggataaacataaagtgtaatcgatagatatttatcctaaccaacatgttcctatgttgttgtgat

SEQ ID NO: 25420 - protein, 371 aa, Arabidopsis thaliana
  peptide (1)..(371): Ceres Seq. ID no. 12327278
  misc_feature (1)..(78): Pfam Name: Ubiquitin family Pfam Description: Ubiquitin family
  misc_feature (1)..(371): Homolog of NCBI NO: 14335004 NR Description: unknown protein [Arabidopsis thaliana]
  misc_feature (1)..(371): Homolog of NCBI NO: 15240922 NR Description: DNA repair protein RAD23 homolog
  misc_feature (1)..(371): Homolog of NCBI NO: 7446460 NR Description: RAD23 protein, isoform II - carrot
  misc_feature (1)..(371): Homolog of NCBI NO: 30409722 NR Description: RAD23-like protein [Arabidopsis thaliana]
  misc_feature (1)..(371): Homolog of NCBI NO: 15221013 NR Description: hypothetical protein; protein id: At1g16190.1
  misc_feature (1)..(371): Homolog of NCBI NO: 25387250 NR Description: protein F20B17.8 [imported] - Arabidopsis
  misc_feature (1)..(371): Homolog of NCBI NO: 30409720 NR Description: RAD23-like protein [Arabidopsis thaliana]
  misc_feature (1)..(371): Homolog of NCBI NO: 22330746 NR Description: DNA repair protein RAD23, putative
  misc_feature (1)..(371): Homolog of NCBI NO: 30409718 NR Description: RAD23-like protein [Arabidopsis thaliana]
  misc_feature (1)..(371): Homolog of NCBI NO: 30699439 NR Description: DNA repair protein RAD23 -related [Arabidopsis
MKLTVKTLKGSHFEIRVLPSDTIMAVKKNIEDSQGKDNYPCGQQLLIHNGKVLKDETSLVENKVTEEGFLVVMLSKSKSGGSAGQASVQTSSVSQPVSATTSSTKPAAPSTTQSSPVPASPIPAQEQPAAQTDTYGQAASTLVSGSSLEQMVQQIMEMGGGSWDKETVTRALRAAYNNPERAVDYLYSGIPQTAEVAVPVPEAQIAGSGAAPVAPASGGPNSSPLDLFPQETVAAAGSGDLGTLEFLRNNDQFQQLRTMVHSNPQILQPMLQELGKQNPQLLRLIQENQAEFLQLVNEPYEGSDGEGDMFDQPEQEMPHAINVTPAEQEAIQRLEAMGFDRALVIEAFLACDRNEELAANYLLENSGDFED

SEQ ID NO: 25421 - protein, 348 aa, Arabidopsis thaliana
  peptide (1)..(348): Ceres Seq. ID no. 12327279
  misc_feature (1)..(55): Pfam Name: Ubiquitin family Pfam Description: Ubiquitin family
  misc_feature (1)..(348): Homolog of NCBI NO: 14335004 NR Description: unknown protein [Arabidopsis thaliana]
  misc_feature (1)..(348): Homolog of NCBI NO: 15240922 NR Description: DNA repair protein RAD23 homolog
  misc_feature (1)..(348): Homolog of NCBI NO: 7446460 NR Description: RAD23 protein, isoform II - carrot
  misc_feature (1)..(348): Homolog of NCBI NO: 30409722 NR Description: RAD23-like protein [Arabidopsis thaliana]
  misc_feature (1)..(348): Homolog of NCBI NO: 15221013 NR Description: hypothetical protein; protein id: At1g16190.1
  misc_feature (1)..(348): Homolog of NCBI NO: 25387250 NR Description: protein F20B17.8 [imported] - Arabidopsis
  misc_feature (1)..(348): Homolog of NCBI NO: 30409720 NR Description: RAD23-like protein [Arabidopsis thaliana]
  misc_feature (1)..(348): Homolog of NCBI NO: 22330746 NR Description: DNA repair protein RAD23, putative
  misc_feature (1)..(348): Homolog of NCBI NO: 30409718 NR Description: RAD23-like protein [Arabidopsis thaliana]
  misc_feature (1)..(348): Homolog of NCBI NO: 30699439 NR Description: DNA repair protein RAD23 -related [Arabidopsis
MAVKKNIEDSQGKDNYPCGQQLLIHNGKVLKDETSLVENKVTEEGFLVVMLSKSKSGGSAGQASVQTSSVSQPVSATTSSTKPAAPSTTQSSPVPASPIPAQEQPAAQTDTYGQAASTLVSGSSLEQMVQQIMEMGGGSWDKETVTRALRAAYNNPERAVDYLYSGIPQTAEVAVPVPEAQIAGSGAAPVAPASGGPNSSPLDLFPQETVAAAGSGDLGTLEFLRNNDQFQQLRTMVHSNPQILQPMLQELGKQNPQLLRLIQENQAEFLQLVNEPYEGSDGEGDMFDQPEQEMPHAINVTPAEQEAIQRLEAMGFDRALVIEAFLACDRNEELAANYLLENSGDFED

SEQ ID NO: 25422 - protein, 299 aa, Arabidopsis thaliana
  peptide (1)..(299): Ceres Seq. ID no. 12327280
  misc_feature (75)..(117): Pfam Name: UBA/TS-N domain Pfam Description: UBA/TS-N domain
  misc_feature (1)..(299): Homolog of NCBI NO: 7446460 NR Description: RAD23 protein, isoform II - carrot
  misc_feature (1)..(299): Homolog of NCBI NO: 30409722 NR Description: RAD23-like protein [Arabidopsis thaliana]
  misc_feature (1)..(299): Homolog of NCBI NO: 15221013 NR Description: hypothetical protein; protein id: At1g16190.1
  misc_feature (1)..(299): Homolog of NCBI NO: 25387250 NR Description: protein F20B17.8 [imported] - Arabidopsis
  misc_feature (1)..(299): Homolog of NCBI NO: 14335004 NR Description: unknown protein [Arabidopsis thaliana]
  misc_feature (1)..(299): Homolog of NCBI NO: 15240922 NR Description: DNA repair protein RAD23 homolog
  misc_feature (1)..(299): Homolog of NCBI NO: 30409720 NR Description: RAD23-like protein [Arabidopsis thaliana]
  misc_feature (1)..(299): Homolog of NCBI NO: 22330746 NR Description: DNA repair protein RAD23, putative
  misc_feature (1)..(299): Homolog of NCBI NO: 30409718 NR Description: RAD23-like protein [Arabidopsis thaliana]
  misc_feature (1)..(299): Homolog of NCBI NO: 30699439 NR Description: DNA repair protein RAD23 -related [Arabidopsis
MLSKSKSGGSAGQASVQTSSVSQPVSATTSSTKPAAPSTTQSSPVPASPIPAQEQPAAQTDTYGQAASTLVSGSSLEQMVQQIMEMGGGSWDKETVTRALRAAYNNPERAVDYLYSGIPQTAEVAVPVPEAQIAGSGAAPVAPASGGPNSSPLDLFPQETVAAAGSGDLGTLEFLRNNDQFQQLRTMVHSNPQILQPMLQELGKQNPQLLRLIQENQAEFLQLVNEPYEGSDGEGDMFDQPEQEMPHAINVTPAEQEAIQRLEAMGFDRALVIEAFLACDRNEELAANYLLENSGDFED

SEQ ID NO: 25423 - DNA, 1555 bp, Arabidopsis thaliana
  misc_feature (1)..(1555): Ceres Seq. ID no. 12357558
  misc_feature: MA Experiment ID: 108434 Result: Up-regulated in Transcription
  misc_feature: MA Experiment 108434 PARAMETER Experiment Name: At_Root_Tips_cDNA_P Parameter: Tissue Value: Root Tips
  misc_feature: MA Experiment ID: 108561 Result: Up-regulated in Transcription
  misc_feature: MA Experiment 108561 PARAMETER Experiment Name: At_100uM_ABA_cDNA_P Parameter: Timepoint (hr) Value: 6
  misc_feature: MA Experiment 108561 PARAMETER Experiment Name: At_100uM_ABA_cDNA_P Parameter: Tissue Value: Aerial
  misc_feature: MA Experiment 108561 PARAMETER Experiment Name: At_100uM_ABA_cDNA_P Parameter: Treatment Value: 100uM ABA vs. No Treatment
  misc_feature: MA Experiment ID: 108573 Result: Up-regulated in Transcription
  misc_feature: MA Experiment 108573 PARAMETER Experiment Name: At_Drought_cDNA_P Parameter: Timepoint (hr) Value: 6
  misc_feature: MA Experiment 108573 PARAMETER Experiment Name: At_Drought_cDNA_P Parameter: Tissue Value: Aerial
  misc_feature: MA Experiment 108573 PARAMETER Experiment Name: At_Drought_cDNA_P Parameter: Treatment Value: Drought vs. No Drought
  misc_feature: MA Experiment ID: 108585 Result: Down-regulated in Transcription
  misc_feature: MA Experiment 108585 PARAMETER Experiment Name: At_5mM_NaNP_cDNA_P Parameter: Timepoint (hr) Value: 6
  misc_feature: MA Experiment 108585 PARAMETER Experiment Name: At_5mM_NaNP_cDNA_P Parameter: Tissue Value: Aerial
  misc_feature: MA Experiment 108585 PARAMETER Experiment Name: At_5mM_NaNP_cDNA_P Parameter: Treatment Value: null
  misc_feature: MA Experiment ID: 108607 Result: Up-regulated in Transcription
  misc_feature: MA Experiment 108607 PARAMETER Experiment Name: At_100uM_ABA_cDNA_P Parameter: Timepoint (hr) Value: 4
  misc_feature: MA Experiment 108607 PARAMETER Experiment Name: At_100uM_ABA_cDNA_P Parameter: Tissue Value: Aerial
  misc_feature: MA Experiment 108607 PARAMETER Experiment Name: At_100uM_ABA_cDNA_P Parameter: Treatment Value: 100uM ABA vs. No Treatment
  misc_feature: MA Experiment ID: 20000068 Result: Up-regulated in Transcription
  misc_feature: MA Experiment ID: 20000069 Result: Up-regulated in Transcription
  misc_feature: MA Experiment 20000069 PARAMETER Experiment Name: At_100uM_ABA_Mutants_cDNA_P Parameter: Plant Line Value: CS23
  misc_feature: MA Experiment 20000069 PARAMETER Experiment Name: At_100uM_ABA_Mutants_cDNA_P Parameter: Timepoint (hr) Value: 6
  misc_feature: MA Experiment 20000069 PARAMETER Experiment Name: At_100uM_ABA_Mutants_cDNA_P Parameter: Tissue Value: Aerial
  misc_feature: MA Experiment 20000069 PARAMETER Experiment Name: At_100uM_ABA_Mutants_cDNA_P Parameter: Treatment Value: 100uM ABA vs. No Treatment
  misc_feature: MA Experiment ID: 20000071 Result: Up-regulated in Transcription
  misc_feature: MA Experiment 20000071 PARAMETER Experiment Name: At_100uM_ABA_Mutants_cDNA_P Parameter: Plant Line Value: CS8104
  misc_feature: MA Experiment 20000071 PARAMETER Experiment Name: At_100uM_ABA_Mutants_cDNA_P Parameter: Timepoint (hr) Value: 6
  misc_feature: MA Experiment 20000071 PARAMETER Experiment Name: At_100uM_ABA_Mutants_cDNA_P Parameter: Tissue Value: Aerial
  misc_feature: MA Experiment 20000071 PARAMETER Experiment Name: At_100uM_ABA_Mutants_cDNA_P Parameter: Treatment Value: 100uM ABA vs. No Treatment
  misc_feature: MA Experiment ID: 20000117 Result: Up-regulated in Transcription
  misc_feature: MA Experiment 20000117 PARAMETER Experiment Name: At_100uM_ABA_Mutants_cDNA_P Parameter: Plant Line Value: Columbia
  misc_feature: MA Experiment 20000117 PARAMETER Experiment Name: At_100uM_ABA_Mutants_cDNA_P Parameter: Timepoint (hr) Value: 6
  misc_feature: MA Experiment 20000117 PARAMETER Experiment Name: At_100uM_ABA_Mutants_cDNA_P Parameter: Tissue Value: Aerial
  misc_feature: MA Experiment 20000117 PARAMETER Experiment Name: At_100uM_ABA_Mutants_cDNA_P Parameter: Treatment Value: 100uM ABA vs. No Treatment
  misc_feature: MA Experiment ID: 20000166 Result: Up-regulated in Transcription
  misc_feature: MA Experiment 20000166 PARAMETER Experiment Name: At_100uM_ABA_P Parameter: Age (day) Value: 14
  misc_feature: MA Experiment 20000166 PARAMETER Experiment Name: At_100uM_ABA_P Parameter: Organism Value: A. thaliana
  misc_feature: MA Experiment 20000166 PARAMETER Experiment Name: At_100uM_ABA_P Parameter: Plant Line Value: WS
  misc_feature: MA Experiment 20000166 PARAMETER Experiment Name: At_100uM_ABA_P Parameter: Timepoint (hr) Value: 1
  misc_feature: MA Experiment 20000166 PARAMETER Experiment Name: At_100uM_ABA_P Parameter: Tissue Value: Aerial
  misc_feature: MA Experiment 20000166 PARAMETER Experiment Name: At_100uM_ABA_P Parameter: Treatment Value: 100uM ABA vs. No Treatment
  misc_feature: MA Experiment ID: 20000169 Result: Up-regulated in Transcription
  misc_feature: MA Experiment 20000169 PARAMETER Experiment Name: At_100uM_ABA_P Parameter: Age (day) Value: 14
  misc_feature: MA Experiment 20000169 PARAMETER Experiment Name: At_100uM_ABA_P Parameter: Organism Value: A. thaliana
  misc_feature: MA Experiment 20000169 PARAMETER Experiment Name: At_100uM_ABA_P Parameter: Plant Line Value: WS
  misc_feature: MA Experiment 20000169 PARAMETER Experiment Name: At_100uM_ABA_P Parameter: Timepoint (hr) Value: 6
  misc_feature: MA Experiment 20000169 PARAMETER Experiment Name: At_100uM_ABA_P Parameter: Tissue Value: Aerial
  misc_feature: MA Experiment 20000169 PARAMETER Experiment Name: At_100uM_ABA_P Parameter: Treatment Value: 100uM ABA vs. No Treatment
  misc_feature: MA Experiment ID: 20000185 Result: Down-regulated in Transcription
  misc_feature: MA Experiment 20000185 PARAMETER Experiment Name: At_Roots__P Parameter: Age (day) Value: 7 vs. 21
  misc_feature: MA Experiment 20000185 PARAMETER Experiment Name: At_Roots__P Parameter: Organism Value: A. thaliana
  misc_feature: MA Experiment 20000185 PARAMETER Experiment Name: At_Roots__P Parameter: Tissue Value: Roots vs. Whole Plant
  misc_feature: MA Experiment ID: 20000224 Result: Up-regulated in Transcription
  misc_feature: MA Experiment ID: 20000264 Result: Up-regulated in Transcription
  misc_feature: MA Experiment 20000264 PARAMETER Experiment Name: At_Open_Flower_P Parameter: Age (day) Value: 21
  misc_feature: MA Experiment 20000264 PARAMETER Experiment Name: At_Open_Flower_P Parameter: Plant Line Value: WS
  misc_feature: MA Experiment 20000264 PARAMETER Experiment Name: At_Open_Flower_P Parameter: Tissue Value: Open Flower vs. Whole Plant
  misc_feature: MA Experiment ID: 20000265 Result: Up-regulated in Transcription
  misc_feature: MA Experiment 20000265 PARAMETER Experiment Name: At_Open_Flower_P Parameter: Age (day) Value: 21
  misc_feature: MA Experiment 20000265 PARAMETER Experiment Name: At_Open_Flower_P Parameter: Plant Line Value: WS
  misc_feature: MA Experiment 20000265 PARAMETER Experiment Name: At_Open_Flower_P Parameter: Tissue Value: Closed Flower vs. Whole Plant
  misc_feature: MA Experiment ID: 20000267 Result: Up-regulated in Transcription
  misc_feature: MA Experiment 20000267 PARAMETER Experiment Name: At_Drought_P Parameter: Age (day) Value: 7
  misc_feature: MA Experiment 20000267 PARAMETER Experiment Name: At_Drought_P Parameter: Organism Value: A. thaliana
  misc_feature: MA Experiment 20000267 PARAMETER Experiment Name: At_Drought_P Parameter: Plant Line Value: WS
  misc_feature: MA Experiment 20000267 PARAMETER Experiment Name: At_Drought_P Parameter: Timepoint (hr) Value: 6
  misc_feature: MA Experiment 20000267 PARAMETER Experiment Name: At_Drought_P Parameter: Tissue Value: Whole Plant
  misc_feature: MA Experiment 20000267 PARAMETER Experiment Name: At_Drought_P Parameter: Treatment Value: Drought vs. No Drought
  misc_feature: MA Experiment ID: 20000268 Result: Up-regulated in Transcription
  misc_feature: MA Experiment 20000268 PARAMETER Experiment Name: At_100mM_NaCl__P Parameter: Age (day) Value: 14
  misc_feature: MA Experiment 20000268 PARAMETER Experiment Name: At_100mM_NaCl__P Parameter: Organism Value: A. thaliana
  misc_feature: MA Experiment 20000268 PARAMETER Experiment Name: At_100mM_NaCl__P Parameter: Plant Line Value: WS
  misc_feature: MA Experiment 20000268 PARAMETER Experiment Name: At_100mM_NaCl__P Parameter: Timepoint (hr) Value: 6
  misc_feature: MA Experiment 20000268 PARAMETER Experiment Name: At_100mM_NaCl__P Parameter: Tissue Value: Whole Plant
  misc_feature: MA Experiment 20000268 PARAMETER Experiment Name: At_100mM_NaCl__P Parameter: Treatment Value: 100mM NaCl vs. No Treatment
  misc_feature: MA Experiment ID: 20000286 Result: Up-regulated in Transcription
  misc_feature: MA Experiment 20000286 PARAMETER Experiment Name: At_Open_Flower_P Parameter: Age (day) Value: 21
  misc_feature: MA Experiment 20000286 PARAMETER Experiment Name: At_Open_Flower_P Parameter: Plant Line Value: WS
  misc_feature: MA Experiment 20000286 PARAMETER Experiment Name: At_Open_Flower_P Parameter: Tissue Value: Half Open vs. Whole Plant
  misc_feature: MA Experiment ID: 20000436 Result: Up-regulated in Transcription
  misc_feature: MA Experiment 20000436 PARAMETER Experiment Name: At_Drought_P Parameter: Age (day) Value: 7
  misc_feature: MA Experiment 20000436 PARAMETER Experiment Name: At_Drought_P Parameter: Organism Value: A. thaliana
  misc_feature: MA Experiment 20000436 PARAMETER Experiment Name: At_Drought_P Parameter: Plant Line Value: WS
  misc_feature: MA Experiment 20000436 PARAMETER Experiment Name: At_Drought_P Parameter: Timepoint (hr) Value: 12
  misc_feature: MA Experiment 20000436 PARAMETER Experiment Name: At_Drought_P Parameter: Tissue Value: Whole Plant
  misc_feature: MA Experiment 20000436 PARAMETER Experiment Name: At_Drought_P Parameter: Treatment Value: Drought vs. No Drought
  misc_feature: MA Experiment ID: 20000437 Result: Up-regulated in Transcription
  misc_feature: MA Experiment 20000437 PARAMETER Experiment Name: At_Drought_P Parameter: Age (day) Value: 8
  misc_feature: MA Experiment 20000437 PARAMETER Experiment Name: At_Drought_P Parameter: Organism Value: A. thaliana
  misc_feature: MA Experiment 20000437 PARAMETER Experiment Name: At_Drought_P Parameter: Plant Line Value: WS
  misc_feature: MA Experiment 20000437 PARAMETER Experiment Name: At_Drought_P Parameter: Timepoint (hr) Value: 24
  misc_feature: MA Experiment 20000437 PARAMETER Experiment Name: At_Drought_P Parameter: Tissue Value: Whole Plant
  misc_feature: MA Experiment 20000437 PARAMETER Experiment Name: At_Drought_P Parameter: Treatment Value: Drought vs. No Drought
  misc_feature: MA Experiment ID: 20000438 Result: Up-regulated in Transcription
  misc_feature: MA Experiment 20000438 PARAMETER Experiment Name: At_Shoots__P Parameter: Age (day) Value: 14
  misc_feature: MA Experiment 20000438 PARAMETER Experiment Name: At_Shoots__P Parameter: Tissue Value: Shoots vs. Whole Plant
  misc_feature: MA Experiment ID: 20000439 Result: Down-regulated in Transcription
  misc_feature: MA Experiment 20000439 PARAMETER Experiment Name: At_Roots__P Parameter: Age (day) Value: 14 vs. 21
  misc_feature: MA Experiment 20000439 PARAMETER Experiment Name: At_Roots__P Parameter: Organism Value: A. thaliana
  misc_feature: MA Experiment 20000439 PARAMETER Experiment Name: At_Roots__P Parameter: Tissue Value: Roots vs. Whole Plant
  misc_feature: MA Experiment ID: 20000453 Result: Up-regulated in Transcription
  misc_feature: MA Experiment 20000453 PARAMETER Experiment Name: At_100uM_ABA_P Parameter: Age (day) Value: 15
  misc_feature: MA Experiment 20000453 PARAMETER Experiment Name: At_100uM_ABA_P Parameter: Organism Value: A. thaliana
  misc_feature: MA Experiment 20000453 PARAMETER Experiment Name: At_100uM_ABA_P Parameter: Plant Line Value: WS
  misc_feature: MA Experiment 20000453 PARAMETER Experiment Name: At_100uM_ABA_P Parameter: Timepoint (hr) Value: 24
  misc_feature: MA Experiment 20000453 PARAMETER Experiment Name: At_100uM_ABA_P Parameter: Tissue Value: Aerial
  misc_feature: MA Experiment 20000453 PARAMETER Experiment Name: At_100uM_ABA_P Parameter: Treatment Value: 100uM ABA vs. No Treatment
  misc_feature: MA Experiment ID: 20000527 Result: Up-regulated in Transcription
  misc_feature: MA Experiment 20000527 PARAMETER Experiment Name: At_10percent_PEG_P Parameter: Age (day) Value: 20
  misc_feature: MA Experiment 20000527 PARAMETER Experiment Name: At_10percent_PEG_P Parameter: Organism Value: A. thaliana
  misc_feature: MA Experiment 20000527 PARAMETER Experiment Name: At_10percent_PEG_P Parameter: Plant Line Value: WS
  misc_feature: MA Experiment 20000527 PARAMETER Experiment Name: At_10percent_PEG_P Parameter: Timepoint (day) Value: 20
  misc_feature: MA Experiment 20000527 PARAMETER Experiment Name: At_10percent_PEG_P Parameter: Tissue Value: Whole Plant
  misc_feature: MA Experiment 20000527 PARAMETER Experiment Name: At_10percent_PEG_P Parameter: Treatment Value: 10percent PEG vs. No Treatment
  misc_feature: MA Experiment ID: 20000573 Result: Down-regulated in Transcription
  misc_feature: MA Experiment 20000573 PARAMETER Experiment Name: At_100uM_ABA_Mutants__P Parameter: Organism Value: A. thaliana
  misc_feature: MA Experiment 20000573 PARAMETER Experiment Name: At_100uM_ABA_Mutants__P Parameter: Plant Line Value: CS22 vs. Ler wt
  misc_feature: MA Experiment 20000573 PARAMETER Experiment Name: At_100uM_ABA_Mutants__P Parameter: Timepoint (hr) Value: N/A
  misc_feature: MA Experiment 20000573 PARAMETER Experiment Name: At_100uM_ABA_Mutants__P Parameter: Tissue Value: Whole Plant
  misc_feature: MA Experiment 20000573 PARAMETER Experiment Name: At_100uM_ABA_Mutants__P Parameter: Treatment Value: None
  misc_feature: MA Experiment ID: 20000794 Result: Up-regulated in Transcription
  misc_feature: MA Experiment 20000794 PARAMETER Experiment Name: At_Petals_P Parameter: Age (day) Value: 23-25 days
  misc_feature: MA Experiment 20000794 PARAMETER Experiment Name: At_Petals_P Parameter: Plant Line Value: WS
  misc_feature: MA Experiment 20000794 PARAMETER Experiment Name: At_Petals_P Parameter: Tissue Value: Petals vs. Whole plant
  misc_feature: MA Experiment ID: 20001248 Result: Down-regulated in Transcription
  misc_feature: MA Experiment 20001248 PARAMETER Experiment Name: At_Far-red-induction_P Parameter: Age (day) Value: 7
  misc_feature: MA Experiment 20001248 PARAMETER Experiment Name: At_Far-red-induction_P Parameter: Light Value: Far-red vs. White
  misc_feature: MA Experiment 20001248 PARAMETER Experiment Name: At_Far-red-induction_P Parameter: Organism Value: A. thaliana
  misc_feature: MA Experiment 20001248 PARAMETER Experiment Name: At_Far-red-induction_P Parameter: Plant Line Value: Columbia
  misc_feature: MA Experiment 20001248 PARAMETER Experiment Name: At_Far-red-induction_P Parameter: Timepoint (hr) Value: 4
  misc_feature: MA Experiment 20001248 PARAMETER Experiment Name: At_Far-red-induction_P Parameter: Tissue Value: Whole Plant
  misc_feature: MA Experiment ID: 20001554 Result: Up-regulated in Transcription
  misc_feature: MA Experiment 20001554 PARAMETER Experiment Name: At_Drought_Soil_Dry_P Parameter: Age (day) Value: 21
  misc_feature: MA Experiment 20001554 PARAMETER Experiment Name: At_Drought_Soil_Dry_P Parameter: Organism Value: A. thaliana
  misc_feature: MA Experiment 20001554 PARAMETER Experiment Name: At_Drought_Soil_Dry_P Parameter: Plant Line Value: WS
  misc_feature: MA Experiment 20001554 PARAMETER Experiment Name: At_Drought_Soil_Dry_P Parameter: Post Timepoint (hr) Value: None
  misc_feature: MA Experiment 20001554 PARAMETER Experiment Name: At_Drought_Soil_Dry_P Parameter: Post-Treatment Value: None
  misc_feature: MA Experiment 20001554 PARAMETER Experiment Name: At_Drought_Soil_Dry_P Parameter: Timepoint (day) Value: 7
  misc_feature: MA Experiment 20001554 PARAMETER Experiment Name: At_Drought_Soil_Dry_P Parameter: Treatment Value: Drought vs. No Drought
  misc_feature: MA Experiment ID: 20001555 Result: Up-regulated in Transcription
  misc_feature: MA Experiment 20001555 PARAMETER Experiment Name: At_Drought_Soil_Dry_P Parameter: Age (day) Value: 24
  misc_feature: MA Experiment 20001555 PARAMETER Experiment Name: At_Drought_Soil_Dry_P Parameter: Organism Value: A. thaliana
  misc_feature: MA Experiment 20001555 PARAMETER Experiment Name: At_Drought_Soil_Dry_P Parameter: Plant Line Value: WS
  misc_feature: MA Experiment 20001555 PARAMETER Experiment Name: At_Drought_Soil_Dry_P Parameter: Post Timepoint (hr) Value: None
  misc_feature: MA Experiment 20001555 PARAMETER Experiment Name: At_Drought_Soil_Dry_P Parameter: Post-Treatment Value: None
  misc_feature: MA Experiment 20001555 PARAMETER Experiment Name: At_Drought_Soil_Dry_P Parameter: Timepoint (day) Value: 10
  misc_feature: MA Experiment 20001555 PARAMETER Experiment Name: At_Drought_Soil_Dry_P Parameter: Treatment Value: Drought vs. No Drought
  misc_feature: MA Experiment ID: 20001558 Result: Down-regulated in Transcription
  misc_feature: MA Experiment 20001558 PARAMETER Experiment Name: At_Drought_Soil_Dry_P Parameter: Age (day) Value: 27
  misc_feature: MA Experiment 20001558 PARAMETER Experiment Name: At_Drought_Soil_Dry_P Parameter: Organism Value: A. thaliana
  misc_feature: MA Experiment 20001558 PARAMETER Experiment Name: At_Drought_Soil_Dry_P Parameter: Plant Line Value: WS
  misc_feature: MA Experiment 20001558 PARAMETER Experiment Name: At_Drought_Soil_Dry_P Parameter: Post Timepoint (hr) Value: 6
  misc_feature: MA Experiment 20001558 PARAMETER Experiment Name: At_Drought_Soil_Dry_P Parameter: Post-Treatment Value: Re-Water vs. No Drought
  misc_feature: MA Experiment 20001558 PARAMETER Experiment Name: At_Drought_Soil_Dry_P Parameter: Timepoint (day) Value: 13
  misc_feature: MA Experiment 20001558 PARAMETER Experiment Name: At_Drought_Soil_Dry_P Parameter: Treatment Value: Drought vs. No Drought
  misc_feature: MA Experiment ID: 20001757 Result: Down-regulated in Transcription
  misc_feature: MA Experiment 20001757 PARAMETER Experiment Name: At_50mM_NH4NO3_L-to-H_P Parameter: Timepoint (hr) Value: 6
  misc_feature: MA Experiment 20001757 PARAMETER Experiment Name: At_50mM_NH4NO3_L-to-H_P Parameter: Tissue Value: Leaf
  misc_feature: MA Experiment 20001757 PARAMETER Experiment Name: At_50mM_NH4NO3_L-to-H_P Parameter: Treatment Value: 50mM NH4NO3 vs 100mM Mannitol
  misc_feature: MA Experiment ID: 20001904 Result: Up-regulated in Transcription
  misc_feature: MA Experiment 20001904 PARAMETER Experiment Name: At_Drought_Reproduction_P Parameter: Age (day) Value: 37
  misc_feature: MA Experiment 20001904 PARAMETER Experiment Name: At_Drought_Reproduction_P Parameter: Organism Value: A. thaliana
  misc_feature: MA Experiment 20001904 PARAMETER Experiment Name: At_Drought_Reproduction_P Parameter: Plant Line Value: WS
  misc_feature: MA Experiment 20001904 PARAMETER Experiment Name: At_Drought_Reproduction_P Parameter: Timepoint (day) Value: 7
  misc_feature: MA Experiment 20001904 PARAMETER Experiment Name: At_Drought_Reproduction_P Parameter: Tissue Value: Rosettes
  misc_feature: MA Experiment 20001904 PARAMETER Experiment Name: At_Drought_Reproduction_P Parameter: Treatment Value: Drought vs. No Drought
  misc_feature: MA Experiment ID: 20001905 Result: Up-regulated in Transcription
  misc_feature: MA Experiment 20001905 PARAMETER Experiment Name: At_Drought_Reproduction_P Parameter: Age (day) Value: 40
  misc_feature: MA Experiment 20001905 PARAMETER Experiment Name: At_Drought_Reproduction_P Parameter: Organism Value: A. thaliana
  misc_feature: MA Experiment 20001905 PARAMETER Experiment Name: At_Drought_Reproduction_P Parameter: Plant Line Value: WS
  misc_feature: MA Experiment 20001905 PARAMETER Experiment Name: At_Drought_Reproduction_P Parameter: Timepoint (day) Value: 10
  misc_feature: MA Experiment 20001905 PARAMETER Experiment Name: At_Drought_Reproduction_P Parameter: Tissue Value: Rosettes
  misc_feature: MA Experiment 20001905 PARAMETER Experiment Name: At_Drought_Reproduction_P Parameter: Treatment Value: Drought vs. No Drought
  misc_feature: MA Experiment ID: 20001906 Result: Up-regulated in Transcription
  misc_feature: MA Experiment 20001906 PARAMETER Experiment Name: At_Drought_Reproduction_P Parameter: Age (day) Value: 35
  misc_feature: MA Experiment 20001906 PARAMETER Experiment Name: At_Drought_Reproduction_P Parameter: Organism Value: A. thaliana
  misc_feature: MA Experiment 20001906 PARAMETER Experiment Name: At_Drought_Reproduction_P Parameter: Plant Line Value: WS
  misc_feature: MA Experiment 20001906 PARAMETER Experiment Name: At_Drought_Reproduction_P Parameter: Timepoint (day) Value: 5
  misc_feature: MA Experiment 20001906 PARAMETER Experiment Name: At_Drought_Reproduction_P Parameter: Tissue Value: Siliques
  misc_feature: MA Experiment 20001906 PARAMETER Experiment Name: At_Drought_Reproduction_P Parameter: Treatment Value: Drought vs. No Drought
  misc_feature: MA Experiment ID: 20001911 Result: Up-regulated in Transcription
  misc_feature: MA Experiment 20001911 PARAMETER Experiment Name: At_Drought_Reproduction_P Parameter: Age (day) Value: 40
  misc_feature: MA Experiment 20001911 PARAMETER Experiment Name: At_Drought_Reproduction_P Parameter: Organism Value: A. thaliana
  misc_feature: MA Experiment 20001911 PARAMETER Experiment Name: At_Drought_Reproduction_P Parameter: Plant Line Value: WS
  misc_feature: MA Experiment 20001911 PARAMETER Experiment Name: At_Drought_Reproduction_P Parameter: Timepoint (day) Value: 10
  misc_feature: MA Experiment 20001911 PARAMETER Experiment Name: At_Drought_Reproduction_P Parameter: Tissue Value: Flowers
  misc_feature: MA Experiment 20001911 PARAMETER Experiment Name: At_Drought_Reproduction_P Parameter: Treatment Value: Drought vs. No Drought
atcgaattttctgccacaaagaattttttgaaaactcagattttttattttgttttcagaacatgattggtgaggcaattgctaaaattaattagtacttatgtgttttatgtttgattttttgattagaaaatggacatttagtccgattcttatttgtttgtgttttttttttgtagacgcaataagctatcttcagcctaaactttctggaaattttcatcattagcaacctgaaattatcttaatttgtatataagcaaaactataaatattagtaaagatggaggagatgtcacctgataatatacatggagtcattttagctgtgtcttcgagtatattcatcggttctagcttcatcatcaagaaaaaaggtcttaagaaggccggtgttagcggcgccagagcaggtgaaggaggatatggatacttatatgaaccttggtggtgggctggaatgataacaatgattgttggggagatagccaattttgcagcatatgcatttgcaccggctattctagtaacacctttgggagctttaagtattattttcagcgcagtgctagcacattttattttggaagagaagttgcatatgtttggtatacttggttgtgtcctctgtgttgttggatctacaacgattgttttacatgctcctcacgagcaaggcattgaatccgtcaagcaagtatggcacctggctactgaaccaggtttccttgcatattctgctgtggtcttggttgtggtgcttgcattgatcttctactacgagccgcgttatgggaagacgcatatgatagtatatgttgggatttgctctttaatgggctctcttacagttatgagtgttaaagctgtggccatcgccataaagctgactttttcagggatgaaccagttcaagtactttcatgcatggatattcatcattgtagtgaccatatgttgcattttgcaaatcaactacttgaacaaggctctggataatttcaacacagcagtcatatctccagtgtactatgttatgtttacaacattcaccatcttagctagtatgatcatgttcaaggactgggcttctcaaagtggattgcaaattgctaccgagctatgtggctttgtgaccattttgtcaggaacttttcttctccacaagacaaaagacatgggaaacagtaccagcttacgcggctccacatcacactcgcctagagacactcctgtcttcataaactcaggttccagtcgcagctcccattccactagacctgcaatactataatcacacggctacgatagtagatcatctaacggtctagaacgaggcaacacgacttcaaaagcctcaaagagaactttttttgggtgacaaatgagaaaaaaaacagagcaaatggggtttaattaaggctataatttgttttctggataacggaaggtttagtgaatgatttgttagggatactatttgattgattgcttcatgttgatttgtttctaatattttttgtttgtttctcatatgagatataaagaaagtttt

SEQ ID NO: 25424 - protein, 336 aa, Arabidopsis thaliana
  peptide (1)..(336): Ceres Seq. ID no. 12357559
  misc_feature (4)..(303): Pfam Name: Protein of unknown function (DUF803) Pfam Description: Protein of unknown function (DUF803)
  misc_feature (4)..(298): Homolog of NCBI NO: 30681265 NR Description: expressed protein [Arabidopsis thaliana]
  misc_feature (4)..(299): Homolog of NCBI NO: 25406128 NR Description: unknown protein F17M19.5 [imported] - Arabidopsis
  misc_feature (4)..(305): Homolog of NCBI NO: 18409942 NR Description: expressed protein
  misc_feature (1)..(146): Homolog of NCBI NO: 7485690 NR Description: hypothetical protein F18A5.190 - Arabidopsis
  misc_feature (1)..(299): Homolog of NCBI NO: 20161440 NR Description: B1065E10.15 [Oryza sativa (japonica
  misc_feature (4)..(308): Homolog of NCBI NO: 18399280 NR Description: expressed protein
  misc_feature (4)..(307): Homolog of NCBI NO: 21742149 NR Description: OSJNBa0069D17.4 [Oryza sativa (japonica
  misc_feature (1)..(334): Homolog of NCBI NO: 15229534 NR Description: unknown protein; protein id: At3g23870.1
  misc_feature (4)..(336): Homolog of NCBI NO: 21593618 NR Description: unknown [Arabidopsis thaliana]
  misc_feature (1)..(336): Homolog of NCBI NO: 18414079 NR Description: expressed protein
MEEMSPDNIHGVILAVSSSIFIGSSFIIKKKGLKKAGVSGARAGEGGYGYLYEPWWWAGMITMIVGEIANFAAYAFAPAILVTPLGALSIIFSAVLAHFILEEKLHMFGILGCVLCVVGSTTIVLHAPHEQGIESVKQVWHLATEPGFLAYSAVVLVVVLALIFYYEPRYGKTHMIVYVGICSLMGSLTVMSVKAVAIAIKLTFSGMNQFKYFHAWIFIIVVTICCILQINYLNKALDNFNTAVISPVYYVMFTTFTILASMIMFKDWASQSGLQIATELCGFVTILSGTFLLHKTKDMGNSTSLRGSTSHSPRDTPVFINSGSSRSSHSTRPAIL

SEQ ID NO: 25425 - protein, 333 aa, Arabidopsis thaliana
  peptide (1)..(333): Ceres Seq. ID no. 12357560
  misc_feature (1)..(300): Pfam Name: Protein of unknown function (DUF803) Pfam Description: Protein of unknown function (DUF803)
  misc_feature (1)..(295): Homolog of NCBI NO: 30681265 NR Description: expressed protein [Arabidopsis thaliana]
  misc_feature (1)..(296): Homolog of NCBI NO: 25406128 NR Description: unknown protein F17M19.5 [imported] - Arabidopsis
  misc_feature (1)..(302): Homolog of NCBI NO: 18409942 NR Description: expressed protein
  misc_feature (1)..(143): Homolog of NCBI NO: 7485690 NR Description: hypothetical protein F18A5.190 - Arabidopsis
  misc_feature (1)..(296): Homolog of NCBI NO: 20161440 NR Description: B1065E10.15 [Oryza sativa (japonica
  misc_feature (1)..(305): Homolog of NCBI NO: 18399280 NR Description: expressed protein
  misc_feature (1)..(304): Homolog of NCBI NO: 21742149 NR Description: OSJNBa0069D17.4 [Oryza sativa (japonica
  misc_feature (1)..(331): Homolog of NCBI NO: 15229534 NR Description: unknown protein; protein id: At3g23870.1
  misc_feature (1)..(333): Homolog of NCBI NO: 21593618 NR Description: unknown [Arabidopsis thaliana]
  misc_feature (1)..(333): Homolog of NCBI NO: 18414079 NR Description: expressed protein
MSPDNIHGVILAVSSSIFIGSSFIIKKKGLKKAGVSGARAGEGGYGYLYEPWWWAGMITMIVGEIANFAAYAFAPAILVTPLGALSIIFSAVLAHFILEEKLHMFGILGCVLCVVGSTTIVLHAPHEQGIESVKQVWHLATEPGFLAYSAVVLVVVLALIFYYEPRYGKTHMIVYVGICSLMGSLTVMSVKAVAIAIKLTFSGMNQFKYFHAWIFIIVVTICCILQINYLNKALDNFNTAVISPVYYVMFTTFTILASMIMFKDWASQSGLQIATELCGFVTILSGTFLLHKTKDMGNSTSLRGSTSHSPRDTPVFINSGSSRSSHSTRPAIL

SEQ ID NO: 25426 - protein, 277 aa, Arabidopsis thaliana
  peptide (1)..(277): Ceres Seq. ID no. 12357561
  misc_feature (1)..(244): Pfam Name: Protein of unknown function (DUF803) Pfam Description: Protein of unknown function (DUF803)
  misc_feature (1)..(239): Homolog of NCBI NO: 30681265 NR Description: expressed protein [Arabidopsis thaliana]
  misc_feature (1)..(240): Homolog of NCBI NO: 25406128 NR Description: unknown protein F17M19.5 [imported] - Arabidopsis
  misc_feature (1)..(246): Homolog of NCBI NO: 18409942 NR Description: expressed protein
  misc_feature (1)..(87): Homolog of NCBI NO: 7485690 NR Description: hypothetical protein F18A5.190 - Arabidopsis
  misc_feature (1)..(240): Homolog of NCBI NO: 20161440 NR Description: B1065E10.15 [Oryza sativa (japonica
  misc_feature (1)..(249): Homolog of NCBI NO: 18399280 NR Description: expressed protein
  misc_feature (1)..(248): Homolog of NCBI NO: 21742149 NR Description: OSJNBa0069D17.4 [Oryza sativa (japonica
  misc_feature (1)..(275): Homolog of NCBI NO: 15229534 NR Description: unknown protein; protein id: At3g23870.1
  misc_feature (1)..(277): Homolog of NCBI NO: 21593618 NR Description: unknown [Arabidopsis thaliana]
  misc_feature (1)..(277): Homolog of NCBI NO: 18414079 NR Description: expressed protein
MITMIVGEIANFAAYAFAPAILVTPLGALSIIFSAVLAHFILEEKLHMFGILGCVLCVVGSTTIVLHAPHEQGIESVKQVWHLATEPGFLAYSAVVLVVVLALIFYYEPRYGKTHMIVYVGICSLMGSLTVMSVKAVAIAIKLTFSGMNQFKYFHAWIFIIVVTICCILQINYLNKALDNFNTAVISPVYYVMFTTFTILASMIMFKDWASQSGLQIATELCGFVTILSGTFLLHKTKDMGNSTSLRGSTSHSPRDTPVFINSGSSRSSHSTRPAIL

SEQ ID NO: 25427 - DNA, 1643 bp, Arabidopsis thaliana
  misc_feature (1)..(1643): Ceres Seq. ID no. 13487589
  misc_feature: MA Experiment ID: 108501 Result: Up-regulated in Transcription
  misc_feature: MA Experiment 108501 PARAMETER Experiment Name: At_ap2_floral_buds_cDNA_P Parameter: Plant Line Value: ap2 (Ler.)
  misc_feature: MA Experiment 108501 PARAMETER Experiment Name: At_ap2_floral_buds_cDNA_P Parameter: Tissue Value: Closed Flower
  misc_feature: MA Experiment ID: 108573 Result: Up-regulated in Transcription
  misc_feature: MA Experiment 108573 PARAMETER Experiment Name: At_Drought_cDNA_P Parameter: Timepoint (hr) Value: 6
  misc_feature: MA Experiment 108573 PARAMETER Experiment Name: At_Drought_cDNA_P Parameter: Tissue Value: Aerial
  misc_feature: MA Experiment 108573 PARAMETER Experiment Name: At_Drought_cDNA_P Parameter: Treatment Value: Drought vs. No Drought
  misc_feature: MA Experiment ID: 108667 Result: Down-regulated in Transcription
  misc_feature: MA Experiment 108667 PARAMETER Experiment Name: At_2mM_SA_cDNA_P Parameter: Plant Line Value: WS
  misc_feature: MA Experiment 108667 PARAMETER Experiment Name: At_2mM_SA_cDNA_P Parameter: Timepoint (hr) Value: 1
  misc_feature: MA Experiment 108667 PARAMETER Experiment Name: At_2mM_SA_cDNA_P Parameter: Treatment Value: 2mM SA vs. No Treatment
  misc_feature: MA Experiment ID: 108668 Result: Down-regulated in Transcription
  misc_feature: MA Experiment 108668 PARAMETER Experiment Name: At_2mM_SA_cDNA_P Parameter: Plant Line Value: WS
  misc_feature: MA Experiment 108668 PARAMETER Experiment Name: At_2mM_SA_cDNA_P Parameter: Timepoint (hr) Value: 6
  misc_feature: MA Experiment 108668 PARAMETER Experiment Name: At_2mM_SA_cDNA_P Parameter: Treatment Value: 2mM SA vs. No Treatment
  misc_feature: MA Experiment ID: 20000068 Result: Down-regulated in Transcription
  misc_feature: MA Experiment ID: 20000090 Result: Down-regulated in Transcription
  misc_feature: MA Experiment ID: 20000113 Result: Down-regulated in Transcription
  misc_feature: MA Experiment 20000113 PARAMETER Experiment Name: At_42deg_Heat_cDNA_P Parameter: Temperature (deg C) Value: 42 vs. 22
  misc_feature: MA Experiment 20000113 PARAMETER Experiment Name: At_42deg_Heat_cDNA_P Parameter: Timepoint (hr) Value: 8
  misc_feature: MA Experiment 20000113 PARAMETER Experiment Name: At_42deg_Heat_cDNA_P Parameter: Tissue Value: Aerial
  misc_feature: MA Experiment ID: 20000182 Result: Down-regulated in Transcription
  misc_feature: MA Experiment 20000182 PARAMETER Experiment Name: At_2mM_SA_P Parameter: Age (day) Value: 14
  misc_feature: MA Experiment 20000182 PARAMETER Experiment Name: At_2mM_SA_P Parameter: Organism Value: A. thaliana
  misc_feature: MA Experiment 20000182 PARAMETER Experiment Name: At_2mM_SA_P Parameter: Plant Line Value: WS
  misc_feature: MA Experiment 20000182 PARAMETER Experiment Name: At_2mM_SA_P Parameter: Timepoint (hr) Value: 6
  misc_feature: MA Experiment 20000182 PARAMETER Experiment Name: At_2mM_SA_P Parameter: Tissue Value: Aerial
  misc_feature: MA Experiment 20000182 PARAMETER Experiment Name: At_2mM_SA_P Parameter: Treatment Value: 2mM SA vs. No Treatment
  misc_feature: MA Experiment ID: 20000234 Result: Up-regulated in Transcription
  misc_feature: MA Experiment 20000234 PARAMETER Experiment Name: At_Siliques_P Parameter: Age (day) Value: 21
  misc_feature: MA Experiment 20000234 PARAMETER Experiment Name: At_Siliques_P Parameter: Organism Value: A. thaliana
  misc_feature: MA Experiment 20000234 PARAMETER Experiment Name: At_Siliques_P Parameter: Plant Line Value: WS
  misc_feature: MA Experiment 20000234 PARAMETER Experiment Name: At_Siliques_P Parameter: Tissue Value: Less Than 5mm Siliques vs. Whole Plant
  misc_feature: MA Experiment ID: 20000264 Result: Up-regulated in Transcription
  misc_feature: MA Experiment 20000264 PARAMETER Experiment Name: At_Open_Flower_P Parameter: Age (day) Value: 21
  misc_feature: MA Experiment 20000264 PARAMETER Experiment Name: At_Open_Flower_P Parameter: Plant Line Value: WS
  misc_feature: MA Experiment 20000264 PARAMETER Experiment Name: At_Open_Flower_P Parameter: Tissue Value: Open Flower vs. Whole Plant
  misc_feature: MA Experiment ID: 20000265 Result: Up-regulated in Transcription
  misc_feature: MA Experiment 20000265 PARAMETER Experiment Name: At_Open_Flower_P Parameter: Age (day) Value: 21
  misc_feature: MA Experiment 20000265 PARAMETER Experiment Name: At_Open_Flower_P Parameter: Plant Line Value: WS
  misc_feature: MA Experiment 20000265 PARAMETER Experiment Name: At_Open_Flower_P Parameter: Tissue Value: Closed Flower vs. Whole Plant
  misc_feature: MA Experiment ID: 20000267 Result: Up-regulated in Transcription
  misc_feature: MA Experiment 20000267 PARAMETER Experiment Name: At_Drought_P Parameter: Age (day) Value: 7
  misc_feature: MA Experiment 20000267 PARAMETER Experiment Name: At_Drought_P Parameter: Organism Value: A. thaliana
  misc_feature: MA Experiment 20000267 PARAMETER Experiment Name: At_Drought_P Parameter: Plant Line Value: WS
  misc_feature: MA Experiment 20000267 PARAMETER Experiment Name: At_Drought_P Parameter: Timepoint (hr) Value: 6
  misc_feature: MA Experiment 20000267 PARAMETER Experiment Name: At_Drought_P Parameter: Tissue Value: Whole Plant
  misc_feature: MA Experiment 20000267 PARAMETER Experiment Name: At_Drought_P Parameter: Treatment Value: Drought vs. No Drought
  misc_feature: MA Experiment ID: 20000286 Result: Up-regulated in Transcription
  misc_feature: MA Experiment 20000286 PARAMETER Experiment Name: At_Open_Flower_P Parameter: Age (day) Value: 21
  misc_feature: MA Experiment 20000286 PARAMETER Experiment Name: At_Open_Flower_P Parameter: Plant Line Value: WS
  misc_feature: MA Experiment 20000286 PARAMETER Experiment Name: At_Open_Flower_P Parameter: Tissue Value: Half Open vs. Whole Plant
  misc_feature: MA Experiment ID: 20000436 Result: Up-regulated in Transcription
  misc_feature: MA Experiment 20000436 PARAMETER Experiment Name: At_Drought_P Parameter: Age (day) Value: 7
  misc_feature: MA Experiment 20000436 PARAMETER Experiment Name: At_Drought_P Parameter: Organism Value: A. thaliana
  misc_feature: MA Experiment 20000436 PARAMETER Experiment Name: At_Drought_P Parameter: Plant Line Value: WS
  misc_feature: MA Experiment 20000436 PARAMETER Experiment Name: At_Drought_P Parameter: Timepoint (hr) Value: 12
  misc_feature: MA Experiment 20000436 PARAMETER Experiment Name: At_Drought_P Parameter: Tissue Value: Whole Plant
  misc_feature: MA Experiment 20000436 PARAMETER Experiment Name: At_Drought_P Parameter: Treatment Value: Drought vs. No Drought
  misc_feature: MA Experiment ID: 20000437 Result: Up-regulated in Transcription
  misc_feature: MA Experiment 20000437 PARAMETER Experiment Name: At_Drought_P Parameter: Age (day) Value: 8
  misc_feature: MA Experiment 20000437 PARAMETER Experiment Name: At_Drought_P Parameter: Organism Value: A. thaliana
  misc_feature: MA Experiment 20000437 PARAMETER Experiment Name: At_Drought_P Parameter: Plant Line Value: WS
  misc_feature: MA Experiment 20000437 PARAMETER Experiment Name: At_Drought_P Parameter: Timepoint (hr) Value: 24
  misc_feature: MA Experiment 20000437 PARAMETER Experiment Name: At_Drought_P Parameter: Tissue Value: Whole Plant
  misc_feature: MA Experiment 20000437 PARAMETER Experiment Name: At_Drought_P Parameter: Treatment Value: Drought vs. No Drought
  misc_feature: MA Experiment ID: 20000438 Result: Down-regulated in Transcription
  misc_feature: MA Experiment 20000438 PARAMETER Experiment Name: At_Shoots__P Parameter: Age (day) Value: 14
  misc_feature: MA Experiment 20000438 PARAMETER Experiment Name: At_Shoots__P Parameter: Tissue Value: Shoots vs. Whole Plant
  misc_feature: MA Experiment ID: 20000453 Result: Up-regulated in Transcription
  misc_feature: MA Experiment 20000453 PARAMETER Experiment Name: At_100uM_ABA_P Parameter: Age (day) Value: 15
  misc_feature: MA Experiment 20000453 PARAMETER Experiment Name: At_100uM_ABA_P Parameter: Organism Value: A. thaliana
  misc_feature: MA Experiment 20000453 PARAMETER Experiment Name: At_100uM_ABA_P Parameter: Plant Line Value: WS
  misc_feature: MA Experiment 20000453 PARAMETER Experiment Name: At_100uM_ABA_P Parameter: Timepoint (hr) Value: 24
  misc_feature: MA Experiment 20000453 PARAMETER Experiment Name: At_100uM_ABA_P Parameter: Tissue Value: Aerial
  misc_feature: MA Experiment 20000453 PARAMETER Experiment Name: At_100uM_ABA_P Parameter: Treatment Value: 100uM ABA vs. No Treatment
  misc_feature: MA Experiment ID: 20001248 Result: Down-regulated in Transcription
  misc_feature: MA Experiment 20001248 PARAMETER Experiment Name: At_Far-red-induction_P Parameter: Age (day) Value: 7
  misc_feature: MA Experiment 20001248 PARAMETER Experiment Name: At_Far-red-induction_P Parameter: Light Value: Far-red vs. White
  misc_feature: MA Experiment 20001248 PARAMETER Experiment Name: At_Far-red-induction_P Parameter: Organism Value: A. thaliana
  misc_feature: MA Experiment 20001248 PARAMETER Experiment Name: At_Far-red-induction_P Parameter: Plant Line Value: Columbia
  misc_feature: MA Experiment 20001248 PARAMETER Experiment Name: At_Far-red-induction_P Parameter: Timepoint (hr) Value: 4
  misc_feature: MA Experiment 20001248 PARAMETER Experiment Name: At_Far-red-induction_P Parameter: Tissue Value: Whole Plant
  misc_feature: MA Experiment ID: 20001504 Result: Up-regulated in Transcription
  misc_feature: MA Experiment 20001504 PARAMETER Experiment Name: At_Far-red-enriched_P Parameter: Age (day) Value: 10
  misc_feature: MA Experiment 20001504 PARAMETER Experiment Name: At_Far-red-enriched_P Parameter: Light Value: Far-red enriched vs. White
  misc_feature: MA Experiment 20001504 PARAMETER Experiment Name: At_Far-red-enriched_P Parameter: Organism Value: A. thaliana
  misc_feature: MA Experiment 20001504 PARAMETER Experiment Name: At_Far-red-enriched_P Parameter: Plant Line Value: Columbia
  misc_feature: MA Experiment 20001504 PARAMETER Experiment Name: At_Far-red-enriched_P Parameter: Timepoint (day) Value: 6
  misc_feature: MA Experiment 20001504 PARAMETER Experiment Name: At_Far-red-enriched_P Parameter: Tissue Value: Whole Plant
  misc_feature: MA Experiment ID: 20001554 Result: Up-regulated in Transcription
  misc_feature: MA Experiment 20001554 PARAMETER Experiment Name: At_Drought_Soil_Dry_P Parameter: Age (day) Value: 21
  misc_feature: MA Experiment 20001554 PARAMETER Experiment Name: At_Drought_Soil_Dry_P Parameter: Organism Value: A. thaliana
  misc_feature: MA Experiment 20001554 PARAMETER Experiment Name: At_Drought_Soil_Dry_P Parameter: Plant Line Value: WS
  misc_feature: MA Experiment 20001554 PARAMETER Experiment Name: At_Drought_Soil_Dry_P Parameter: Post Timepoint (hr) Value: None
  misc_feature: MA Experiment 20001554 PARAMETER Experiment Name: At_Drought_Soil_Dry_P Parameter: Post-Treatment Value: None
  misc_feature: MA Experiment 20001554 PARAMETER Experiment Name: At_Drought_Soil_Dry_P Parameter: Timepoint (day) Value: 7
  misc_feature: MA Experiment 20001554 PARAMETER Experiment Name: At_Drought_Soil_Dry_P Parameter: Treatment Value: Drought vs. No Drought
  misc_feature: MA Experiment ID: 20001557 Result: Up-regulated in Transcription
  misc_feature: MA Experiment 20001557 PARAMETER Experiment Name: At_Drought_Soil_Dry_P Parameter: Age (day) Value: 27
  misc_feature: MA Experiment 20001557 PARAMETER Experiment Name: At_Drought_Soil_Dry_P Parameter: Organism Value: A. thaliana
  misc_feature: MA Experiment 20001557 PARAMETER Experiment Name: At_Drought_Soil_Dry_P Parameter: Plant Line Value: WS
  misc_feature: MA Experiment 20001557 PARAMETER Experiment Name: At_Drought_Soil_Dry_P Parameter: Post Timepoint (hr) Value: 3
  misc_feature: MA Experiment 20001557 PARAMETER Experiment Name: At_Drought_Soil_Dry_P Parameter: Post-Treatment Value: Re-Water vs. No Drought
  misc_feature: MA Experiment 20001557 PARAMETER Experiment Name: At_Drought_Soil_Dry_P Parameter: Timepoint (day) Value: 13
  misc_feature: MA Experiment 20001557 PARAMETER Experiment Name: At_Drought_Soil_Dry_P Parameter: Treatment Value: Drought vs. No Drought
  misc_feature: MA Experiment ID: 20001560 Result: Up-regulated in Transcription
  misc_feature: MA Experiment 20001560 PARAMETER Experiment Name: At_Drought_Soil_Dry_P Parameter: Age (day) Value: 28
  misc_feature: MA Experiment 20001560 PARAMETER Experiment Name: At_Drought_Soil_Dry_P Parameter: Organism Value: A. thaliana
  misc_feature: MA Experiment 20001560 PARAMETER Experiment Name: At_Drought_Soil_Dry_P Parameter: Plant Line Value: WS
  misc_feature: MA Experiment 20001560 PARAMETER Experiment Name: At_Drought_Soil_Dry_P Parameter: Post Timepoint (hr) Value: None
  misc_feature: MA Experiment 20001560 PARAMETER Experiment Name: At_Drought_Soil_Dry_P Parameter: Post-Treatment Value: None
  misc_feature: MA Experiment 20001560 PARAMETER Experiment Name: At_Drought_Soil_Dry_P Parameter: Timepoint (day) Value: 14
  misc_feature: MA Experiment 20001560 PARAMETER Experiment Name: At_Drought_Soil_Dry_P Parameter: Treatment Value: Drought vs. No Drought
  misc_feature: MA Experiment ID: 20001911 Result: Down-regulated in Transcription
  misc_feature: MA Experiment 20001911 PARAMETER Experiment Name: At_Drought_Reproduction_P Parameter: Age (day) Value: 40
  misc_feature: MA Experiment 20001911 PARAMETER Experiment Name: At_Drought_Reproduction_P Parameter: Organism Value: A. thaliana
  misc_feature: MA Experiment 20001911 PARAMETER Experiment Name: At_Drought_Reproduction_P Parameter: Plant Line Value: WS
  misc_feature: MA Experiment 20001911 PARAMETER Experiment Name: At_Drought_Reproduction_P Parameter: Timepoint (day) Value: 10
  misc_feature: MA Experiment 20001911 PARAMETER Experiment Name: At_Drought_Reproduction_P Parameter: Tissue Value: Flowers
  misc_feature: MA Experiment 20001911 PARAMETER Experiment Name: At_Drought_Reproduction_P Parameter: Treatment Value: Drought vs. No Drought
aaactgactatgaaagcggaaaaagttatggagagagagatcgagacaacgccaatagagcctcttagcccaatgtcacatatgctaagttcgccaaatttcttcattgtcataacttttgggtttaaaactcgatgcaaccgatcggcctttgttgatggcatcaacaacacattgatcaatgctcccagattctccagtaaaatggagataaattataagaaaaaaggagaaccggtctggattcctgttaaacttcgagtagatgatcatattattgtgccggatcttgaatattccaacattcaaaatcctgatcagttcgtagaagactatacttcaaacatagctaatattccaatggacatgtccaaacctctttgggaatttcatttactcaacatgaagacatcaaaagcagaatctttggctatagtaaaaatacatcactccattggtgatgggatgtctcttatgtccctactacttgcttgttcacgaaaaatatcagaccctgacgcgctagtttctaataccacggctacaaaaaagccagctgattccatggcttggtggttgtttgttgggttttggtttatgataagagtcaccttcaccactattgttgagttttccaagttaatgcttacagtatgctttttggaagataccaaaaaccctcttatgggtaacccgagtgatggatttcaatcttggaaggttgtccatcggataataagttttgaggatgtcaagttaataaaggacacaatgaacatgaaggtgaatgatgttcttcttggaatgacacaagcaggtctttcaagatatttgagtagcaaatatgatggatcaacggctgagaagaaaaagatcttagaaaaactccgtgttcgtggtgccgtagctataaacttaagaccagcaacaaagatagaggatttggctgatatgatggcgaagggttcaaagtgtagatggggaaacttcataggaacggttatatttccgttgtgggtgaaatcagagaaagatccgttggagtacattcgacgagccaaagctacgatggataggaaaaaaatatctctggaagctttttttttctatggaattattaaattcaccttgaaattttttggaggaaaggcagtagaagcttttggaaagaggatatttggtcacacatcattggcattttcaaatgtgaaaggtcccgatgaagaaataagtttttttcaccatccgatttcatatatcgcaggaagtgcattagttggagcacaagctctcaatatccattttataagctacgtagacaagattgtcatcaatctagctgttgacacaacaacgattcaagatcctaatcgactatgtgatgatatggtggaagcacttgagatcatcaaatctgccacacaaggggaaatatttcacaaaacggaagtttgaaacacatcacctgatgtttgatcagggttatgtaatatataactatatgaagttttgtatttgcaatgaatttttttatggagtatgataaccaaaatatgtggtgaagtgtaagtttgtttgtttggtttgatcttaggtgttttatgaacagttggcaaaatggtaaaagggcataacaaaagatc

SEQ ID NO: 25428 - protein, 484 aa, Arabidopsis thaliana
  peptide (1)..(484): Ceres Seq. ID no. 13487590
  misc_feature (20)..(299): Pfam Name: Condensation domain Pfam Description: Condensation domain
  misc_feature (10)..(473): Homolog of NCBI NO: 15242259 NR Description: hypothetical protein [Arabidopsis thaliana]
  misc_feature (20)..(473): Homolog of NCBI NO: 18416859 NR Description: expressed protein [Arabidopsis thaliana]
  misc_feature (20)..(473): Homolog of NCBI NO: 15229102 NR Description: expressed protein [Arabidopsis thaliana]
  misc_feature (15)..(484): Homolog of NCBI NO: 9759186 NR Description: emb|CAB66399.1~gene_id:K19E1.19~strong similarity
  misc_feature (15)..(484): Homolog of NCBI NO: 30696326 NR Description: expressed protein [Arabidopsis thaliana]
  misc_feature (15)..(484): Homolog of NCBI NO: 26451548 NR Description: unknown protein [Arabidopsis thaliana]
  misc_feature (10)..(484): Homolog of NCBI NO: 15218351 NR Description: expressed protein [Arabidopsis thaliana]
  misc_feature (11)..(484): Homolog of NCBI NO: 30687731 NR Description: hypothetical protein [Arabidopsis thaliana]
  misc_feature (4)..(484): Homolog of NCBI NO: 18421632 NR Description: expressed protein [Arabidopsis thaliana]
  misc_feature (1)..(484): Homolog of NCBI NO: 9758716 NR Description: emb|CAB66398.1~gene_id:MNJ8.9~strong similarity
KLTMKAEKVMEREIETTPIEPLSPMSHMLSSPNFFIVITFGFKTRCNRSAFVDGINNTLINAPRFSSKMEINYKKKGEPVWIPVKLRVDDHIIVPDLEYSNIQNPDQFVEDYTSNIANIPMDMSKPLWEFHLLNMKTSKAESLAIVKIHHSIGDGMSLMSLLLACSRKISDPDALVSNTTATKKPADSMAWWLFVGFWFMIRVTFTTIVEFSKLMLTVCFLEDTKNPLMGNPSDGFQSWKVVHRIISFEDVKLIKDTMNMKVNDVLLGMTQAGLSRYLSSKYDGSTAEKKKILEKLRVRGAVAINLRPATKIEDLADMMAKGSKCRWGNFIGTVIFPLWVKSEKDPLEYIRRAKATMDRKKISLEAFFFYGIIKFTLKFFGGKAVEAFGKRIFGHTSLAFSNVKGPDEEISFFHHPISYIAGSALVGAQALNIHFISYVDKIVINLAVDTTTIQDPNRLCDDMVEALEIIKSATQGEIFHKTEV

SEQ ID NO: 25429 - protein, 481 aa, Arabidopsis thaliana
  peptide (1)..(481): Ceres Seq. ID no. 13487591
  misc_feature (17)..(296): Pfam Name: Condensation domain Pfam Description: Condensation domain
  misc_feature (7)..(470): Homolog of NCBI NO: 15242259 NR Description: hypothetical protein [Arabidopsis thaliana]
  misc_feature (17)..(470): Homolog of NCBI NO: 18416859 NR Description: expressed protein [Arabidopsis thaliana]
  misc_feature (17)..(470): Homolog of NCBI NO: 15229102 NR Description: expressed protein [Arabidopsis thaliana]
  misc_feature (12)..(481): Homolog of NCBI NO: 9759186 NR Description: emb|CAB66399.1~gene_id:K19E1.19~strong similarity
  misc_feature (12)..(481): Homolog of NCBI NO: 30696326 NR Description: expressed protein [Arabidopsis thaliana]
  misc_feature (12)..(481): Homolog of NCBI NO: 26451548 NR Description: unknown protein [Arabidopsis thaliana]
  misc_feature (7)..(481): Homolog of NCBI NO: 15218351 NR Description: expressed protein [Arabidopsis thaliana]
  misc_feature (8)..(481): Homolog of NCBI NO: 30687731 NR Description: hypothetical protein [Arabidopsis thaliana]
  misc_feature (1)..(481): Homolog of NCBI NO: 18421632 NR Description: expressed protein [Arabidopsis thaliana]
  misc_feature (1)..(481): Homolog of NCBI NO: 9758716 NR Description: emb|CAB66398.1~gene_id:MNJ8.9~strong similarity
MKAEKVMEREIETTPIEPLSPMSHMLSSPNFFIVITFGFKTRCNRSAFVDGINNTLINAPRFSSKMEINYKKKGEPVWIPVKLRVDDHIIVPDLEYSNIQNPDQFVEDYTSNIANIPMDMSKPLWEFHLLNMKTSKAESLAIVKIHHSIGDGMSLMSLLLACSRKISDPDALVSNTTATKKPADSMAWWLFVGFWFMIRVTFTTIVEFSKLMLTVCFLEDTKNPLMGNPSDGFQSWKVVHRIISFEDVKLIKDTMNMKVNDVLLGMTQAGLSRYLSSKYDGSTAEKKKILEKLRVRGAVAINLRPATKIEDLADMMAKGSKCRWGNFIGTVIFPLWVKSEKDPLEYIRRAKATMDRKKISLEAFFFYGIIKFTLKFFGGKAVEAFGKRIFGHTSLAFSNVKGPDEEISFFHHPISYIAGSALVGAQALNIHFISYVDKIVINLAVDTTTIQDPNRLCDDMVEALEIIKSATQGEIFHKTEV

SEQ ID NO: 25430 - protein, 475 aa, Arabidopsis thaliana
  peptide (1)..(475): Ceres Seq. ID no. 13487592
  misc_feature (11)..(290): Pfam Name: Condensation domain Pfam Description: Condensation domain
  misc_feature (1)..(464): Homolog of NCBI NO: 15242259 NR Description: hypothetical protein [Arabidopsis thaliana]
  misc_feature (11)..(464): Homolog of NCBI NO: 18416859 NR Description: expressed protein [Arabidopsis thaliana]
  misc_feature (11)..(464): Homolog of NCBI NO: 15229102 NR Description: expressed protein [Arabidopsis thaliana]
  misc_feature (6)..(475): Homolog of NCBI NO: 9759186 NR Description: emb|CAB66399.1~gene_id:K19E1.19~strong similarity
  misc_feature (6)..(475): Homolog of NCBI NO: 30696326 NR Description: expressed protein [Arabidopsis thaliana]
  misc_feature (6)..(475): Homolog of NCBI NO: 26451548 NR Description: unknown protein [Arabidopsis thaliana]
  misc_feature (1)..(475): Homolog of NCBI NO: 15218351 NR Description: expressed protein [Arabidopsis thaliana]
  misc_feature (2)..(475): Homolog of NCBI NO: 30687731 NR Description: hypothetical protein [Arabidopsis thaliana]
  misc_feature (1)..(475): Homolog of NCBI NO: 18421632 NR Description: expressed protein [Arabidopsis thaliana]
  misc_feature (1)..(475): Homolog of NCBI NO: 9758716 NR Description: emb|CAB66398.1~gene_id:MNJ8.9~strong similarity
MEREIETTPIEPLSPMSHMLSSPNFFIVITFGFKTRCNRSAFVDGINNTLINAPRFSSKMEINYKKKGEPVWIPVKLRVDDHIIVPDLEYSNIQNPDQFVEDYTSNIANIPMDMSKPLWEFHLLNMKTSKAESLAIVKIHHSIGDGMSLMSLLLACSRKISDPDALVSNTTATKKPADSMAWWLFVGFWFMIRVTFTTIVEFSKLMLTVCFLEDTKNPLMGNPSDGFQSWKVVHRIISFEDVKLIKDTMNMKVNDVLLGMTQAGLSRYLSSKYDGSTAEKKKILEKLRVRGAVAINLRPATKIEDLADMMAKGSKCRWGNFIGTVIFPLWVKSEKDPLEYIRRAKATMDRKKISLEAFFFYGIIKFTLKFFGGKAVEAFGKRIFGHTSLAFSNVKGPDEEISFFHHPISYIAGSALVGAQALNIHFISYVDKIVINLAVDTTTIQDPNRLCDDMVEALEIIKSATQGEIFHKTEV

SEQ ID NO: 25431 - DNA, 2217 bp, Arabidopsis thaliana
  misc_feature (1)..(2217): Ceres Seq. ID no. 12395520
  misc_feature: MA Experiment ID: 108434 Result: Up-regulated in Transcription
  misc_feature: MA Experiment 108434 PARAMETER Experiment Name: At_Root_Tips_cDNA_P Parameter: Tissue Value: Root Tips
  misc_feature: MA Experiment ID: 108461 Result: Up-regulated in Transcription
  misc_feature: MA Experiment 108461 PARAMETER Experiment Name: At_Germinating_Seeds_cDNA_P Parameter: Age (day) Value: 1 vs. 0
  misc_feature: MA Experiment 108461 PARAMETER Experiment Name: At_Germinating_Seeds_cDNA_P Parameter: Tissue Value: Germinating Seeds
  misc_feature: MA Experiment ID: 20000180 Result: Up-regulated in Transcription
  misc_feature: MA Experiment 20000180 PARAMETER Experiment Name: At_Germinating_Seeds_P Parameter: Age (hr) Value: 24 vs. 0
  misc_feature: MA Experiment 20000180 PARAMETER Experiment Name: At_Germinating_Seeds_P Parameter: Tissue Value: Germinating Seeds
  misc_feature: MA Experiment ID: 20000182 Result: Down-regulated in Transcription
  misc_feature: MA Experiment 20000182 PARAMETER Experiment Name: At_2mM_SA_P Parameter: Age (day) Value: 14
  misc_feature: MA Experiment 20000182 PARAMETER Experiment Name: At_2mM_SA_P Parameter: Organism Value: A. thaliana
  misc_feature: MA Experiment 20000182 PARAMETER Experiment Name: At_2mM_SA_P Parameter: Plant Line Value: WS
  misc_feature: MA Experiment 20000182 PARAMETER Experiment Name: At_2mM_SA_P Parameter: Timepoint (hr) Value: 6
  misc_feature: MA Experiment 20000182 PARAMETER Experiment Name: At_2mM_SA_P Parameter: Tissue Value: Aerial
  misc_feature: MA Experiment 20000182 PARAMETER Experiment Name: At_2mM_SA_P Parameter: Treatment Value: 2mM SA vs. No Treatment
  misc_feature: MA Experiment ID: 20000185 Result: Up-regulated in Transcription
  misc_feature: MA Experiment 20000185 PARAMETER Experiment Name: At_Roots__P Parameter: Age (day) Value: 7 vs. 21
  misc_feature: MA Experiment 20000185 PARAMETER Experiment Name: At_Roots__P Parameter: Organism Value: A. thaliana
  misc_feature: MA Experiment 20000185 PARAMETER Experiment Name: At_Roots__P Parameter: Tissue Value: Roots vs. Whole Plant
  misc_feature: MA Experiment ID: 20000214 Result: Down-regulated in Transcription
  misc_feature: MA Experiment 20000214 PARAMETER Experiment Name: At_4deg_Cold_P Parameter: Timepoint (hr) Value: 6
  misc_feature: MA Experiment ID: 20000495 Result: Up-regulated in Transcription
  misc_feature: MA Experiment 20000495 PARAMETER Experiment Name: At_Guard_Cells_P Parameter: Harvest Date Value: 8/2/2002
  misc_feature: MA Experiment 20000495 PARAMETER Experiment Name: At_Guard_Cells_P Parameter: Organism Value: A. thaliana
  misc_feature: MA Experiment 20000495 PARAMETER Experiment Name: At_Guard_Cells_P Parameter: Tissue Value: Guard Cells vs. Leaves
  misc_feature: MA Experiment ID: 20001905 Result: Down-regulated in Transcription
  misc_feature: MA Experiment 20001905 PARAMETER Experiment Name: At_Drought_Reproduction_P Parameter: Age (day) Value: 40
  misc_feature: MA Experiment 20001905 PARAMETER Experiment Name: At_Drought_Reproduction_P Parameter: Organism Value: A. thaliana
  misc_feature: MA Experiment 20001905 PARAMETER Experiment Name: At_Drought_Reproduction_P Parameter: Plant Line Value: WS
  misc_feature: MA Experiment 20001905 PARAMETER Experiment Name: At_Drought_Reproduction_P Parameter: Timepoint (day) Value: 10
  misc_feature: MA Experiment 20001905 PARAMETER Experiment Name: At_Drought_Reproduction_P Parameter: Tissue Value: Rosettes
  misc_feature: MA Experiment 20001905 PARAMETER Experiment Name: At_Drought_Reproduction_P Parameter: Treatment Value: Drought vs. No Drought
  misc_feature: MA Experiment ID: 20001906 Result: Down-regulated in Transcription
  misc_feature: MA Experiment 20001906 PARAMETER Experiment Name: At_Drought_Reproduction_P Parameter: Age (day) Value: 35
  misc_feature: MA Experiment 20001906 PARAMETER Experiment Name: At_Drought_Reproduction_P Parameter: Organism Value: A. thaliana
  misc_feature: MA Experiment 20001906 PARAMETER Experiment Name: At_Drought_Reproduction_P Parameter: Plant Line Value: WS
  misc_feature: MA Experiment 20001906 PARAMETER Experiment Name: At_Drought_Reproduction_P Parameter: Timepoint (day) Value: 5
  misc_feature: MA Experiment 20001906 PARAMETER Experiment Name: At_Drought_Reproduction_P Parameter: Tissue Value: Siliques
  misc_feature: MA Experiment 20001906 PARAMETER Experiment Name: At_Drought_Reproduction_P Parameter: Treatment Value: Drought vs. No Drought
  misc_feature: MA Experiment ID: 20001911 Result: Down-regulated in Transcription
  misc_feature: MA Experiment 20001911 PARAMETER Experiment Name: At_Drought_Reproduction_P Parameter: Age (day) Value: 40
  misc_feature: MA Experiment 20001911 PARAMETER Experiment Name: At_Drought_Reproduction_P Parameter: Organism Value: A. thaliana
  misc_feature: MA Experiment 20001911 PARAMETER Experiment Name: At_Drought_Reproduction_P Parameter: Plant Line Value: WS
  misc_feature: MA Experiment 20001911 PARAMETER Experiment Name: At_Drought_Reproduction_P Parameter: Timepoint (day) Value: 10
  misc_feature: MA Experiment 20001911 PARAMETER Experiment Name: At_Drought_Reproduction_P Parameter: Tissue Value: Flowers
  misc_feature: MA Experiment 20001911 PARAMETER Experiment Name: At_Drought_Reproduction_P Parameter: Treatment Value: Drought vs. No Drought
atagagatttggttttttgattcttccaatctcactctctctgtctttctctctccatcaaataccaaattatctggaagctgagtacatcttgttttctgctcattcctctgtttcaacaatggagagtactattgttatgatgatgatgataacaagatctttcttttgcttcttgggatttttatgccttctctgctcttctgttcacggattgctttctcctaaaggtgttaactttgaagtgcaagctttgatggacataaaagcttcattacatgatcctcatggtgttcttgataactgggatagagatgctgttgatccttgtagttggacaatggtcacttgttcttctgaaaactttgtcattggcttaggcacaccaagtcagaatttatctggtacactatctccaagcattaccaacttaacaaatcttcggattgtgctgttgcagaacaacaacataaaaggaaaaattcctgctgagattggtcggcttacgaggcttgagactcttgatctttctgataatttcttccacggtgaaattcctttttcagtaggctatctacaaagcctgcaatatctgaggcttaacaacaattctctctctggagtgtttcctctgtcactatctaatatgactcaacttgcctttcttgatttatcatacaacaatcttagtggtcctgttccaagatttgctgcaaagacgtttagcatcgttgggaacccgctgatatgtccaacgggtaccgaaccagactgcaatggaacaacattgatacctatgtctatgaacttgaatcaaactggagttcctttatacgccggtggatcgaggaatcacaaaatggcaatcgctgttggatccagcgttgggactgtatcattaatcttcattgctgttggtttgtttctctggtggagacaaagacataaccaaaacacattctttgatgttaaagatgggaatcatcatgaggaagtttcacttggaaacctgaggagatttggtttcagggagcttcagattgcgaccaataacttcagcagtaagaacttattggggaaaggtggctatggaaatgtatacaaaggaatacttggagatagtacagtggttgcagtgaaaaggcttaaagatggaggagcattgggaggagagattcagtttcagacagaagttgaaatgatcagtttagctgttcatcgaaatctcttaagactctacggtttctgcatcacacaaactgagaagcttctagtttatccttatatgtctaatggaagcgttgcatctcgaatgaaagcaaaacctgttcttgactggagcataaggaagaggatagccataggagctgcaagagggcttgtgtatctccatgagcaatgtgatccgaagattatccaccgcgatgtcaaagcagcgaatatacttcttgatgactactgtgaagctgtggttggcgattttggtttagctaaactcttggatcatcaagattctcatgtgacaaccgcggttagaggcacggtgggtcacattgctccagagtatctctcaactggtcaatcctctgagaaaacagatgtttttggcttcgggattcttcttcttgagcttgtaaccggacaaagagcttttgagtttggtaaagcggctaaccagaaaggtgtgatgcttgattgggttaaaaagattcatcaagagaagaaacttgagctacttgtggataaagagttgttgaagaagaagagctacgatgagattgagttagacgaaatggtaagagtagctttgttgtgcacacagtacctgccaggacatagaccaaaaatgtctgaagttgttcgaatgctggaaggagatggacttgcagagaaatgggaagcttctcaaagatcagacagtgtttcaaaatgtagcaacaggataaatgaattgatgtcatcttcagacagatactctgatcttaccgatgactctagtttacttgtgcaagcaatggagctctctggtcctagatgaaatctatacatgaatctgaagaagaagaagaacatgcatctgtttcttgaatcaagagggattcttgtttttttgtataatagagaggttttttggagggaaatgttgtgtctctgtaactgtataggcttgttgtgtaagaagttattactgcacttagggttaattcaaagttcttt

SEQ ID NO: 25432 - protein, 638 aa, Arabidopsis thaliana
  peptide (1)..(638): Ceres Seq. ID no. 12395521
  misc_feature (10)..(599): Homolog of NCBI NO: 30678986 NR Description: leucine-rich repeat protein kinase family
  misc_feature (13)..(638): Homolog of NCBI NO: 14573457 NR Description: somatic embryogenesis receptor-like kinase 2
  misc_feature (16)..(170): Homolog of NCBI NO: 25407653 NR Description: receptor-like kinase homolog [imported] -
  misc_feature (294)..(595): Homolog of NCBI NO: 25407653 NR Description: receptor-like kinase homolog [imported] -
  misc_feature (87)..(638): Homolog of NCBI NO: 15224077 NR Description: putative LRR receptor protein kinase; protein id:
  misc_feature (16)..(595): Homolog of NCBI NO: 22329033 NR Description: receptor-like kinase homolog
  misc_feature (19)..(638): Homolog of NCBI NO: 15219817 NR Description: receptor-like kinase, putative; protein id:
  misc_feature (15)..(638): Homolog of NCBI NO: 11862956 NR Description: putative protein kinase [Oryza sativa (japonica
  misc_feature (10)..(638): Homolog of NCBI NO: 9279736 NR Description: receptor-like kinase [Arabidopsis thaliana]
  misc_feature (10)..(638): Homolog of NCBI NO: 22331326 NR Description: somatic embryogenesis receptor-like kinase,
MESTIVMMMMITRSFFCFLGFLCLLCSSVHGLLSPKGVNFEVQALMDIKASLHDPHGVLDNWDRDAVDPCSWTMVTCSSENFVIGLGTPSQNLSGTLSPSITNLTNLRIVLLQNNNIKGKIPAEIGRLTRLETLDLSDNFFHGEIPFSVGYLQSLQYLRLNNNSLSGVFPLSLSNMTQLAFLDLSYNNLSGPVPRFAAKTFSIVGNPLICPTGTEPDCNGTTLIPMSMNLNQTGVPLYAGGSRNHKMAIAVGSSVGTVSLIFIAVGLFLWWRQRHNQNTFFDVKDGNHHEEVSLGNLRRFGFRELQIATNNFSSKNLLGKGGYGNVYKGILGDSTVVAVKRLKDGGALGGEIQFQTEVEMISLAVHRNLLRLYGFCITQTEKLLVYPYMSNGSVASRMKAKPVLDWSIRKRIAIGAARGLVYLHEQCDPKIIHRDVKAANILLDDYCEAVVGDFGLAKLLDHQDSHVTTAVRGTVGHIAPEYLSTGQSSEKTDVFGFGILLLELVTGQRAFEFGKAANQKGVMLDWVKKIHQEKKLELLVDKELLKKKSYDEIELDEMVRVALLCTQYLPGHRPKMSEVVRMLEGDGLAEKWEASQRSDSVSKCSNRINELMSSSDRYSDLTDDSSLLVQAMELSGPR

SEQ ID NO: 25433 - protein, 632 aa, Arabidopsis thaliana
  peptide (1)..(632): Ceres Seq. ID no. 12395522
  misc_feature (4)..(593): Homolog of NCBI NO: 30678986 NR Description: leucine-rich repeat protein kinase family
  misc_feature (7)..(632): Homolog of NCBI NO: 14573457 NR Description: somatic embryogenesis receptor-like kinase 2
  misc_feature (10)..(164): Homolog of NCBI NO: 25407653 NR Description: receptor-like kinase homolog [imported] -
  misc_feature (288)..(589): Homolog of NCBI NO: 25407653 NR Description: receptor-like kinase homolog [imported] -
  misc_feature (81)..(632): Homolog of NCBI NO: 15224077 NR Description: putative LRR receptor protein kinase; protein id:
  misc_feature (10)..(589): Homolog of NCBI NO: 22329033 NR Description: receptor-like kinase homolog
  misc_feature (13)..(632): Homolog of NCBI NO: 15219817 NR Description: receptor-like kinase, putative; protein id:
  misc_feature (9)..(632): Homolog of NCBI NO: 11862956 NR Description: putative protein kinase [Oryza sativa (japonica
  misc_feature (4)..(632): Homolog of NCBI NO: 9279736 NR Description: receptor-like kinase [Arabidopsis thaliana]
  misc_feature (4)..(632): Homolog of NCBI NO: 22331326 NR Description: somatic embryogenesis receptor-like kinase,
MMMMITRSFFCFLGFLCLLCSSVHGLLSPKGVNFEVQALMDIKASLHDPHGVLDNWDRDAVDPCSWTMVTCSSENFVIGLGTPSQNLSGTLSPSITNLTNLRIVLLQNNNIKGKIPAEIGRLTRLETLDLSDNFFHGEIPFSVGYLQSLQYLRLNNNSLSGVFPLSLSNMTQLAFLDLSYNNLSGPVPRFAAKTFSIVGNPLICPTGTEPDCNGTTLIPMSMNLNQTGVPLYAGGSRNHKMAIAVGSSVGTVSLIFIAVGLFLWWRQRHNQNTFFDVKDGNHHEEVSLGNLRRFGFRELQIATNNFSSKNLLGKGGYGNVYKGILGDSTVVAVKRLKDGGALGGEIQFQTEVEMISLAVHRNLLRLYGFCITQTEKLLVYPYMSNGSVASRMKAKPVLDWSIRKRIAIGAARGLVYLHEQCDPKIIHRDVKAANILLDDYCEAVVGDFGLAKLLDHQDSHVTTAVRGTVGHIAPEYLSTGQSSEKTDVFGFGILLLELVTGQRAFEFGKAANQKGVMLDWVKKIHQEKKLELLVDKELLKKKSYDEIELDEMVRVALLCTQYLPGHRPKMSEVVRMLEGDGLAEKWEASQRSDSVSKCSNRINELMSSSDRYSDLTDDSSLLVQAMELSGPR

SEQ ID NO: 25434 - protein, 631 aa, Arabidopsis thaliana
  peptide (1)..(631): Ceres Seq. ID no. 12395523
  misc_feature (3)..(592): Homolog of NCBI NO: 30678986 NR Description: leucine-rich repeat protein kinase family
  misc_feature (6)..(631): Homolog of NCBI NO: 14573457 NR Description: somatic embryogenesis receptor-like kinase 2
  misc_feature (9)..(163): Homolog of NCBI NO: 25407653 NR Description: receptor-like kinase homolog [imported] -
  misc_feature (287)..(588): Homolog of NCBI NO: 25407653 NR Description: receptor-like kinase homolog [imported] -
  misc_feature (80)..(631): Homolog of NCBI NO: 15224077 NR Description: putative LRR receptor protein kinase; protein id:
  misc_feature (9)..(588): Homolog of NCBI NO: 22329033 NR Description: receptor-like kinase homolog
  misc_feature (12)..(631): Homolog of NCBI NO: 15219817 NR Description: receptor-like kinase, putative; protein id:
  misc_feature (8)..(631): Homolog of NCBI NO: 11862956 NR Description: putative protein kinase [Oryza sativa (japonica
  misc_feature (3)..(631): Homolog of NCBI NO: 9279736 NR Description: receptor-like kinase [Arabidopsis thaliana]
  misc_feature (3)..(631): Homolog of NCBI NO: 22331326 NR Description: somatic embryogenesis receptor-like kinase,
MMMITRSFFCFLGFLCLLCSSVHGLLSPKGVNFEVQALMDIKASLHDPHGVLDNWDRDAVDPCSWTMVTCSSENFVIGLGTPSQNLSGTLSPSITNLTNLRIVLLQNNNIKGKIPAEIGRLTRLETLDLSDNFFHGEIPFSVGYLQSLQYLRLNNNSLSGVFPLSLSNMTQLAFLDLSYNNLSGPVPRFAAKTFSIVGNPLICPTGTEPDCNGTTLIPMSMNLNQTGVPLYAGGSRNHKMAIAVGSSVGTVSLIFIAVGLFLWWRQRHNQNTFFDVKDGNHHEEVSLGNLRRFGFRELQIATNNFSSKNLLGKGGYGNVYKGILGDSTVVAVKRLKDGGALGGEIQFQTEVEMISLAVHRNLLRLYGFCITQTEKLLVYPYMSNGSVASRMKAKPVLDWSIRKRIAIGAARGLVYLHEQCDPKIIHRDVKAANILLDDYCEAVVGDFGLAKLLDHQDSHVTTAVRGTVGHIAPEYLSTGQSSEKTDVFGFGILLLELVTGQRAFEFGKAANQKGVMLDWVKKIHQEKKLELLVDKELLKKKSYDEIELDEMVRVALLCTQYLPGHRPKMSEVVRMLEGDGLAEKWEASQRSDSVSKCSNRINELMSSSDRYSDLTDDSSLLVQAMELSGPR

SEQ ID NO: 25435 - DNA, 1194 bp, Arabidopsis thaliana
  misc_feature (1)..(1194): Ceres Seq. ID no. 12327003
  misc_feature: MA Experiment ID: 108561 Result: Down-regulated in Transcription
  misc_feature: MA Experiment 108561 PARAMETER Experiment Name: At_100uM_ABA_cDNA_P Parameter: Timepoint (hr) Value: 6
  misc_feature: MA Experiment 108561 PARAMETER Experiment Name: At_100uM_ABA_cDNA_P Parameter: Tissue Value: Aerial
  misc_feature: MA Experiment 108561 PARAMETER Experiment Name: At_100uM_ABA_cDNA_P Parameter: Treatment Value: 100uM ABA vs. No Treatment
  misc_feature: MA Experiment ID: 20000069 Result: Down-regulated in Transcription
  misc_feature: MA Experiment 20000069 PARAMETER Experiment Name: At_100uM_ABA_Mutants_cDNA_P Parameter: Plant Line Value: CS23
  misc_feature: MA Experiment 20000069 PARAMETER Experiment Name: At_100uM_ABA_Mutants_cDNA_P Parameter: Timepoint (hr) Value: 6
  misc_feature: MA Experiment 20000069 PARAMETER Experiment Name: At_100uM_ABA_Mutants_cDNA_P Parameter: Tissue Value: Aerial
  misc_feature: MA Experiment 20000069 PARAMETER Experiment Name: At_100uM_ABA_Mutants_cDNA_P Parameter: Treatment Value: 100uM ABA vs. No Treatment
  misc_feature: MA Experiment ID: 20000070 Result: Down-regulated in Transcription
  misc_feature: MA Experiment 20000070 PARAMETER Experiment Name: At_100uM_ABA_Mutants_cDNA_P Parameter: Plant Line Value: CS24
  misc_feature: MA Experiment 20000070 PARAMETER Experiment Name: At_100uM_ABA_Mutants_cDNA_P Parameter: Timepoint (hr) Value: 6
  misc_feature: MA Experiment 20000070 PARAMETER Experiment Name: At_100uM_ABA_Mutants_cDNA_P Parameter: Tissue Value: Aerial
  misc_feature: MA Experiment 20000070 PARAMETER Experiment Name: At_100uM_ABA_Mutants_cDNA_P Parameter: Treatment Value: 100uM ABA vs. No Treatment
  misc_feature: MA Experiment ID: 20000072 Result: Down-regulated in Transcription
  misc_feature: MA Experiment 20000072 PARAMETER Experiment Name: At_100uM_ABA_Mutants_cDNA_P Parameter: Plant Line Value: CS8105
  misc_feature: MA Experiment 20000072 PARAMETER Experiment Name: At_100uM_ABA_Mutants_cDNA_P Parameter: Timepoint (hr) Value: 6
  misc_feature: MA Experiment 20000072 PARAMETER Experiment Name: At_100uM_ABA_Mutants_cDNA_P Parameter: Tissue Value: Aerial
  misc_feature: MA Experiment 20000072 PARAMETER Experiment Name: At_100uM_ABA_Mutants_cDNA_P Parameter: Treatment Value: 100uM ABA vs. No Treatment
  misc_feature: MA Experiment ID: 20000086 Result: Down-regulated in Transcription
  misc_feature: MA Experiment 20000086 PARAMETER Experiment Name: At_100uM_ABA_Mutants_cDNA_P Parameter: Plant Line Value: CS22
  misc_feature: MA Experiment 20000086 PARAMETER Experiment Name: At_100uM_ABA_Mutants_cDNA_P Parameter: Timepoint (hr) Value: 6
  misc_feature: MA Experiment 20000086 PARAMETER Experiment Name: At_100uM_ABA_Mutants_cDNA_P Parameter: Tissue Value: Aerial
  misc_feature: MA Experiment 20000086 PARAMETER Experiment Name: At_100uM_ABA_Mutants_cDNA_P Parameter: Treatment Value: 100uM ABA vs. No Treatment
  misc_feature: MA Experiment ID: 20000087 Result: Down-regulated in Transcription
  misc_feature: MA Experiment 20000087 PARAMETER Experiment Name: At_100uM_ABA_Mutants_cDNA_P Parameter: Plant Line Value: WS
  misc_feature: MA Experiment 20000087 PARAMETER Experiment Name: At_100uM_ABA_Mutants_cDNA_P Parameter: Timepoint (hr) Value: 6
  misc_feature: MA Experiment 20000087 PARAMETER Experiment Name: At_100uM_ABA_Mutants_cDNA_P Parameter: Tissue Value: Aerial
  misc_feature: MA Experiment 20000087 PARAMETER Experiment Name: At_100uM_ABA_Mutants_cDNA_P Parameter: Treatment Value: 100uM ABA vs. No Treatment
  misc_feature: MA Experiment ID: 20000088 Result: Down-regulated in Transcription
  misc_feature: MA Experiment 20000088 PARAMETER Experiment Name: At_100uM_ABA_Mutants_cDNA_P Parameter: Plant Line Value: Landsberg
  misc_feature: MA Experiment 20000088 PARAMETER Experiment Name: At_100uM_ABA_Mutants_cDNA_P Parameter: Timepoint (hr) Value: 6
  misc_feature: MA Experiment 20000088 PARAMETER Experiment Name: At_100uM_ABA_Mutants_cDNA_P Parameter: Tissue Value: Aerial
  misc_feature: MA Experiment 20000088 PARAMETER Experiment Name: At_100uM_ABA_Mutants_cDNA_P Parameter: Treatment Value: 100uM ABA vs. No Treatment
  misc_feature: MA Experiment ID: 20000089 Result: Down-regulated in Transcription
  misc_feature: MA Experiment ID: 20000117 Result: Down-regulated in Transcription
  misc_feature: MA Experiment 20000117 PARAMETER Experiment Name: At_100uM_ABA_Mutants_cDNA_P Parameter: Plant Line Value: Columbia
  misc_feature: MA Experiment 20000117 PARAMETER Experiment Name: At_100uM_ABA_Mutants_cDNA_P Parameter: Timepoint (hr) Value: 6
  misc_feature: MA Experiment 20000117 PARAMETER Experiment Name: At_100uM_ABA_Mutants_cDNA_P Parameter: Tissue Value: Aerial
  misc_feature: MA Experiment 20000117 PARAMETER Experiment Name: At_100uM_ABA_Mutants_cDNA_P Parameter: Treatment Value: 100uM ABA vs. No Treatment
  misc_feature: MA Experiment ID: 20001248 Result: Down-regulated in Transcription
  misc_feature: MA Experiment 20001248 PARAMETER Experiment Name: At_Far-red-induction_P Parameter: Age (day) Value: 7
  misc_feature: MA Experiment 20001248 PARAMETER Experiment Name: At_Far-red-induction_P Parameter: Light Value: Far-red vs. White
  misc_feature: MA Experiment 20001248 PARAMETER Experiment Name: At_Far-red-induction_P Parameter: Organism Value: A. thaliana
  misc_feature: MA Experiment 20001248 PARAMETER Experiment Name: At_Far-red-induction_P Parameter: Plant Line Value: Columbia
  misc_feature: MA Experiment 20001248 PARAMETER Experiment Name: At_Far-red-induction_P Parameter: Timepoint (hr) Value: 4
  misc_feature: MA Experiment 20001248 PARAMETER Experiment Name: At_Far-red-induction_P Parameter: Tissue Value: Whole Plant
actctgttttcatcatctctttctctcgtctctctcaaaccctaaatacactctttctcttcttgttgtctccattctctctgtgtcatcaagcttcttttttgtgtgggttatttgaaagacactttctctgctggtatcattggagtctagggttttgttattgacatgcgtggtgtgtcagaattggaggtggggaagagtaatcttccggcggagagtgagctggaattgggattagggctcagcctcggtggtggcgcgtggaaagagcgtgggaggattcttactgctaaggattttccttccgttgggtctaaacgctctgctgaatcttcctctcaccaaggagcttctcctcctcgttcaagtcaagtggtaggatggccaccaattgggttacacaggatgaacagtttggttaataaccaagctatgaaggcagcaagagcggaagaaggagacggggagaagaaagttgtgaagaatgatgagctcaaagatgtgtcaatgaaggtgaatccgaaagttcagggcttagggtttgttaaggtgaatatggatggagttggtataggcagaaaagtggatatgagagctcattcgtcttacgaaaacttggctcagacgcttgaggaaatgttctttggaatgacaggtactacttgtcgagaaaaggttaaacctttaaggcttttagatggatcatcagactttgtactcacttatgaagataaggaaggggattggatgcttgttggagatgttccatggagaatgtttatcaactcggtgaaaaggcttcggatcatgggaacctcagaagctagtggactagctccaagacgtcaagagcagaaggatagacaaagaaacaaccctgtttagcttcccttccaaagctggcattgtttatgtattgtttgaggtttgcaatttactcgatactttttgaagaaagtattttggagaatatggataaaagcatgcagaagcttagatatgatttgaatccggttttcggatatggttttgcttaggtcattcaattcgtagttttccagtttgtttcttctttggctgtgtaccaattatctatgttctgtgagagaaagctcttgtttatttgttctctcagattgtaaatagttgaagttatctaattaatgtgataagagttatgtttatgattcc

SEQ ID NO: 25436 - protein, 239 aa, Arabidopsis thaliana
  peptide (1)..(239): Ceres Seq. ID no. 12327004
  misc_feature (21)..(227): Pfam Name: AUX/IAA family Pfam Description: AUX/IAA family
  misc_feature (50)..(235): Homolog of NCBI NO: 21594025 NR Description: auxin regulated protein IAA18, putative
  misc_feature (16)..(223): Homolog of NCBI NO: 15219646 NR Description: putative IAA1 protein
  misc_feature (47)..(223): Homolog of NCBI NO: 20269057 NR Description: aux/IAA protein [Populus tremula x Populus
  misc_feature (12)..(224): Homolog of NCBI NO: 20466408 NR Description: early auxin-inducible protein 11 [Arabidopsis
  misc_feature (12)..(224): Homolog of NCBI NO: 15235385 NR Description: early auxin-inducible protein 11 (IAA11)
  misc_feature (1)..(167): Homolog of NCBI NO: 30678907 NR Description: auxin-responsive protein IAA12 (Indoleacetic
  misc_feature (4)..(239): Homolog of NCBI NO: 30685642 NR Description: auxin-responsive protein IAA13 (Indoleacetic
  misc_feature (4)..(239): Homolog of NCBI NO: 15225833 NR Description: auxin regulated protein (IAA13)
  misc_feature (1)..(239): Homolog of NCBI NO: 21593621 NR Description: putative auxin-induced protein, IAA12
  misc_feature (1)..(239): Homolog of NCBI NO: 15219761 NR Description: putative auxin-induced protein, IAA12
MRGVSELEVGKSNLPAESELELGLGLSLGGGAWKERGRILTAKDFPSVGSKRSAESSSHQGASPPRSSQVVGWPPIGLHRMNSLVNNQAMKAARAEEGDGEKKVVKNDELKDVSMKVNPKVQGLGFVKVNMDGVGIGRKVDMRAHSSYENLAQTLEEMFFGMTGTTCREKVKPLRLLDGSSDFVLTYEDKEGDWMLVGDVPWRMFINSVKRLRIMGTSEASGLAPRRQEQKDRQRNNPV

SEQ ID NO: 25437 - protein, 159 aa, Arabidopsis thaliana
  peptide (1)..(159): Ceres Seq. ID no. 12327005
  misc_feature (1)..(147): Pfam Name: AUX/IAA family Pfam Description: AUX/IAA family
  misc_feature (1)..(155): Homolog of NCBI NO: 21594025 NR Description: auxin regulated protein IAA18, putative
  misc_feature (1)..(143): Homolog of NCBI NO: 15219646 NR Description: putative IAA1 protein
  misc_feature (1)..(143): Homolog of NCBI NO: 20269057 NR Description: aux/IAA protein [Populus tremula x Populus
  misc_feature (1)..(144): Homolog of NCBI NO: 20466408 NR Description: early auxin-inducible protein 11 [Arabidopsis
  misc_feature (1)..(144): Homolog of NCBI NO: 15235385 NR Description: early auxin-inducible protein 11 (IAA11)
  misc_feature (1)..(87): Homolog of NCBI NO: 30678907 NR Description: auxin-responsive protein IAA12 (Indoleacetic
  misc_feature (1)..(159): Homolog of NCBI NO: 30685642 NR Description: auxin-responsive protein IAA13 (Indoleacetic
  misc_feature (1)..(159): Homolog of NCBI NO: 15225833 NR Description: auxin regulated protein (IAA13)
  misc_feature (1)..(159): Homolog of NCBI NO: 21593621 NR Description: putative auxin-induced protein, IAA12
  misc_feature (1)..(159): Homolog of NCBI NO: 15219761 NR Description: putative auxin-induced protein, IAA12
MNSLVNNQAMKAARAEEGDGEKKVVKNDELKDVSMKVNPKVQGLGFVKVNMDGVGIGRKVDMRAHSSYENLAQTLEEMFFGMTGTTCREKVKPLRLLDGSSDFVLTYEDKEGDWMLVGDVPWRMFINSVKRLRIMGTSEASGLAPRRQEQKDRQRNNPV

SEQ ID NO: 25438 - protein, 150 aa, Arabidopsis thaliana
  peptide (1)..(150): Ceres Seq. ID no. 12327006
  misc_feature (1)..(138): Pfam Name: AUX/IAA family Pfam Description: AUX/IAA family
  misc_feature (1)..(146): Homolog of NCBI NO: 21594025 NR Description: auxin regulated protein IAA18, putative
  misc_feature (1)..(134): Homolog of NCBI NO: 15219646 NR Description: putative IAA1 protein
  misc_feature (1)..(134): Homolog of NCBI NO: 20269057 NR Description: aux/IAA protein [Populus tremula x Populus
  misc_feature (1)..(135): Homolog of NCBI NO: 20466408 NR Description: early auxin-inducible protein 11 [Arabidopsis
  misc_feature (1)..(135): Homolog of NCBI NO: 15235385 NR Description: early auxin-inducible protein 11 (IAA11)
  misc_feature (1)..(78): Homolog of NCBI NO: 30678907 NR Description: auxin-responsive protein IAA12 (Indoleacetic
  misc_feature (1)..(150): Homolog of NCBI NO: 30685642 NR Description: auxin-responsive protein IAA13 (Indoleacetic
  misc_feature (1)..(150): Homolog of NCBI NO: 15225833 NR Description: auxin regulated protein (IAA13)
  misc_feature (1)..(150): Homolog of NCBI NO: 21593621 NR Description: putative auxin-induced protein, IAA12
  misc_feature (1)..(150): Homolog of NCBI NO: 15219761 NR Description: putative auxin-induced protein, IAA12
MKAARAEEGDGEKKVVKNDELKDVSMKVNPKVQGLGFVKVNMDGVGIGRKVDMRAHSSYENLAQTLEEMFFGMTGTTCREKVKPLRLLDGSSDFVLTYEDKEGDWMLVGDVPWRMFINSVKRLRIMGTSEASGLAPRRQEQKDRQRNNPV

SEQ ID NO: 25439 - DNA, 685 bp, Arabidopsis thaliana
  misc_feature (1)..(685): Ceres Seq. ID no. 12336133
  misc_feature: MA Experiment ID: 108434 Result: Up-regulated in Transcription
  misc_feature: MA Experiment 108434 PARAMETER Experiment Name: At_Root_Tips_cDNA_P Parameter: Tissue Value: Root Tips
  misc_feature: MA Experiment ID: 108573 Result: Down-regulated in Transcription
  misc_feature: MA Experiment 108573 PARAMETER Experiment Name: At_Drought_cDNA_P Parameter: Timepoint (hr) Value: 6
  misc_feature: MA Experiment 108573 PARAMETER Experiment Name: At_Drought_cDNA_P Parameter: Tissue Value: Aerial
  misc_feature: MA Experiment 108573 PARAMETER Experiment Name: At_Drought_cDNA_P Parameter: Treatment Value: Drought vs. No Drought
  misc_feature: MA Experiment ID: 108577 Result: Down-regulated in Transcription
  misc_feature: MA Experiment 108577 PARAMETER Experiment Name: At_42deg_Heat_cDNA_P Parameter: Temperature (deg C) Value: 42 vs. 22
  misc_feature: MA Experiment 108577 PARAMETER Experiment Name: At_42deg_Heat_cDNA_P Parameter: Timepoint (hr) Value: 6
  misc_feature: MA Experiment 108577 PARAMETER Experiment Name: At_42deg_Heat_cDNA_P Parameter: Tissue Value: Aerial
  misc_feature: MA Experiment ID: 20000111 Result: Down-regulated in Transcription
  misc_feature: MA Experiment 20000111 PARAMETER Experiment Name: At_42deg_Heat_cDNA_P Parameter: Temperature (deg C) Value: 42 vs. 22
  misc_feature: MA Experiment 20000111 PARAMETER Experiment Name: At_42deg_Heat_cDNA_P Parameter: Timepoint (hr) Value: 6
  misc_feature: MA Experiment 20000111 PARAMETER Experiment Name: At_42deg_Heat_cDNA_P Parameter: Tissue Value: Aerial
  misc_feature: MA Experiment ID: 20000112 Result: Down-regulated in Transcription
  misc_feature: MA Experiment 20000112 PARAMETER Experiment Name: At_42deg_Heat_cDNA_P Parameter: Temperature (deg C) Value: 42 vs. 22
  misc_feature: MA Experiment 20000112 PARAMETER Experiment Name: At_42deg_Heat_cDNA_P Parameter: Timepoint (hr) Value: 2
  misc_feature: MA Experiment 20000112 PARAMETER Experiment Name: At_42deg_Heat_cDNA_P Parameter: Tissue Value: Aerial
  misc_feature: MA Experiment ID: 20000113 Result: Down-regulated in Transcription
  misc_feature: MA Experiment 20000113 PARAMETER Experiment Name: At_42deg_Heat_cDNA_P Parameter: Temperature (deg C) Value: 42 vs. 22
  misc_feature: MA Experiment 20000113 PARAMETER Experiment Name: At_42deg_Heat_cDNA_P Parameter: Timepoint (hr) Value: 8
  misc_feature: MA Experiment 20000113 PARAMETER Experiment Name: At_42deg_Heat_cDNA_P Parameter: Tissue Value: Aerial
  misc_feature: MA Experiment ID: 20000173 Result: Down-regulated in Transcription
  misc_feature: MA Experiment 20000173 PARAMETER Experiment Name: At_42deg_Heat_P Parameter: Age (day) Value: 14
  misc_feature: MA Experiment 20000173 PARAMETER Experiment Name: At_42deg_Heat_P Parameter: Organism Value: A. thaliana
  misc_feature: MA Experiment 20000173 PARAMETER Experiment Name: At_42deg_Heat_P Parameter: Plant Line Value: WS
  misc_feature: MA Experiment 20000173 PARAMETER Experiment Name: At_42deg_Heat_P Parameter: Temperature (deg C) Value: 42 vs. 22
  misc_feature: MA Experiment 20000173 PARAMETER Experiment Name: At_42deg_Heat_P Parameter: Timepoint (hr) Value: 6
  misc_feature: MA Experiment 20000173 PARAMETER Experiment Name: At_42deg_Heat_P Parameter: Tissue Value: Aerial
  misc_feature: MA Experiment ID: 20000234 Result: Up-regulated in Transcription
  misc_feature: MA Experiment 20000234 PARAMETER Experiment Name: At_Siliques_P Parameter: Age (day) Value: 21
  misc_feature: MA Experiment 20000234 PARAMETER Experiment Name: At_Siliques_P Parameter: Organism Value: A. thaliana
  misc_feature: MA Experiment 20000234 PARAMETER Experiment Name: At_Siliques_P Parameter: Plant Line Value: WS
  misc_feature: MA Experiment 20000234 PARAMETER Experiment Name: At_Siliques_P Parameter: Tissue Value: Less Than 5mm Siliques vs. Whole Plant
  misc_feature: MA Experiment ID: 20000265 Result: Up-regulated in Transcription
  misc_feature: MA Experiment 20000265 PARAMETER Experiment Name: At_Open_Flower_P Parameter: Age (day) Value: 21
  misc_feature: MA Experiment 20000265 PARAMETER Experiment Name: At_Open_Flower_P Parameter: Plant Line Value: WS
  misc_feature: MA Experiment 20000265 PARAMETER Experiment Name: At_Open_Flower_P Parameter: Tissue Value: Closed Flower vs. Whole Plant
  misc_feature: MA Experiment ID: 20000495 Result: Up-regulated in Transcription
  misc_feature: MA Experiment 20000495 PARAMETER Experiment Name: At_Guard_Cells_P Parameter: Harvest Date Value: 8/2/2002
  misc_feature: MA Experiment 20000495 PARAMETER Experiment Name: At_Guard_Cells_P Parameter: Organism Value: A. thaliana
  misc_feature: MA Experiment 20000495 PARAMETER Experiment Name: At_Guard_Cells_P Parameter: Tissue Value: Guard Cells vs. Leaves
  misc_feature: MA Experiment ID: 20001911 Result: Down-regulated in Transcription
  misc_feature: MA Experiment 20001911 PARAMETER Experiment Name: At_Drought_Reproduction_P Parameter: Age (day) Value: 40
  misc_feature: MA Experiment 20001911 PARAMETER Experiment Name: At_Drought_Reproduction_P Parameter: Organism Value: A. thaliana
  misc_feature: MA Experiment 20001911 PARAMETER Experiment Name: At_Drought_Reproduction_P Parameter: Plant Line Value: WS
  misc_feature: MA Experiment 20001911 PARAMETER Experiment Name: At_Drought_Reproduction_P Parameter: Timepoint (day) Value: 10
  misc_feature: MA Experiment 20001911 PARAMETER Experiment Name: At_Drought_Reproduction_P Parameter: Tissue Value: Flowers
  misc_feature: MA Experiment 20001911 PARAMETER Experiment Name: At_Drought_Reproduction_P Parameter: Treatment Value: Drought vs. No Drought
aagttgtcttccacaacaaaagagtaccctgaaacagatctttcgtataatcagtgacgtagagatcgaagacgatgatgagctctgcatccgccatgaaagctgttggatttttgcttctgcttaccattctaacattagcttatgcgaagaagtcaggtgatgtgacagagttgcagattggtgttaagtacaagcctcagaaatgtgatctccaggctcacaaaggggataagatcaaggttcactatcggggaaagttaactgatggaactgtctttgattcaagttttgagagaggtgaccctattgagtttgagcttggaactggtcaagtcatcccaggatgggaccagggtttattgggagcttgtgtaggtgagaagagaaagttgaaaatcccatccaagcttggttatggtgataacggctcaccaccaaaaatcccgggtggggcgacactgatattcgacaccgagcttgttgctgtgaacggagaaccatccagcgaagcgaaatcaaagaatgagctttgattacaccataattgtttttcatttaaaaggaaaccttgagtagtcatcgatgttggcatttgaatcttaaacagcctagaatcatttactttgctagttgaagacaataattatattttggtcataacattagttatgttggcagttct

SEQ ID NO: 25440 - protein, 153 aa, Arabidopsis thaliana
  peptide (1)..(153): Ceres Seq. ID no. 12336134
  misc_feature (43)..(137): Pfam Name: FKBP-type peptidyl-prolyl cis-trans isomerase Pfam Description: FKBP-type peptidyl-prolyl cis-trans isomerase
  misc_feature (8)..(139): Homolog of NCBI NO: 6679805 NR Description: FK506 binding protein 2; FK506 binding protein 2
  misc_feature (17)..(139): Homolog of NCBI NO: 27694894 NR Description: Similar to FK506 binding protein 2 (13 kDa)
  misc_feature (8)..(153): Homolog of NCBI NO: 23396588 NR Description: FK506-binding protein 2 precursor
  misc_feature (12)..(153): Homolog of NCBI NO: 34906954 NR Description: rapamycin-binding protein-like
  misc_feature (2)..(144): Homolog of NCBI NO: 2129623 NR Description: probable peptidylprolyl isomerase (EC 5.2.1.8)
  misc_feature (2)..(144): Homolog of NCBI NO: 15239019 NR Description: FKBP-type peptidyl-prolyl cis-trans isomerase,
  misc_feature (8)..(147): Homolog of NCBI NO: 38174807 NR Description: putative immunophilin [Hordeum vulgare subsp.
  misc_feature (8)..(153): Homolog of NCBI NO: 21593622 NR Description: immunophilin (FKBP15-1) [Arabidopsis thaliana]
  misc_feature (8)..(153): Homolog of NCBI NO: 2129622 NR Description: probable peptidylprolyl isomerase (EC 5.2.1.8)
  misc_feature (1)..(153): Homolog of NCBI NO: 18404471 NR Description: immunophilin (FKBP15-1)
MMSSASAMKAVGFLLLLTILTLAYAKKSGDVTELQIGVKYKPQKCDLQAHKGDKIKVHYRGKLTDGTVFDSSFERGDPIEFELGTGQVIPGWDQGLLGACVGEKRKLKIPSKLGYGDNGSPPKIPGGATLIFDTELVAVNGEPSSEAKSKNEL

SEQ ID NO: 25441 - protein, 152 aa, Arabidopsis thaliana
  peptide (1)..(152): Ceres Seq. ID no. 12336135
  misc_feature (42)..(136): Pfam Name: FKBP-type peptidyl-prolyl cis-trans isomerase Pfam Description: FKBP-type peptidyl-prolyl cis-trans isomerase
  misc_feature (7)..(138): Homolog of NCBI NO: 6679805 NR Description: FK506 binding protein 2; FK506 binding protein 2
  misc_feature (16)..(138): Homolog of NCBI NO: 27694894 NR Description: Similar to FK506 binding protein 2 (13 kDa)
  misc_feature (7)..(152): Homolog of NCBI NO: 23396588 NR Description: FK506-binding protein 2 precursor
  misc_feature (11)..(152): Homolog of NCBI NO: 34906954 NR Description: rapamycin-binding protein-like
  misc_feature (1)..(143): Homolog of NCBI NO: 2129623 NR Description: probable peptidylprolyl isomerase (EC 5.2.1.8)
  misc_feature (1)..(143): Homolog of NCBI NO: 15239019 NR Description: FKBP-type peptidyl-prolyl cis-trans isomerase,
  misc_feature (7)..(146): Homolog of NCBI NO: 38174807 NR Description: putative immunophilin [Hordeum vulgare subsp.
  misc_feature (7)..(152): Homolog of NCBI NO: 21593622 NR Description: immunophilin (FKBP15-1) [Arabidopsis thaliana]
  misc_feature (7)..(152): Homolog of NCBI NO: 2129622 NR Description: probable peptidylprolyl isomerase (EC 5.2.1.8)
  misc_feature (1)..(152): Homolog of NCBI NO: 18404471 NR Description: immunophilin (FKBP15-1)
MSSASAMKAVGFLLLLTILTLAYAKKSGDVTELQIGVKYKPQKCDLQAHKGDKIKVHYRGKLTDGTVFDSSFERGDPIEFELGTGQVIPGWDQGLLGACVGEKRKLKIPSKLGYGDNGSPPKIPGGATLIFDTELVAVNGEPSSEAKSKNEL

SEQ ID NO: 25442 - protein, 146 aa, Arabidopsis thaliana
  peptide (1)..(146): Ceres Seq. ID no. 12336136
  misc_feature (36)..(130): Pfam Name: FKBP-type peptidyl-prolyl cis-trans isomerase Pfam Description: FKBP-type peptidyl-prolyl cis-trans isomerase
  misc_feature (1)..(132): Homolog of NCBI NO: 6679805 NR Description: FK506 binding protein 2; FK506 binding protein 2
  misc_feature (10)..(132): Homolog of NCBI NO: 27694894 NR Description: Similar to FK506 binding protein 2 (13 kDa)
  misc_feature (1)..(146): Homolog of NCBI NO: 23396588 NR Description: FK506-binding protein 2 precursor
  misc_feature (5)..(146): Homolog of NCBI NO: 34906954 NR Description: rapamycin-binding protein-like
  misc_feature (1)..(137): Homolog of NCBI NO: 2129623 NR Description: probable peptidylprolyl isomerase (EC 5.2.1.8)
  misc_feature (1)..(137): Homolog of NCBI NO: 15239019 NR Description: FKBP-type peptidyl-prolyl cis-trans isomerase,
  misc_feature (1)..(140): Homolog of NCBI NO: 38174807 NR Description: putative immunophilin [Hordeum vulgare subsp.
  misc_feature (1)..(146): Homolog of NCBI NO: 21593622 NR Description: immunophilin (FKBP15-1) [Arabidopsis thaliana]
  misc_feature (1)..(146): Homolog of NCBI NO: 2129622 NR Description: probable peptidylprolyl isomerase (EC 5.2.1.8)
  misc_feature (1)..(146): Homolog of NCBI NO: 18404471 NR Description: immunophilin (FKBP15-1)
MKAVGFLLLLTILTLAYAKKSGDVTELQIGVKYKPQKCDLQAHKGDKIKVHYRGKLTDGTVFDSSFERGDPIEFELGTGQVIPGWDQGLLGACVGEKRKLKIPSKLGYGDNGSPPKIPGGATLIFDTELVAVNGEPSSEAKSKNEL

SEQ ID NO: 25443 - DNA, 1432 bp, Arabidopsis thaliana
  misc_feature (1)..(1432): Ceres Seq. ID no. 12322021
  misc_feature: MA Experiment ID: 108434 Result: Up-regulated in Transcription
  misc_feature: MA Experiment 108434 PARAMETER Experiment Name: At_Root_Tips_cDNA_P Parameter: Tissue Value: Root Tips
  misc_feature: MA Experiment ID: 108461 Result: Up-regulated in Transcription
  misc_feature: MA Experiment 108461 PARAMETER Experiment Name: At_Germinating_Seeds_cDNA_P Parameter: Age (day) Value: 1 vs. 0
  misc_feature: MA Experiment 108461 PARAMETER Experiment Name: At_Germinating_Seeds_cDNA_P Parameter: Tissue Value: Germinating Seeds
  misc_feature: MA Experiment ID: 108462 Result: Up-regulated in Transcription
  misc_feature: MA Experiment 108462 PARAMETER Experiment Name: At_Germinating_Seeds_cDNA_P Parameter: Age (day) Value: 2 vs. 0
  misc_feature: MA Experiment 108462 PARAMETER Experiment Name: At_Germinating_Seeds_cDNA_P Parameter: Tissue Value: Germinating Seeds
  misc_feature: MA Experiment ID: 108579 Result: Down-regulated in Transcription
  misc_feature: MA Experiment 108579 PARAMETER Experiment Name: At_4deg_Cold_cDNA_P Parameter: Temperature (deg C) Value: 4 vs. 22
  misc_feature: MA Experiment 108579 PARAMETER Experiment Name: At_4deg_Cold_cDNA_P Parameter: Timepoint (hr) Value: 6
  misc_feature: MA Experiment 108579 PARAMETER Experiment Name: At_4deg_Cold_cDNA_P Parameter: Tissue Value: Aerial
  misc_feature: MA Experiment ID: 20000179 Result: Up-regulated in Transcription
  misc_feature: MA Experiment 20000179 PARAMETER Experiment Name: At_Germinating_Seeds_P Parameter: Age (hr) Value: 6 vs. 0
  misc_feature: MA Experiment 20000179 PARAMETER Experiment Name: At_Germinating_Seeds_P Parameter: Tissue Value: Germinating Seeds
  misc_feature: MA Experiment ID: 20000180 Result: Up-regulated in Transcription
  misc_feature: MA Experiment 20000180 PARAMETER Experiment Name: At_Germinating_Seeds_P Parameter: Age (hr) Value: 24 vs. 0
  misc_feature: MA Experiment 20000180 PARAMETER Experiment Name: At_Germinating_Seeds_P Parameter: Tissue Value: Germinating Seeds
  misc_feature: MA Experiment ID: 20000234 Result: Up-regulated in Transcription
  misc_feature: MA Experiment 20000234 PARAMETER Experiment Name: At_Siliques_P Parameter: Age (day) Value: 21
  misc_feature: MA Experiment 20000234 PARAMETER Experiment Name: At_Siliques_P Parameter: Organism Value: A. thaliana
  misc_feature: MA Experiment 20000234 PARAMETER Experiment Name: At_Siliques_P Parameter: Plant Line Value: WS
  misc_feature: MA Experiment 20000234 PARAMETER Experiment Name: At_Siliques_P Parameter: Tissue Value: Less Than 5mm Siliques vs. Whole Plant
  misc_feature: MA Experiment ID: 20000437 Result: Down-regulated in Transcription
  misc_feature: MA Experiment 20000437 PARAMETER Experiment Name: At_Drought_P Parameter: Age (day) Value: 8
  misc_feature: MA Experiment 20000437 PARAMETER Experiment Name: At_Drought_P Parameter: Organism Value: A. thaliana
  misc_feature: MA Experiment 20000437 PARAMETER Experiment Name: At_Drought_P Parameter: Plant Line Value: WS
  misc_feature: MA Experiment 20000437 PARAMETER Experiment Name: At_Drought_P Parameter: Timepoint (hr) Value: 24
  misc_feature: MA Experiment 20000437 PARAMETER Experiment Name: At_Drought_P Parameter: Tissue Value: Whole Plant
  misc_feature: MA Experiment 20000437 PARAMETER Experiment Name: At_Drought_P Parameter: Treatment Value: Drought vs. No Drought
  misc_feature: MA Experiment ID: 20000794 Result: Down-regulated in Transcription
  misc_feature: MA Experiment 20000794 PARAMETER Experiment Name: At_Petals_P Parameter: Age (day) Value: 23-25 days
  misc_feature: MA Experiment 20000794 PARAMETER Experiment Name: At_Petals_P Parameter: Plant Line Value: WS
  misc_feature: MA Experiment 20000794 PARAMETER Experiment Name: At_Petals_P Parameter: Tissue Value: Petals vs. Whole plant
tttgatccaaccatggctcgactccttctcctcttcttcttcttccttattctactccattacgcttcttgttccagacacgaacaagaaaaagaccgaatctttcaccttcccggtgaaccaaacgatgtctccttctctcacttctctggttacattaccgtcaacgagtcagcaggaagagcactattctactggctcactgagtcaccaccgagtgaaaaccctgagtctaagcctcttgtcctctggctcaacggtggacctggttgttcctccgtagcttacggtgccgctgaagaaatcggaccttttagaatcaatcctgatggcaaaactctttaccacaatccttactcttggaacaaattggcgaatttgctcttccttgaatctcctgctggtgttggtttctcgtattcgaatactacctccgatttgtatactgccggagatcagagaactgcggaagatgcttatgtgtttcttgtgaaatggtttgagaggtttcctcaatacaaacacagagagttctacattgctggagaaagctatgcaggtcattatgttcctcagttgtcacagattgtttatgagaaacgcaatccagctatcaactttaaaggcttcattgttgggaatgctgtgattgatgactaccatgattacgtgggtttatttgaatattggtgggctcatgggttgatatctgatctcacttaccacaacttacggatcacgtgtgaatttggatcatccgagcacccgtcctctaaatgcaccaaggccatggaagctgcagacttggagcaaggcaatattgatccttatagcatttacactgtcacttgtaaaaaggaggctgcagctcttaggtctcgcttctcgagagttcgtcatccatggatgtggagagcctatgacccttgcacagagaaatactccggcatgtatttcaattctccggaggttcaaaaggctatgcatgctaatataacaggactagcttatccatggaaagggtgcagtgacatcgttggagagaaatgggcagattctcctctgtctatgcttccaatctacaaagaactcatcgccgcaggtctcaggatatgggttttcagcggagacactgattcagtggttcccattactggaacacgatactccattagagccctcaagttacaaccactctccaaatggtacccttggaacgatgatggacaggttggtggatggagccaagtttacaaagggctgactctggtgacaatacatggagcaggacatgaggtacctcttttccgccctcgtcgagcttttcttctttttcagtcgtttctcgacaacaagccattgccaatgtaaattgtaagacactgtgataagaccagagttttttataataagaagtaagaatctctttttc

SEQ ID NO: 25444 - protein, 456 aa, Arabidopsis thaliana
  peptide (1)..(456): Ceres Seq. ID no. 12322022
  misc_feature (38)..(451): Pfam Name: Serine carboxypeptidase Pfam Description: Serine carboxypeptidase
  misc_feature (3)..(455): Homolog of NCBI NO: 20455471 NR Description: Serine carboxypeptidase II precursor
  misc_feature (5)..(455): Homolog of NCBI NO: 34908012 NR Description: putative carboxypeptidase D
  misc_feature (22)..(455): Homolog of NCBI NO: 1706082 NR Description: Serine carboxypeptidase II-3 precursor (CP-MII.3)
  misc_feature (5)..(455): Homolog of NCBI NO: 15234795 NR Description: SERINE CARBOXYPEPTIDASE II-like protein
  misc_feature (32)..(455): Homolog of NCBI NO: 7428205 NR Description: carboxypeptidase D (EC 3.4.16.6) - wheat
  misc_feature (3)..(455): Homolog of NCBI NO: 7428204 NR Description: carboxypeptidase D (EC 3.4.16.6) precursor -
  misc_feature (5)..(455): Homolog of NCBI NO: 13877871 NR Description: putative serine carboxypeptidase II [Arabidopsis
  misc_feature (10)..(454): Homolog of NCBI NO: 18417667 NR Description: SERINE CARBOXYPEPTIDASE II - like protein
  misc_feature (28)..(456): Homolog of NCBI NO: 15231911 NR Description: putative serine carboxypeptidase II; protein id:
  misc_feature (5)..(456): Homolog of NCBI NO: 15227493 NR Description: putative serine carboxypeptidase II
FDPTMARLLLLFFFFLILLHYASCSRHEQEKDRIFHLPGEPNDVSFSHFSGYITVNESAGRALFYWLTESPPSENPESKPLVLWLNGGPGCSSVAYGAAEEIGPFRINPDGKTLYHNPYSWNKLANLLFLESPAGVGFSYSNTTSDLYTAGDQRTAEDAYVFLVKWFERFPQYKHREFYIAGESYAGHYVPQLSQIVYEKRNPAINFKGFIVGNAVIDDYHDYVGLFEYWWAHGLISDLTYHNLRITCEFGSSEHPSSKCTKAMEAADLEQGNIDPYSIYTVTCKKEAAALRSRFSRVRHPWMWRAYDPCTEKYSGMYFNSPEVQKAMHANITGLAYPWKGCSDIVGEKWADSPLSMLPIYKELIAAGLRIWVFSGDTDSVVPITGTRYSIRALKLQPLSKWYPWNDDGQVGGWSQVYKGLTLVTIHGAGHEVPLFRPRRAFLLFQSFLDNKPLPM

SEQ ID NO: 25445 - protein, 452 aa, Arabidopsis thaliana
  peptide (1)..(452): Ceres Seq. ID no. 12322023
  misc_feature (34)..(447): Pfam Name: Serine carboxypeptidase Pfam Description: Serine carboxypeptidase
  misc_feature (18)..(451): Homolog of NCBI NO: 1706082 NR Description: Serine carboxypeptidase II-3 precursor (CP-MII.3)
  misc_feature (6)..(450): Homolog of NCBI NO: 18417667 NR Description: SERINE CARBOXYPEPTIDASE II - like protein
  misc_feature (1)..(451): Homolog of NCBI NO: 15234795 NR Description: SERINE CARBOXYPEPTIDASE II-like protein
  misc_feature (1)..(451): Homolog of NCBI NO: 13877871 NR Description: putative serine carboxypeptidase II [Arabidopsis
  misc_feature (28)..(451): Homolog of NCBI NO: 7428205 NR Description: carboxypeptidase D (EC 3.4.16.6) - wheat
  misc_feature (1)..(451): Homolog of NCBI NO: 7428204 NR Description: carboxypeptidase D (EC 3.4.16.6) precursor -
  misc_feature (1)..(451): Homolog of NCBI NO: 20455471 NR Description: Serine carboxypeptidase II precursor
  misc_feature (1)..(451): Homolog of NCBI NO: 34908012 NR Description: putative carboxypeptidase D
  misc_feature (24)..(452): Homolog of NCBI NO: 15231911 NR Description: putative serine carboxypeptidase II; protein id:
  misc_feature (1)..(452): Homolog of NCBI NO: 15227493 NR Description: putative serine carboxypeptidase II
MARLLLLFFFFLILLHYASCSRHEQEKDRIFHLPGEPNDVSFSHFSGYITVNESAGRALFYWLTESPPSENPESKPLVLWLNGGPGCSSVAYGAAEEIGPFRINPDGKTLYHNPYSWNKLANLLFLESPAGVGFSYSNTTSDLYTAGDQRTAEDAYVFLVKWFERFPQYKHREFYIAGESYAGHYVPQLSQIVYEKRNPAINFKGFIVGNAVIDDYHDYVGLFEYWWAHGLISDLTYHNLRITCEFGSSEHPSSKCTKAMEAADLEQGNIDPYSIYTVTCKKEAAALRSRFSRVRHPWMWRAYDPCTEKYSGMYFNSPEVQKAMHANITGLAYPWKGCSDIVGEKWADSPLSMLPIYKELIAAGLRIWVFSGDTDSVVPITGTRYSIRALKLQPLSKWYPWNDDGQVGGWSQVYKGLTLVTIHGAGHEVPLFRPRRAFLLFQSFLDNKPLPM

SEQ ID NO: 25446 - DNA, 1448 bp, Arabidopsis thaliana
  misc_feature (1)..(1448): Ceres Seq. ID no. 13487620
  misc_feature: MA Experiment ID: 108434 Result: Up-regulated in Transcription
  misc_feature: MA Experiment 108434 PARAMETER Experiment Name: At_Root_Tips_cDNA_P Parameter: Tissue Value: Root Tips
  misc_feature: MA Experiment ID: 108462 Result: Down-regulated in Transcription
  misc_feature: MA Experiment 108462 PARAMETER Experiment Name: At_Germinating_Seeds_cDNA_P Parameter: Age (day) Value: 2 vs. 0
  misc_feature: MA Experiment 108462 PARAMETER Experiment Name: At_Germinating_Seeds_cDNA_P Parameter: Tissue Value: Germinating Seeds
  misc_feature: MA Experiment ID: 108463 Result: Down-regulated in Transcription
  misc_feature: MA Experiment 108463 PARAMETER Experiment Name: At_Germinating_Seeds_cDNA_P Parameter: Age (day) Value: 3 vs. 0
  misc_feature: MA Experiment 108463 PARAMETER Experiment Name: At_Germinating_Seeds_cDNA_P Parameter: Tissue Value: Germinating Seeds
  misc_feature: MA Experiment ID: 108464 Result: Down-regulated in Transcription
  misc_feature: MA Experiment 108464 PARAMETER Experiment Name: At_Germinating_Seeds_cDNA_P Parameter: Age (day) Value: 4 vs. 0
  misc_feature: MA Experiment 108464 PARAMETER Experiment Name: At_Germinating_Seeds_cDNA_P Parameter: Tissue Value: Germinating Seeds
  misc_feature: MA Experiment ID: 20000090 Result: Up-regulated in Transcription
ctcgaagatcagcgagagagagagaagtagattgagaggcgagagagataatggcagatgaaggtaaggaggagacaggaatgggtcaggtcgaggaagatttttctgtgtggaagaagaacacaccatttctctacgatcttttgatctctcacccactcgaatggccatctctcaccgtccattgggttccatcgacgccaaatccttacgtagcagactcttacttcggtgtccacaagcttatactcggtactcatacttccggtagtgctcaagattttctcatggtcgccgacgtcgttaccccgacaccaaacgcagaacctgggataggcggcgctaatcaggatccctttattcctaaggtggagattaggcagaggatacgtgttgatggagaagtgaacagagcgcggtgtatgcctcaaaagccgacgcttgtgggtgcaaagacgagtgggtgtgaggtgtttctgtttgattacgccaaacatgctgcaaagtctcaaacgagtgagtgtgatcctgatctgaggctagtgggacatgacaaggaagggtatggattgtcttggagtcctttcaaggaaggttatcttttgagtggttcacaggatcagaagatctgtctttgggatgtttcagctacaccgcaagataaggttttgaatgcaatgtttgtgtatgagggacatgaaagtgctatcgcagatgtgtcatggcacatgaagaatgagaacctttttggttctgcgggtgaggatggccgattggtgatatgggacacacggacaaaccaaatgcaacaccaagtgaaagttcacgagagagaggtcaactatctatctttcaatccgttcaacgaatgggtattggccacagcttcctcagactccactgttgctttgtttgacctccggaaacttaatgcgccattgcatgtcatgagcagccatgagggagaggtcttccaagtggagtgggatcctaaccatgaaacagtactcgcatcttcaggggaggacagaaggctgatggtctgggacctgaacagggttggagaagagcagcttgagatagagttggatgcagaagatggtccaccagagttactcttctctcacggaggccacaaggctaagatatcagactttgcttggaacaaaaacgagccttgggtcattgcaagtgtagctgaagacaacagtcttcaggtgtggcagatggcagaaagcatctatcgcgatgaagaggatgccgaggacatcaaagaagatattacacaacaatcatgaaaattaagaaacgatttggtctctccattacttaaagtgtcttatcttgctttagccagtttctgaaagacaagctttgcgtctgtattaggattaacatgaatcatctctgtttgttaatgtaaccatgttggattttgttggtttcct

SEQ ID NO: 25447 - protein, 415 aa, Arabidopsis thaliana
  peptide (1)..(415): Ceres Seq. ID no. 13487621
  misc_feature (1)..(402): Homolog of NCBI NO: 6677681 NR Description: retinoblastoma binding protein 4 [Mus musculus]
  misc_feature (1)..(402): Homolog of NCBI NO: 34871596 NR Description: similar to retinoblastoma-binding protein mRbAp48
  misc_feature (1)..(402): Homolog of NCBI NO: 5032027 NR Description: retinoblastoma binding protein 4
  misc_feature (5)..(403): Homolog of NCBI NO: 3122386 NR Description: WD-40 repeat protein MSI1
  misc_feature (5)..(404): Homolog of NCBI NO: 15237140 NR Description: WD-40 repeat protein (MSI1) [Arabidopsis
  misc_feature (2)..(415): Homolog of NCBI NO: 27754479 NR Description: putative WD-40 repeat protein (MSI3) [Arabidopsis
  misc_feature (2)..(415): Homolog of NCBI NO: 2394233 NR Description: WD-40 repeat protein [Arabidopsis thaliana]
  misc_feature (2)..(415): Homolog of NCBI NO: 15236251 NR Description: WD-40 repeat protein (MSI3) [Arabidopsis
  misc_feature (1)..(415): Homolog of NCBI NO: 21593624 NR Description: putative WD-40 repeat protein, MSI2 [Arabidopsis
  misc_feature (1)..(415): Homolog of NCBI NO: 15227294 NR Description: WD-40 repeat protein (MSI2) [Arabidopsis
MADEGKEETGMGQVEEDFSVWKKNTPFLYDLLISHPLEWPSLTVHWVPSTPNPYVADSYFGVHKLILGTHTSGSAQDFLMVADVVTPTPNAEPGIGGANQDPFIPKVEIRQRIRVDGEVNRARCMPQKPTLVGAKTSGCEVFLFDYAKHAAKSQTSECDPDLRLVGHDKEGYGLSWSPFKEGYLLSGSQDQKICLWDVSATPQDKVLNAMFVYEGHESAIADVSWHMKNENLFGSAGEDGRLVIWDTRTNQMQHQVKVHEREVNYLSFNPFNEWVLATASSDSTVALFDLRKLNAPLHVMSSHEGEVFQVEWDPNHETVLASSGEDRRLMVWDLNRVGEEQLEIELDAEDGPPELLFSHGGHKAKISDFAWNKNEPWVIASVAEDNSLQVWQMAESIYRDEEDAEDIKEDITQQS

SEQ ID NO: 25448 - protein, 405 aa, Arabidopsis thaliana
  peptide (1)..(405): Ceres Seq. ID no. 13487622
  misc_feature (1)..(392): Homolog of NCBI NO: 6677681 NR Description: retinoblastoma binding protein 4 [Mus musculus]
  misc_feature (1)..(392): Homolog of NCBI NO: 34871596 NR Description: similar to retinoblastoma-binding protein mRbAp48
  misc_feature (1)..(392): Homolog of NCBI NO: 5032027 NR Description: retinoblastoma binding protein 4
  misc_feature (1)..(393): Homolog of NCBI NO: 3122386 NR Description: WD-40 repeat protein MSI1
  misc_feature (1)..(394): Homolog of NCBI NO: 15237140 NR Description: WD-40 repeat protein (MSI1) [Arabidopsis
  misc_feature (1)..(405): Homolog of NCBI NO: 27754479 NR Description: putative WD-40 repeat protein (MSI3) [Arabidopsis
  misc_feature (1)..(405): Homolog of NCBI NO: 2394233 NR Description: WD-40 repeat protein [Arabidopsis thaliana]
  misc_feature (1)..(405): Homolog of NCBI NO: 15236251 NR Description: WD-40 repeat protein (MSI3) [Arabidopsis
  misc_feature (1)..(405): Homolog of NCBI NO: 21593624 NR Description: putative WD-40 repeat protein, MSI2 [Arabidopsis
  misc_feature (1)..(405): Homolog of NCBI NO: 15227294 NR Description: WD-40 repeat protein (MSI2) [Arabidopsis
MGQVEEDFSVWKKNTPFLYDLLISHPLEWPSLTVHWVPSTPNPYVADSYFGVHKLILGTHTSGSAQDFLMVADVVTPTPNAEPGIGGANQDPFIPKVEIRQRIRVDGEVNRARCMPQKPTLVGAKTSGCEVFLFDYAKHAAKSQTSECDPDLRLVGHDKEGYGLSWSPFKEGYLLSGSQDQKICLWDVSATPQDKVLNAMFVYEGHESAIADVSWHMKNENLFGSAGEDGRLVIWDTRTNQMQHQVKVHEREVNYLSFNPFNEWVLATASSDSTVALFDLRKLNAPLHVMSSHEGEVFQVEWDPNHETVLASSGEDRRLMVWDLNRVGEEQLEIELDAEDGPPELLFSHGGHKAKISDFAWNKNEPWVIASVAEDNSLQVWQMAESIYRDEEDAEDIKEDITQQS

SEQ ID NO: 25449 - protein, 336 aa, Arabidopsis thaliana
  peptide (1)..(336): Ceres Seq. ID no. 13487623
  misc_feature (1)..(323): Homolog of NCBI NO: 6677681 NR Description: retinoblastoma binding protein 4 [Mus musculus]
  misc_feature (1)..(323): Homolog of NCBI NO: 34871596 NR Description: similar to retinoblastoma-binding protein mRbAp48
  misc_feature (1)..(323): Homolog of NCBI NO: 5032027 NR Description: retinoblastoma binding protein 4
  misc_feature (1)..(324): Homolog of NCBI NO: 3122386 NR Description: WD-40 repeat protein MSI1
  misc_feature (1)..(325): Homolog of NCBI NO: 15237140 NR Description: WD-40 repeat protein (MSI1) [Arabidopsis
  misc_feature (1)..(336): Homolog of NCBI NO: 27754479 NR Description: putative WD-40 repeat protein (MSI3) [Arabidopsis
  misc_feature (1)..(336): Homolog of NCBI NO: 2394233 NR Description: WD-40 repeat protein [Arabidopsis thaliana]
  misc_feature (1)..(336): Homolog of NCBI NO: 15236251 NR Description: WD-40 repeat protein (MSI3) [Arabidopsis
  misc_feature (1)..(336): Homolog of NCBI NO: 21593624 NR Description: putative WD-40 repeat protein, MSI2 [Arabidopsis
  misc_feature (1)..(336): Homolog of NCBI NO: 15227294 NR Description: WD-40 repeat protein (MSI2) [Arabidopsis
MVADVVTPTPNAEPGIGGANQDPFIPKVEIRQRIRVDGEVNRARCMPQKPTLVGAKTSGCEVFLFDYAKHAAKSQTSECDPDLRLVGHDKEGYGLSWSPFKEGYLLSGSQDQKICLWDVSATPQDKVLNAMFVYEGHESAIADVSWHMKNENLFGSAGEDGRLVIWDTRTNQMQHQVKVHEREVNYLSFNPFNEWVLATASSDSTVALFDLRKLNAPLHVMSSHEGEVFQVEWDPNHETVLASSGEDRRLMVWDLNRVGEEQLEIELDAEDGPPELLFSHGGHKAKISDFAWNKNEPWVIASVAEDNSLQVWQMAESIYRDEEDAEDIKEDITQQS

SEQ ID NO: 25450 - DNA, 810 bp, Arabidopsis thaliana
  misc_feature (1)..(810): Ceres Seq. ID no. 13486998
  misc_feature: MA Experiment ID: 108435 Result: Down-regulated in Transcription
  misc_feature: MA Experiment 108435 PARAMETER Experiment Name: At_stm_Mutants_cDNA_P Parameter: Plant Line Value: wt Landsburg vs stm
  misc_feature: MA Experiment 108435 PARAMETER Experiment Name: At_stm_Mutants_cDNA_P Parameter: Tissue Value: Shoot Apical Meristem Region
  misc_feature: MA Experiment ID: 108461 Result: Up-regulated in Transcription
  misc_feature: MA Experiment 108461 PARAMETER Experiment Name: At_Germinating_Seeds_cDNA_P Parameter: Age (day) Value: 1 vs. 0
  misc_feature: MA Experiment 108461 PARAMETER Experiment Name: At_Germinating_Seeds_cDNA_P Parameter: Tissue Value: Germinating Seeds
  misc_feature: MA Experiment ID: 108462 Result: Up-regulated in Transcription
  misc_feature: MA Experiment 108462 PARAMETER Experiment Name: At_Germinating_Seeds_cDNA_P Parameter: Age (day) Value: 2 vs. 0
  misc_feature: MA Experiment 108462 PARAMETER Experiment Name: At_Germinating_Seeds_cDNA_P Parameter: Tissue Value: Germinating Seeds
  misc_feature: MA Experiment ID: 108595 Result: Down-regulated in Transcription
  misc_feature: MA Experiment 108595 PARAMETER Experiment Name: At_Ler-pi_Ovule_cDNA_P Parameter: Plant Line Value: null
  misc_feature: MA Experiment ID: 20000069 Result: Down-regulated in Transcription
  misc_feature: MA Experiment 20000069 PARAMETER Experiment Name: At_100uM_ABA_Mutants_cDNA_P Parameter: Plant Line Value: CS23
  misc_feature: MA Experiment 20000069 PARAMETER Experiment Name: At_100uM_ABA_Mutants_cDNA_P Parameter: Timepoint (hr) Value: 6
  misc_feature: MA Experiment 20000069 PARAMETER Experiment Name: At_100uM_ABA_Mutants_cDNA_P Parameter: Tissue Value: Aerial
  misc_feature: MA Experiment 20000069 PARAMETER Experiment Name: At_100uM_ABA_Mutants_cDNA_P Parameter: Treatment Value: 100uM ABA vs. No Treatment
  misc_feature: MA Experiment ID: 20000071 Result: Down-regulated in Transcription
  misc_feature: MA Experiment 20000071 PARAMETER Experiment Name: At_100uM_ABA_Mutants_cDNA_P Parameter: Plant Line Value: CS8104
  misc_feature: MA Experiment 20000071 PARAMETER Experiment Name: At_100uM_ABA_Mutants_cDNA_P Parameter: Timepoint (hr) Value: 6
  misc_feature: MA Experiment 20000071 PARAMETER Experiment Name: At_100uM_ABA_Mutants_cDNA_P Parameter: Tissue Value: Aerial
  misc_feature: MA Experiment 20000071 PARAMETER Experiment Name: At_100uM_ABA_Mutants_cDNA_P Parameter: Treatment Value: 100uM ABA vs. No Treatment
  misc_feature: MA Experiment ID: 20000072 Result: Down-regulated in Transcription
  misc_feature: MA Experiment 20000072 PARAMETER Experiment Name: At_100uM_ABA_Mutants_cDNA_P Parameter: Plant Line Value: CS8105
  misc_feature: MA Experiment 20000072 PARAMETER Experiment Name: At_100uM_ABA_Mutants_cDNA_P Parameter: Timepoint (hr) Value: 6
  misc_feature: MA Experiment 20000072 PARAMETER Experiment Name: At_100uM_ABA_Mutants_cDNA_P Parameter: Tissue Value: Aerial
  misc_feature: MA Experiment 20000072 PARAMETER Experiment Name: At_100uM_ABA_Mutants_cDNA_P Parameter: Treatment Value: 100uM ABA vs. No Treatment
  misc_feature: MA Experiment ID: 20000086 Result: Down-regulated in Transcription
  misc_feature: MA Experiment 20000086 PARAMETER Experiment Name: At_100uM_ABA_Mutants_cDNA_P Parameter: Plant Line Value: CS22
  misc_feature: MA Experiment 20000086 PARAMETER Experiment Name: At_100uM_ABA_Mutants_cDNA_P Parameter: Timepoint (hr) Value: 6
  misc_feature: MA Experiment 20000086 PARAMETER Experiment Name: At_100uM_ABA_Mutants_cDNA_P Parameter: Tissue Value: Aerial
  misc_feature: MA Experiment 20000086 PARAMETER Experiment Name: At_100uM_ABA_Mutants_cDNA_P Parameter: Treatment Value: 100uM ABA vs. No Treatment
  misc_feature: MA Experiment ID: 20000087 Result: Down-regulated in Transcription
  misc_feature: MA Experiment 20000087 PARAMETER Experiment Name: At_100uM_ABA_Mutants_cDNA_P Parameter: Plant Line Value: WS
  misc_feature: MA Experiment 20000087 PARAMETER Experiment Name: At_100uM_ABA_Mutants_cDNA_P Parameter: Timepoint (hr) Value: 6
  misc_feature: MA Experiment 20000087 PARAMETER Experiment Name: At_100uM_ABA_Mutants_cDNA_P Parameter: Tissue Value: Aerial
  misc_feature: MA Experiment 20000087 PARAMETER Experiment Name: At_100uM_ABA_Mutants_cDNA_P Parameter: Treatment Value: 100uM ABA vs. No Treatment
  misc_feature: MA Experiment ID: 20000117 Result: Down-regulated in Transcription
  misc_feature: MA Experiment 20000117 PARAMETER Experiment Name: At_100uM_ABA_Mutants_cDNA_P Parameter: Plant Line Value: Columbia
  misc_feature: MA Experiment 20000117 PARAMETER Experiment Name: At_100uM_ABA_Mutants_cDNA_P Parameter: Timepoint (hr) Value: 6
  misc_feature: MA Experiment 20000117 PARAMETER Experiment Name: At_100uM_ABA_Mutants_cDNA_P Parameter: Tissue Value: Aerial
  misc_feature: MA Experiment 20000117 PARAMETER Experiment Name: At_100uM_ABA_Mutants_cDNA_P Parameter: Treatment Value: 100uM ABA vs. No Treatment
  misc_feature: MA Experiment ID: 20000180 Result: Up-regulated in Transcription
  misc_feature: MA Experiment 20000180 PARAMETER Experiment Name: At_Germinating_Seeds_P Parameter: Age (hr) Value: 24 vs. 0
  misc_feature: MA Experiment 20000180 PARAMETER Experiment Name: At_Germinating_Seeds_P Parameter: Tissue Value: Germinating Seeds
  misc_feature: MA Experiment ID: 20000184 Result: Up-regulated in Transcription
  misc_feature: MA Experiment 20000184 PARAMETER Experiment Name: At_Shoots__P Parameter: Age (day) Value: 7
  misc_feature: MA Experiment 20000184 PARAMETER Experiment Name: At_Shoots__P Parameter: Tissue Value: Shoots vs. Whole Plant
  misc_feature: MA Experiment ID: 20000234 Result: Up-regulated in Transcription
  misc_feature: MA Experiment 20000234 PARAMETER Experiment Name: At_Siliques_P Parameter: Age (day) Value: 21
  misc_feature: MA Experiment 20000234 PARAMETER Experiment Name: At_Siliques_P Parameter: Organism Value: A. thaliana
  misc_feature: MA Experiment 20000234 PARAMETER Experiment Name: At_Siliques_P Parameter: Plant Line Value: WS
  misc_feature: MA Experiment 20000234 PARAMETER Experiment Name: At_Siliques_P Parameter: Tissue Value: Less Than 5mm Siliques vs. Whole Plant
  misc_feature: MA Experiment ID: 20000265 Result: Up-regulated in Transcription
  misc_feature: MA Experiment 20000265 PARAMETER Experiment Name: At_Open_Flower_P Parameter: Age (day) Value: 21
  misc_feature: MA Experiment 20000265 PARAMETER Experiment Name: At_Open_Flower_P Parameter: Plant Line Value: WS
  misc_feature: MA Experiment 20000265 PARAMETER Experiment Name: At_Open_Flower_P Parameter: Tissue Value: Closed Flower vs. Whole Plant
  misc_feature: MA Experiment ID: 20000437 Result: Down-regulated in Transcription
  misc_feature: MA Experiment 20000437 PARAMETER Experiment Name: At_Drought_P Parameter: Age (day) Value: 8
  misc_feature: MA Experiment 20000437 PARAMETER Experiment Name: At_Drought_P Parameter: Organism Value: A. thaliana
  misc_feature: MA Experiment 20000437 PARAMETER Experiment Name: At_Drought_P Parameter: Plant Line Value: WS
  misc_feature: MA Experiment 20000437 PARAMETER Experiment Name: At_Drought_P Parameter: Timepoint (hr) Value: 24
  misc_feature: MA Experiment 20000437 PARAMETER Experiment Name: At_Drought_P Parameter: Tissue Value: Whole Plant
  misc_feature: MA Experiment 20000437 PARAMETER Experiment Name: At_Drought_P Parameter: Treatment Value: Drought vs. No Drought
  misc_feature: MA Experiment ID: 20000439 Result: Down-regulated in Transcription
  misc_feature: MA Experiment 20000439 PARAMETER Experiment Name: At_Roots__P Parameter: Age (day) Value: 14 vs. 21
  misc_feature: MA Experiment 20000439 PARAMETER Experiment Name: At_Roots__P Parameter: Organism Value: A. thaliana
  misc_feature: MA Experiment 20000439 PARAMETER Experiment Name: At_Roots__P Parameter: Tissue Value: Roots vs. Whole Plant
  misc_feature: MA Experiment ID: 20000794 Result: Down-regulated in Transcription
  misc_feature: MA Experiment 20000794 PARAMETER Experiment Name: At_Petals_P Parameter: Age (day) Value: 23-25 days
  misc_feature: MA Experiment 20000794 PARAMETER Experiment Name: At_Petals_P Parameter: Plant Line Value: WS
  misc_feature: MA Experiment 20000794 PARAMETER Experiment Name: At_Petals_P Parameter: Tissue Value: Petals vs. Whole plant
  misc_feature: MA Experiment ID: 20001248 Result: Down-regulated in Transcription
  misc_feature: MA Experiment 20001248 PARAMETER Experiment Name: At_Far-red-induction_P Parameter: Age (day) Value: 7
  misc_feature: MA Experiment 20001248 PARAMETER Experiment Name: At_Far-red-induction_P Parameter: Light Value: Far-red vs. White
  misc_feature: MA Experiment 20001248 PARAMETER Experiment Name: At_Far-red-induction_P Parameter: Organism Value: A. thaliana
  misc_feature: MA Experiment 20001248 PARAMETER Experiment Name: At_Far-red-induction_P Parameter: Plant Line Value: Columbia
  misc_feature: MA Experiment 20001248 PARAMETER Experiment Name: At_Far-red-induction_P Parameter: Timepoint (hr) Value: 4
  misc_feature: MA Experiment 20001248 PARAMETER Experiment Name: At_Far-red-induction_P Parameter: Tissue Value: Whole Plant
  misc_feature: MA Experiment ID: 20001450 Result: Down-regulated in Transcription
  misc_feature: MA Experiment 20001450 PARAMETER Experiment Name: At_Far-red-induction_P Parameter: Age (day) Value: 7
  misc_feature: MA Experiment 20001450 PARAMETER Experiment Name: At_Far-red-induction_P Parameter: Light Value: Far-red vs. White
  misc_feature: MA Experiment 20001450 PARAMETER Experiment Name: At_Far-red-induction_P Parameter: Organism Value: A. thaliana
  misc_feature: MA Experiment 20001450 PARAMETER Experiment Name: At_Far-red-induction_P Parameter: Plant Line Value: Columbia
  misc_feature: MA Experiment 20001450 PARAMETER Experiment Name: At_Far-red-induction_P Parameter: Timepoint (hr) Value: 8
  misc_feature: MA Experiment 20001450 PARAMETER Experiment Name: At_Far-red-induction_P Parameter: Tissue Value: Whole Plant
  misc_feature: MA Experiment ID: 20001906 Result: Down-regulated in Transcription
  misc_feature: MA Experiment 20001906 PARAMETER Experiment Name: At_Drought_Reproduction_P Parameter: Age (day) Value: 35
  misc_feature: MA Experiment 20001906 PARAMETER Experiment Name: At_Drought_Reproduction_P Parameter: Organism Value: A. thaliana
  misc_feature: MA Experiment 20001906 PARAMETER Experiment Name: At_Drought_Reproduction_P Parameter: Plant Line Value: WS
  misc_feature: MA Experiment 20001906 PARAMETER Experiment Name: At_Drought_Reproduction_P Parameter: Timepoint (day) Value: 5
  misc_feature: MA Experiment 20001906 PARAMETER Experiment Name: At_Drought_Reproduction_P Parameter: Tissue Value: Siliques
  misc_feature: MA Experiment 20001906 PARAMETER Experiment Name: At_Drought_Reproduction_P Parameter: Treatment Value: Drought vs. No Drought
aatactacatgctctaatcacgtccttgtagaggaaaagaaaaaaaaatggctgcttcatcttcctctttcactctctgtaatcacaccacacttcgtactctccctctgagaaagacccttgtcaccaaaacccaattttcagttcccacaaaatcatcagaatctaacttctttggctccacactcactcactcattgtatatctccccagtctcttcctcttctctcaaaggcttaatctttgccaaggttaacaagggtcaggctgcaccagacttcacactaaaggatcaaaacggaaagccggtgagcctcaaaaagtataaagggaagcctgttgttctctacttctaccctgcagatgaaacccctggctgcaccaagcaggcttgtgctttcagagactcttatgagaaattcaagaaagctggtgcagaggtcattggcattagtggagatgactctgcttctcacaaggcgtttgcaagcaaatacaaactaccgtatacattgttaagcgacgaagggaataaggtgagaaaagattggggagtgcctggagacctgtttggagcattgccagggagacagacttacgttcttgacaaaaacggtgttgttcagctcatctacaacaaccagttccagcctgagaaacacatcgacgagaccttgaagtttctcaaagctgcttgatcattctctctttctcttctttcatgcatgtctcatgtctgtctccatgagaccatgaccttcttatattgtttctgttgaatatgaattttcaataataccatgttatacc

SEQ ID NO: 25451 - protein, 216 aa, Arabidopsis thaliana
  peptide (1)..(216): Ceres Seq. ID no. 13486999
  misc_feature (71)..(210): Pfam Name: AhpC/TSA family Pfam Description: AhpC/TSA family
  misc_feature (69)..(214): Homolog of NCBI NO: 16081486 NR Description: thiol-specific antioxidant related protein
  misc_feature (67)..(214): Homolog of NCBI NO: 21673494 NR Description: bacterioferritin comigratory protein, thiol
  misc_feature (69)..(214): Homolog of NCBI NO: 15898858 NR Description: Peroxiredoxin, bacterioferritin comigratory
  misc_feature (68)..(214): Homolog of NCBI NO: 23041480 NR Description: hypothetical protein [Trichodesmium erythraeum
  misc_feature (68)..(214): Homolog of NCBI NO: 28850433 NR Description: similar to Anabaena sp. (strain PCC 7120).
  misc_feature (69)..(214): Homolog of NCBI NO: 23125049 NR Description: hypothetical protein [Nostoc punctiforme]
  misc_feature (69)..(214): Homolog of NCBI NO: 17230675 NR Description: bacterioferritin comigratory protein [Nostoc sp.
  misc_feature (23)..(216): Homolog of NCBI NO: 39748708 NR Description: peroxiredoxin Q [Gentiana triflora]
  misc_feature (37)..(215): Homolog of NCBI NO: 6899842 NR Description: peroxiredoxin Q [Sedum lineare]
  misc_feature (1)..(216): Homolog of NCBI NO: 15230982 NR Description: peroxiredoxin -related [Arabidopsis thaliana]
MAASSSSFTLCNHTTLRTLPLRKTLVTKTQFSVPTKSSESNFFGSTLTHSLYISPVSSSSLKGLIFAKVNKGQAAPDFTLKDQNGKPVSLKKYKGKPVVLYFYPADETPGCTKQACAFRDSYEKFKKAGAEVIGISGDDSASHKAFASKYKLPYTLLSDEGNKVRKDWGVPGDLFGALPGRQTYVLDKNGVVQLIYNNQFQPEKHIDETLKFLKAA

SEQ ID NO: 25452 - DNA, 1177 bp, Arabidopsis thaliana
  misc_feature (1)..(1177): Ceres Seq. ID no. 12370381
  misc_feature: MA Experiment ID: 108434 Result: Up-regulated in Transcription
  misc_feature: MA Experiment 108434 PARAMETER Experiment Name: At_Root_Tips_cDNA_P Parameter: Tissue Value: Root Tips
  misc_feature: MA Experiment ID: 108435 Result: Up-regulated in Transcription
  misc_feature: MA Experiment 108435 PARAMETER Experiment Name: At_stm_Mutants_cDNA_P Parameter: Plant Line Value: wt Landsburg vs stm
  misc_feature: MA Experiment 108435 PARAMETER Experiment Name: At_stm_Mutants_cDNA_P Parameter: Tissue Value: Shoot Apical Meristem Region
  misc_feature: MA Experiment ID: 108461 Result: Down-regulated in Transcription
  misc_feature: MA Experiment 108461 PARAMETER Experiment Name: At_Germinating_Seeds_cDNA_P Parameter: Age (day) Value: 1 vs. 0
  misc_feature: MA Experiment 108461 PARAMETER Experiment Name: At_Germinating_Seeds_cDNA_P Parameter: Tissue Value: Germinating Seeds
  misc_feature: MA Experiment ID: 108462 Result: Down-regulated in Transcription
  misc_feature: MA Experiment 108462 PARAMETER Experiment Name: At_Germinating_Seeds_cDNA_P Parameter: Age (day) Value: 2 vs. 0
  misc_feature: MA Experiment 108462 PARAMETER Experiment Name: At_Germinating_Seeds_cDNA_P Parameter: Tissue Value: Germinating Seeds
  misc_feature: MA Experiment ID: 108463 Result: Down-regulated in Transcription
  misc_feature: MA Experiment 108463 PARAMETER Experiment Name: At_Germinating_Seeds_cDNA_P Parameter: Age (day) Value: 3 vs. 0
  misc_feature: MA Experiment 108463 PARAMETER Experiment Name: At_Germinating_Seeds_cDNA_P Parameter: Tissue Value: Germinating Seeds
  misc_feature: MA Experiment ID: 108464 Result: Down-regulated in Transcription
  misc_feature: MA Experiment 108464 PARAMETER Experiment Name: At_Germinating_Seeds_cDNA_P Parameter: Age (day) Value: 4 vs. 0
  misc_feature: MA Experiment 108464 PARAMETER Experiment Name: At_Germinating_Seeds_cDNA_P Parameter: Tissue Value: Germinating Seeds
  misc_feature: MA Experiment ID: 108573 Result: Down-regulated in Transcription
  misc_feature: MA Experiment 108573 PARAMETER Experiment Name: At_Drought_cDNA_P Parameter: Timepoint (hr) Value: 6
  misc_feature: MA Experiment 108573 PARAMETER Experiment Name: At_Drought_cDNA_P Parameter: Tissue Value: Aerial
  misc_feature: MA Experiment 108573 PARAMETER Experiment Name: At_Drought_cDNA_P Parameter: Treatment Value: Drought vs. No Drought
  misc_feature: MA Experiment ID: 20000069 Result: Up-regulated in Transcription
  misc_feature: MA Experiment 20000069 PARAMETER Experiment Name: At_100uM_ABA_Mutants_cDNA_P Parameter: Plant Line Value: CS23
  misc_feature: MA Experiment 20000069 PARAMETER Experiment Name: At_100uM_ABA_Mutants_cDNA_P Parameter: Timepoint (hr) Value: 6
  misc_feature: MA Experiment 20000069 PARAMETER Experiment Name: At_100uM_ABA_Mutants_cDNA_P Parameter: Tissue Value: Aerial
  misc_feature: MA Experiment 20000069 PARAMETER Experiment Name: At_100uM_ABA_Mutants_cDNA_P Parameter: Treatment Value: 100uM ABA vs. No Treatment
  misc_feature: MA Experiment ID: 20000088 Result: Up-regulated in Transcription
  misc_feature: MA Experiment 20000088 PARAMETER Experiment Name: At_100uM_ABA_Mutants_cDNA_P Parameter: Plant Line Value: Landsberg
  misc_feature: MA Experiment 20000088 PARAMETER Experiment Name: At_100uM_ABA_Mutants_cDNA_P Parameter: Timepoint (hr) Value: 6
  misc_feature: MA Experiment 20000088 PARAMETER Experiment Name: At_100uM_ABA_Mutants_cDNA_P Parameter: Tissue Value: Aerial
  misc_feature: MA Experiment 20000088 PARAMETER Experiment Name: At_100uM_ABA_Mutants_cDNA_P Parameter: Treatment Value: 100uM ABA vs. No Treatment
  misc_feature: MA Experiment ID: 20000111 Result: Up-regulated in Transcription
  misc_feature: MA Experiment 20000111 PARAMETER Experiment Name: At_42deg_Heat_cDNA_P Parameter: Temperature (deg C) Value: 42 vs. 22
  misc_feature: MA Experiment 20000111 PARAMETER Experiment Name: At_42deg_Heat_cDNA_P Parameter: Timepoint (hr) Value: 6
  misc_feature: MA Experiment 20000111 PARAMETER Experiment Name: At_42deg_Heat_cDNA_P Parameter: Tissue Value: Aerial
  misc_feature: MA Experiment ID: 20000113 Result: Up-regulated in Transcription
  misc_feature: MA Experiment 20000113 PARAMETER Experiment Name: At_42deg_Heat_cDNA_P Parameter: Temperature (deg C) Value: 42 vs. 22
  misc_feature: MA Experiment 20000113 PARAMETER Experiment Name: At_42deg_Heat_cDNA_P Parameter: Timepoint (hr) Value: 8
  misc_feature: MA Experiment 20000113 PARAMETER Experiment Name: At_42deg_Heat_cDNA_P Parameter: Tissue Value: Aerial
  misc_feature: MA Experiment ID: 20000173 Result: Up-regulated in Transcription
  misc_feature: MA Experiment 20000173 PARAMETER Experiment Name: At_42deg_Heat_P Parameter: Age (day) Value: 14
  misc_feature: MA Experiment 20000173 PARAMETER Experiment Name: At_42deg_Heat_P Parameter: Organism Value: A. thaliana
  misc_feature: MA Experiment 20000173 PARAMETER Experiment Name: At_42deg_Heat_P Parameter: Plant Line Value: WS
  misc_feature: MA Experiment 20000173 PARAMETER Experiment Name: At_42deg_Heat_P Parameter: Temperature (deg C) Value: 42 vs. 22
  misc_feature: MA Experiment 20000173 PARAMETER Experiment Name: At_42deg_Heat_P Parameter: Timepoint (hr) Value: 6
  misc_feature: MA Experiment 20000173 PARAMETER Experiment Name: At_42deg_Heat_P Parameter: Tissue Value: Aerial
  misc_feature: MA Experiment ID: 20000180 Result: Down-regulated in Transcription
  misc_feature: MA Experiment 20000180 PARAMETER Experiment Name: At_Germinating_Seeds_P Parameter: Age (hr) Value: 24 vs. 0
  misc_feature: MA Experiment 20000180 PARAMETER Experiment Name: At_Germinating_Seeds_P Parameter: Tissue Value: Germinating Seeds
  misc_feature: MA Experiment ID: 20001247 Result: Down-regulated in Transcription
  misc_feature: MA Experiment 20001247 PARAMETER Experiment Name: At_Far-red-induction_P Parameter: Age (day) Value: 7
  misc_feature: MA Experiment 20001247 PARAMETER Experiment Name: At_Far-red-induction_P Parameter: Light Value: Far-red vs. White
  misc_feature: MA Experiment 20001247 PARAMETER Experiment Name: At_Far-red-induction_P Parameter: Organism Value: A. thaliana
  misc_feature: MA Experiment 20001247 PARAMETER Experiment Name: At_Far-red-induction_P Parameter: Plant Line Value: Columbia
  misc_feature: MA Experiment 20001247 PARAMETER Experiment Name: At_Far-red-induction_P Parameter: Timepoint (hr) Value: 1
  misc_feature: MA Experiment 20001247 PARAMETER Experiment Name: At_Far-red-induction_P Parameter: Tissue Value: Whole Plant
agaagtctgagcttaaaccctaaacccctttctccacgatcttccttttcctctctctgcgacttgaagcaaagtttccagaaaaagagatgaacaacgtcaaagttccaaagataccaggtggtggtgccatttcgacgttgcttaaggttgggattattggtgggcttggtctctatggtgctacgcacagtctctacaatgttgaaggaggacatcgagccatcatgttcaatcgtttagtcggtattaaagataaggtttaccctgagggtacacaccttatgattccttggtttgaaaggccggtcatctatgacgttcgtgctcgaccttaccttgttgagagtacatccggaagccgtgatcttcagatggtgaaaattgggcttagggttctcacacgtcccatggcagaccagttacctgaaatctacagaagccttggtgagaactacagcgagagagttctaccttctataatcaacgagactttgaaagctgtggttgctcagtacaatgcaagccagcttattactcagagagaggcggtcagtagggagatcaggaagattctgactgaacgagcagcaaacttcaatgttgcgcttgacgatgtgtccatcacaaacctgacattcgggaaggagttcacagctgccattgaagcaaagcaggtggcggctcaagaggctgagcgggctaagttcattgttgagaaggccgaacaagacaagagaagtgctgttatccgcgcccagggagaagccaagagtgctcagctcattggtcaagcaattgcaaacaaccaagcgtttatcacgctcaggaagatcgaggctgcaagagagattgcacagaccatagcaaactcggcgaacaaggtttacttgagctcagacgatcttttgcttaacctacaagggatgaatttggatgttgatgcaaagaactagagaggtttcttaagtaaaactgcatgtgggtcatttcgtcttttaagttcctagaatccgttggaacaaaagcttgatttgtactactaaatactacttttaaaattcttgggatcagtctatctcaaggtgaaagttgaaaaagaagatactgtcttgctgaatgagttaattgtaataaacttgtcgtttgggggagaaaaacacttgcatttggattt

SEQ ID NO: 25453 - protein, 288 aa, Arabidopsis thaliana
  peptide (1)..(288): Ceres Seq. ID no. 12370382
  misc_feature (1)..(276): Homolog of NCBI NO: 6321670 NR Description: Possible role in aging; Phb2p [Saccharomyces
  misc_feature (5)..(287): Homolog of NCBI NO: 7716456 NR Description: prohibitin [Zea mays]
  misc_feature (5)..(282): Homolog of NCBI NO: 34394832 NR Description: putative prohibitin [Oryza sativa (japonica
  misc_feature (1)..(278): Homolog of NCBI NO: 15241424 NR Description: prohibitin; protein id: At5g44140.1 [Arabidopsis
  misc_feature (1)..(282): Homolog of NCBI NO: 7716462 NR Description: prohibitin [Zea mays]
  misc_feature (5)..(283): Homolog of NCBI NO: 15219569 NR Description: putative prohibitin 2
  misc_feature (3)..(287): Homolog of NCBI NO: 15225374 NR Description: putative prohibitin
  misc_feature (1)..(287): Homolog of NCBI NO: 12751303 NR Description: prohibitin 1-like protein [Brassica napus]
  misc_feature (1)..(288): Homolog of NCBI NO: 21593626 NR Description: prohibitin-like protein [Arabidopsis thaliana]
  misc_feature (1)..(288): Homolog of NCBI NO: 15235317 NR Description: prohibitin-like protein
MNNVKVPKIPGGGAISTLLKVGIIGGLGLYGATHSLYNVEGGHRAIMFNRLVGIKDKVYPEGTHLMIPWFERPVIYDVRARPYLVESTSGSRDLQMVKIGLRVLTRPMADQLPEIYRSLGENYSERVLPSIINETLKAVVAQYNASQLITQREAVSREIRKILTERAANFNVALDDVSITNLTFGKEFTAAIEAKQVAAQEAERAKFIVEKAEQDKRSAVIRAQGEAKSAQLIGQAIANNQAFITLRKIEAAREIAQTIANSANKVYLSSDDLLLNLQGMNLDVDAKN

SEQ ID NO: 25454 - protein, 242 aa, Arabidopsis thaliana
  peptide (1)..(242): Ceres Seq. ID no. 12370383
  misc_feature (1)..(230): Homolog of NCBI NO: 6321670 NR Description: Possible role in aging; Phb2p [Saccharomyces
  misc_feature (1)..(241): Homolog of NCBI NO: 7716456 NR Description: prohibitin [Zea mays]
  misc_feature (1)..(236): Homolog of NCBI NO: 34394832 NR Description: putative prohibitin [Oryza sativa (japonica
  misc_feature (1)..(232): Homolog of NCBI NO: 15241424 NR Description: prohibitin; protein id: At5g44140.1 [Arabidopsis
  misc_feature (1)..(236): Homolog of NCBI NO: 7716462 NR Description: prohibitin [Zea mays]
  misc_feature (1)..(237): Homolog of NCBI NO: 15219569 NR Description: putative prohibitin 2
  misc_feature (1)..(241): Homolog of NCBI NO: 15225374 NR Description: putative prohibitin
  misc_feature (1)..(241): Homolog of NCBI NO: 12751303 NR Description: prohibitin 1-like protein [Brassica napus]
  misc_feature (1)..(242): Homolog of NCBI NO: 21593626 NR Description: prohibitin-like protein [Arabidopsis thaliana]
  misc_feature (1)..(242): Homolog of NCBI NO: 15235317 NR Description: prohibitin-like protein
MFNRLVGIKDKVYPEGTHLMIPWFERPVIYDVRARPYLVESTSGSRDLQMVKIGLRVLTRPMADQLPEIYRSLGENYSERVLPSIINETLKAVVAQYNASQLITQREAVSREIRKILTERAANFNVALDDVSITNLTFGKEFTAAIEAKQVAAQEAERAKFIVEKAEQDKRSAVIRAQGEAKSAQLIGQAIANNQAFITLRKIEAAREIAQTIANSANKVYLSSDDLLLNLQGMNLDVDAKN

SEQ ID NO: 25455 - protein, 223 aa, Arabidopsis thaliana
  peptide (1)..(223): Ceres Seq. ID no. 12370384
  misc_feature (1)..(223): Homolog of NCBI NO: 21593626 NR Description: prohibitin-like protein [Arabidopsis thaliana]
  misc_feature (1)..(223): Homolog of NCBI NO: 15235317 NR Description: prohibitin-like protein
  misc_feature (1)..(211): Homolog of NCBI NO: 6321670 NR Description: Possible role in aging; Phb2p [Saccharomyces
  misc_feature (1)..(222): Homolog of NCBI NO: 7716456 NR Description: prohibitin [Zea mays]
  misc_feature (1)..(217): Homolog of NCBI NO: 34394832 NR Description: putative prohibitin [Oryza sativa (japonica
  misc_feature (1)..(213): Homolog of NCBI NO: 15241424 NR Description: prohibitin; protein id: At5g44140.1 [Arabidopsis
  misc_feature (1)..(217): Homolog of NCBI NO: 7716462 NR Description: prohibitin [Zea mays]
  misc_feature (1)..(218): Homolog of NCBI NO: 15219569 NR Description: putative prohibitin 2
  misc_feature (1)..(222): Homolog of NCBI NO: 15225374 NR Description: putative prohibitin
  misc_feature (1)..(222): Homolog of NCBI NO: 12751303 NR Description: prohibitin 1-like protein [Brassica napus]
MIPWFERPVIYDVRARPYLVESTSGSRDLQMVKIGLRVLTRPMADQLPEIYRSLGENYSERVLPSIINETLKAVVAQYNASQLITQREAVSREIRKILTERAANFNVALDDVSITNLTFGKEFTAAIEAKQVAAQEAERAKFIVEKAEQDKRSAVIRAQGEAKSAQLIGQAIANNQAFITLRKIEAAREIAQTIANSANKVYLSSDDLLLNLQGMNLDVDAKN

SEQ ID NO: 25456 - DNA, 1158 bp, Arabidopsis thaliana
  misc_feature (1)..(1158): Ceres Seq. ID no. 13488122
  misc_feature: MA Experiment ID: 108434 Result: Down-regulated in Transcription
  misc_feature: MA Experiment 108434 PARAMETER Experiment Name: At_Root_Tips_cDNA_P Parameter: Tissue Value: Root Tips
  misc_feature: MA Experiment ID: 108462 Result: Down-regulated in Transcription
  misc_feature: MA Experiment 108462 PARAMETER Experiment Name: At_Germinating_Seeds_cDNA_P Parameter: Age (day) Value: 2 vs. 0
  misc_feature: MA Experiment 108462 PARAMETER Experiment Name: At_Germinating_Seeds_cDNA_P Parameter: Tissue Value: Germinating Seeds
  misc_feature: MA Experiment ID: 108464 Result: Down-regulated in Transcription
  misc_feature: MA Experiment 108464 PARAMETER Experiment Name: At_Germinating_Seeds_cDNA_P Parameter: Age (day) Value: 4 vs. 0
  misc_feature: MA Experiment 108464 PARAMETER Experiment Name: At_Germinating_Seeds_cDNA_P Parameter: Tissue Value: Germinating Seeds
  misc_feature: MA Experiment ID: 108469 Result: Up-regulated in Transcription
  misc_feature: MA Experiment ID: 108574 Result: Up-regulated in Transcription
  misc_feature: MA Experiment 108574 PARAMETER Experiment Name: At_Wounding__cDNA_P Parameter: Timepoint (hr) Value: 1
  misc_feature: MA Experiment 108574 PARAMETER Experiment Name: At_Wounding__cDNA_P Parameter: Tissue Value: Aerial
  misc_feature: MA Experiment 108574 PARAMETER Experiment Name: At_Wounding__cDNA_P Parameter: Treatment Value: Wounding vs. No Wounding
  misc_feature: MA Experiment ID: 108579 Result: Up-regulated in Transcription
  misc_feature: MA Experiment 108579 PARAMETER Experiment Name: At_4deg_Cold_cDNA_P Parameter: Temperature (deg C) Value: 4 vs. 22
  misc_feature: MA Experiment 108579 PARAMETER Experiment Name: At_4deg_Cold_cDNA_P Parameter: Timepoint (hr) Value: 6
  misc_feature: MA Experiment 108579 PARAMETER Experiment Name: At_4deg_Cold_cDNA_P Parameter: Tissue Value: Aerial
  misc_feature: MA Experiment ID: 108585 Result: Up-regulated in Transcription
  misc_feature: MA Experiment 108585 PARAMETER Experiment Name: At_5mM_NaNP_cDNA_P Parameter: Timepoint (hr) Value: 6
  misc_feature: MA Experiment 108585 PARAMETER Experiment Name: At_5mM_NaNP_cDNA_P Parameter: Tissue Value: Aerial
  misc_feature: MA Experiment 108585 PARAMETER Experiment Name: At_5mM_NaNP_cDNA_P Parameter: Treatment Value: null
  misc_feature: MA Experiment ID: 108594 Result: Up-regulated in Transcription
  misc_feature: MA Experiment 108594 PARAMETER Experiment Name: At_Ler-rhl_Root_cDNA_P Parameter: Plant Line Value: null
  misc_feature: MA Experiment ID: 108595 Result: Up-regulated in Transcription
  misc_feature: MA Experiment 108595 PARAMETER Experiment Name: At_Ler-pi_Ovule_cDNA_P Parameter: Plant Line Value: null
  misc_feature: MA Experiment ID: 108668 Result: Up-regulated in Transcription
  misc_feature: MA Experiment 108668 PARAMETER Experiment Name: At_2mM_SA_cDNA_P Parameter: Plant Line Value: WS
  misc_feature: MA Experiment 108668 PARAMETER Experiment Name: At_2mM_SA_cDNA_P Parameter: Timepoint (hr) Value: 6
  misc_feature: MA Experiment 108668 PARAMETER Experiment Name: At_2mM_SA_cDNA_P Parameter: Treatment Value: 2mM SA vs. No Treatment
  misc_feature: MA Experiment ID: 20000072 Result: Up-regulated in Transcription
  misc_feature: MA Experiment 20000072 PARAMETER Experiment Name: At_100uM_ABA_Mutants_cDNA_P Parameter: Plant Line Value: CS8105
  misc_feature: MA Experiment 20000072 PARAMETER Experiment Name: At_100uM_ABA_Mutants_cDNA_P Parameter: Timepoint (hr) Value: 6
  misc_feature: MA Experiment 20000072 PARAMETER Experiment Name: At_100uM_ABA_Mutants_cDNA_P Parameter: Tissue Value: Aerial
  misc_feature: MA Experiment 20000072 PARAMETER Experiment Name: At_100uM_ABA_Mutants_cDNA_P Parameter: Treatment Value: 100uM ABA vs. No Treatment
  misc_feature: MA Experiment ID: 20000087 Result: Up-regulated in Transcription
  misc_feature: MA Experiment 20000087 PARAMETER Experiment Name: At_100uM_ABA_Mutants_cDNA_P Parameter: Plant Line Value: WS
  misc_feature: MA Experiment 20000087 PARAMETER Experiment Name: At_100uM_ABA_Mutants_cDNA_P Parameter: Timepoint (hr) Value: 6
  misc_feature: MA Experiment 20000087 PARAMETER Experiment Name: At_100uM_ABA_Mutants_cDNA_P Parameter: Tissue Value: Aerial
  misc_feature: MA Experiment 20000087 PARAMETER Experiment Name: At_100uM_ABA_Mutants_cDNA_P Parameter: Treatment Value: 100uM ABA vs. No Treatment
  misc_feature: MA Experiment ID: 20000088 Result: Up-regulated in Transcription
  misc_feature: MA Experiment 20000088 PARAMETER Experiment Name: At_100uM_ABA_Mutants_cDNA_P Parameter: Plant Line Value: Landsberg
  misc_feature: MA Experiment 20000088 PARAMETER Experiment Name: At_100uM_ABA_Mutants_cDNA_P Parameter: Timepoint (hr) Value: 6
  misc_feature: MA Experiment 20000088 PARAMETER Experiment Name: At_100uM_ABA_Mutants_cDNA_P Parameter: Tissue Value: Aerial
  misc_feature: MA Experiment 20000088 PARAMETER Experiment Name: At_100uM_ABA_Mutants_cDNA_P Parameter: Treatment Value: 100uM ABA vs. No Treatment
  misc_feature: MA Experiment ID: 20000089 Result: Up-regulated in Transcription
  misc_feature: MA Experiment ID: 20000112 Result: Up-regulated in Transcription
  misc_feature: MA Experiment 20000112 PARAMETER Experiment Name: At_42deg_Heat_cDNA_P Parameter: Temperature (deg C) Value: 42 vs. 22
  misc_feature: MA Experiment 20000112 PARAMETER Experiment Name: At_42deg_Heat_cDNA_P Parameter: Timepoint (hr) Value: 2
  misc_feature: MA Experiment 20000112 PARAMETER Experiment Name: At_42deg_Heat_cDNA_P Parameter: Tissue Value: Aerial
  misc_feature: MA Experiment ID: 20000113 Result: Up-regulated in Transcription
  misc_feature: MA Experiment 20000113 PARAMETER Experiment Name: At_42deg_Heat_cDNA_P Parameter: Temperature (deg C) Value: 42 vs. 22
  misc_feature: MA Experiment 20000113 PARAMETER Experiment Name: At_42deg_Heat_cDNA_P Parameter: Timepoint (hr) Value: 8
  misc_feature: MA Experiment 20000113 PARAMETER Experiment Name: At_42deg_Heat_cDNA_P Parameter: Tissue Value: Aerial
  misc_feature: MA Experiment ID: 20000117 Result: Up-regulated in Transcription
  misc_feature: MA Experiment 20000117 PARAMETER Experiment Name: At_100uM_ABA_Mutants_cDNA_P Parameter: Plant Line Value: Columbia
  misc_feature: MA Experiment 20000117 PARAMETER Experiment Name: At_100uM_ABA_Mutants_cDNA_P Parameter: Timepoint (hr) Value: 6
  misc_feature: MA Experiment 20000117 PARAMETER Experiment Name: At_100uM_ABA_Mutants_cDNA_P Parameter: Tissue Value: Aerial
  misc_feature: MA Experiment 20000117 PARAMETER Experiment Name: At_100uM_ABA_Mutants_cDNA_P Parameter: Treatment Value: 100uM ABA vs. No Treatment
  misc_feature: MA Experiment ID: 20000182 Result: Up-regulated in Transcription
  misc_feature: MA Experiment 20000182 PARAMETER Experiment Name: At_2mM_SA_P Parameter: Age (day) Value: 14
  misc_feature: MA Experiment 20000182 PARAMETER Experiment Name: At_2mM_SA_P Parameter: Organism Value: A. thaliana
  misc_feature: MA Experiment 20000182 PARAMETER Experiment Name: At_2mM_SA_P Parameter: Plant Line Value: WS
  misc_feature: MA Experiment 20000182 PARAMETER Experiment Name: At_2mM_SA_P Parameter: Timepoint (hr) Value: 6
  misc_feature: MA Experiment 20000182 PARAMETER Experiment Name: At_2mM_SA_P Parameter: Tissue Value: Aerial
  misc_feature: MA Experiment 20000182 PARAMETER Experiment Name: At_2mM_SA_P Parameter: Treatment Value: 2mM SA vs. No Treatment
  misc_feature: MA Experiment ID: 20000184 Result: Down-regulated in Transcription
  misc_feature: MA Experiment 20000184 PARAMETER Experiment Name: At_Shoots__P Parameter: Age (day) Value: 7
  misc_feature: MA Experiment 20000184 PARAMETER Experiment Name: At_Shoots__P Parameter: Tissue Value: Shoots vs. Whole Plant
  misc_feature: MA Experiment ID: 20000185 Result: Down-regulated in Transcription
  misc_feature: MA Experiment 20000185 PARAMETER Experiment Name: At_Roots__P Parameter: Age (day) Value: 7 vs. 21
  misc_feature: MA Experiment 20000185 PARAMETER Experiment Name: At_Roots__P Parameter: Organism Value: A. thaliana
  misc_feature: MA Experiment 20000185 PARAMETER Experiment Name: At_Roots__P Parameter: Tissue Value: Roots vs. Whole Plant
  misc_feature: MA Experiment ID: 20000224 Result: Up-regulated in Transcription
  misc_feature: MA Experiment ID: 20000264 Result: Down-regulated in Transcription
  misc_feature: MA Experiment 20000264 PARAMETER Experiment Name: At_Open_Flower_P Parameter: Age (day) Value: 21
  misc_feature: MA Experiment 20000264 PARAMETER Experiment Name: At_Open_Flower_P Parameter: Plant Line Value: WS
  misc_feature: MA Experiment 20000264 PARAMETER Experiment Name: At_Open_Flower_P Parameter: Tissue Value: Open Flower vs. Whole Plant
  misc_feature: MA Experiment ID: 20000265 Result: Down-regulated in Transcription
  misc_feature: MA Experiment 20000265 PARAMETER Experiment Name: At_Open_Flower_P Parameter: Age (day) Value: 21
  misc_feature: MA Experiment 20000265 PARAMETER Experiment Name: At_Open_Flower_P Parameter: Plant Line Value: WS
  misc_feature: MA Experiment 20000265 PARAMETER Experiment Name: At_Open_Flower_P Parameter: Tissue Value: Closed Flower vs. Whole Plant
  misc_feature: MA Experiment ID: 20000267 Result: Up-regulated in Transcription
  misc_feature: MA Experiment 20000267 PARAMETER Experiment Name: At_Drought_P Parameter: Age (day) Value: 7
  misc_feature: MA Experiment 20000267 PARAMETER Experiment Name: At_Drought_P Parameter: Organism Value: A. thaliana
  misc_feature: MA Experiment 20000267 PARAMETER Experiment Name: At_Drought_P Parameter: Plant Line Value: WS
  misc_feature: MA Experiment 20000267 PARAMETER Experiment Name: At_Drought_P Parameter: Timepoint (hr) Value: 6
  misc_feature: MA Experiment 20000267 PARAMETER Experiment Name: At_Drought_P Parameter: Tissue Value: Whole Plant
  misc_feature: MA Experiment 20000267 PARAMETER Experiment Name: At_Drought_P Parameter: Treatment Value: Drought vs. No Drought
  misc_feature: MA Experiment ID: 20000268 Result: Down-regulated in Transcription
  misc_feature: MA Experiment 20000268 PARAMETER Experiment Name: At_100mM_NaCl__P Parameter: Age (day) Value: 14
  misc_feature: MA Experiment 20000268 PARAMETER Experiment Name: At_100mM_NaCl__P Parameter: Organism Value: A. thaliana
  misc_feature: MA Experiment 20000268 PARAMETER Experiment Name: At_100mM_NaCl__P Parameter: Plant Line Value: WS
  misc_feature: MA Experiment 20000268 PARAMETER Experiment Name: At_100mM_NaCl__P Parameter: Timepoint (hr) Value: 6
  misc_feature: MA Experiment 20000268 PARAMETER Experiment Name: At_100mM_NaCl__P Parameter: Tissue Value: Whole Plant
  misc_feature: MA Experiment 20000268 PARAMETER Experiment Name: At_100mM_NaCl__P Parameter: Treatment Value: 100mM NaCl vs. No Treatment
  misc_feature: MA Experiment ID: 20000438 Result: Down-regulated in Transcription
  misc_feature: MA Experiment 20000438 PARAMETER Experiment Name: At_Shoots__P Parameter: Age (day) Value: 14
  misc_feature: MA Experiment 20000438 PARAMETER Experiment Name: At_Shoots__P Parameter: Tissue Value: Shoots vs. Whole Plant
  misc_feature: MA Experiment ID: 20000439 Result: Down-regulated in Transcription
  misc_feature: MA Experiment 20000439 PARAMETER Experiment Name: At_Roots__P Parameter: Age (day) Value: 14 vs. 21
  misc_feature: MA Experiment 20000439 PARAMETER Experiment Name: At_Roots__P Parameter: Organism Value: A. thaliana
  misc_feature: MA Experiment 20000439 PARAMETER Experiment Name: At_Roots__P Parameter: Tissue Value: Roots vs. Whole Plant
  misc_feature: MA Experiment ID: 20000441 Result: Up-regulated in Transcription
  misc_feature: MA Experiment 20000441 PARAMETER Experiment Name: At_1uM_BR-BRZ__P Parameter: Tissue Value: Shoot Apices
  misc_feature: MA Experiment 20000441 PARAMETER Experiment Name: At_1uM_BR-BRZ__P Parameter: Treatment Value: 1uM BR vs. No Treatment
  misc_feature: MA Experiment ID: 20000460 Result: Up-regulated in Transcription
  misc_feature: MA Experiment 20000460 PARAMETER Experiment Name: At_10percent_PEG_P Parameter: Age (day) Value: 12
  misc_feature: MA Experiment 20000460 PARAMETER Experiment Name: At_10percent_PEG_P Parameter: Organism Value: A. thaliana
  misc_feature: MA Experiment 20000460 PARAMETER Experiment Name: At_10percent_PEG_P Parameter: Plant Line Value: WS
  misc_feature: MA Experiment 20000460 PARAMETER Experiment Name: At_10percent_PEG_P Parameter: Timepoint (day) Value: 12
  misc_feature: MA Experiment 20000460 PARAMETER Experiment Name: At_10percent_PEG_P Parameter: Tissue Value: Whole Plant
  misc_feature: MA Experiment 20000460 PARAMETER Experiment Name: At_10percent_PEG_P Parameter: Treatment Value: 10percent PEG vs. No Treatment
  misc_feature: MA Experiment ID: 20000495 Result: Down-regulated in Transcription
  misc_feature: MA Experiment 20000495 PARAMETER Experiment Name: At_Guard_Cells_P Parameter: Harvest Date Value: 8/2/2002
  misc_feature: MA Experiment 20000495 PARAMETER Experiment Name: At_Guard_Cells_P Parameter: Organism Value: A. thaliana
  misc_feature: MA Experiment 20000495 PARAMETER Experiment Name: At_Guard_Cells_P Parameter: Tissue Value: Guard Cells vs. Leaves
  misc_feature: MA Experiment ID: 20000496 Result: Down-regulated in Transcription
  misc_feature: MA Experiment 20000496 PARAMETER Experiment Name: At_Guard_Cells_P Parameter: Harvest Date Value: 7/19/2002
  misc_feature: MA Experiment 20000496 PARAMETER Experiment Name: At_Guard_Cells_P Parameter: Organism Value: Canola
  misc_feature: MA Experiment 20000496 PARAMETER Experiment Name: At_Guard_Cells_P Parameter: Tissue Value: Guard Cells vs. Leaves
  misc_feature: MA Experiment ID: 20000527 Result: Up-regulated in Transcription
  misc_feature: MA Experiment 20000527 PARAMETER Experiment Name: At_10percent_PEG_P Parameter: Age (day) Value: 20
  misc_feature: MA Experiment 20000527 PARAMETER Experiment Name: At_10percent_PEG_P Parameter: Organism Value: A. thaliana
  misc_feature: MA Experiment 20000527 PARAMETER Experiment Name: At_10percent_PEG_P Parameter: Plant Line Value: WS
  misc_feature: MA Experiment 20000527 PARAMETER Experiment Name: At_10percent_PEG_P Parameter: Timepoint (day) Value: 20
  misc_feature: MA Experiment 20000527 PARAMETER Experiment Name: At_10percent_PEG_P Parameter: Tissue Value: Whole Plant
  misc_feature: MA Experiment 20000527 PARAMETER Experiment Name: At_10percent_PEG_P Parameter: Treatment Value: 10percent PEG vs. No Treatment
  misc_feature: MA Experiment ID: 20000606 Result: Up-regulated in Transcription
  misc_feature: MA Experiment 20000606 PARAMETER Experiment Name: At_CS8548_Mutant_P Parameter: Age (day) Value: 14
  misc_feature: MA Experiment 20000606 PARAMETER Experiment Name: At_CS8548_Mutant_P Parameter: Plant Line Value: CS8548 vs. wt
  misc_feature: MA Experiment 20000606 PARAMETER Experiment Name: At_CS8548_Mutant_P Parameter: Tissue Value: Whole Plant
  misc_feature: MA Experiment ID: 20001247 Result: Up-regulated in Transcription
  misc_feature: MA Experiment 20001247 PARAMETER Experiment Name: At_Far-red-induction_P Parameter: Age (day) Value: 7
  misc_feature: MA Experiment 20001247 PARAMETER Experiment Name: At_Far-red-induction_P Parameter: Light Value: Far-red vs. White
  misc_feature: MA Experiment 20001247 PARAMETER Experiment Name: At_Far-red-induction_P Parameter: Organism Value: A. thaliana
  misc_feature: MA Experiment 20001247 PARAMETER Experiment Name: At_Far-red-induction_P Parameter: Plant Line Value: Columbia
  misc_feature: MA Experiment 20001247 PARAMETER Experiment Name: At_Far-red-induction_P Parameter: Timepoint (hr) Value: 1
  misc_feature: MA Experiment 20001247 PARAMETER Experiment Name: At_Far-red-induction_P Parameter: Tissue Value: Whole Plant
  misc_feature: MA Experiment ID: 20001557 Result: Up-regulated in Transcription
  misc_feature: MA Experiment 20001557 PARAMETER Experiment Name: At_Drought_Soil_Dry_P Parameter: Age (day) Value: 27
  misc_feature: MA Experiment 20001557 PARAMETER Experiment Name: At_Drought_Soil_Dry_P Parameter: Organism Value: A. thaliana
  misc_feature: MA Experiment 20001557 PARAMETER Experiment Name: At_Drought_Soil_Dry_P Parameter: Plant Line Value: WS
  misc_feature: MA Experiment 20001557 PARAMETER Experiment Name: At_Drought_Soil_Dry_P Parameter: Post Timepoint (hr) Value: 3
  misc_feature: MA Experiment 20001557 PARAMETER Experiment Name: At_Drought_Soil_Dry_P Parameter: Post-Treatment Value: Re-Water vs. No Drought
  misc_feature: MA Experiment 20001557 PARAMETER Experiment Name: At_Drought_Soil_Dry_P Parameter: Timepoint (day) Value: 13
  misc_feature: MA Experiment 20001557 PARAMETER Experiment Name: At_Drought_Soil_Dry_P Parameter: Treatment Value: Drought vs. No Drought
  misc_feature: MA Experiment ID: 20001558 Result: Up-regulated in Transcription
  misc_feature: MA Experiment 20001558 PARAMETER Experiment Name: At_Drought_Soil_Dry_P Parameter: Age (day) Value: 27
  misc_feature: MA Experiment 20001558 PARAMETER Experiment Name: At_Drought_Soil_Dry_P Parameter: Organism Value: A. thaliana
  misc_feature: MA Experiment 20001558 PARAMETER Experiment Name: At_Drought_Soil_Dry_P Parameter: Plant Line Value: WS
  misc_feature: MA Experiment 20001558 PARAMETER Experiment Name: At_Drought_Soil_Dry_P Parameter: Post Timepoint (hr) Value: 6
  misc_feature: MA Experiment 20001558 PARAMETER Experiment Name: At_Drought_Soil_Dry_P Parameter: Post-Treatment Value: Re-Water vs. No Drought
  misc_feature: MA Experiment 20001558 PARAMETER Experiment Name: At_Drought_Soil_Dry_P Parameter: Timepoint (day) Value: 13
  misc_feature: MA Experiment 20001558 PARAMETER Experiment Name: At_Drought_Soil_Dry_P Parameter: Treatment Value: Drought vs. No Drought
  misc_feature: MA Experiment ID: 20001560 Result: Up-regulated in Transcription
  misc_feature: MA Experiment 20001560 PARAMETER Experiment Name: At_Drought_Soil_Dry_P Parameter: Age (day) Value: 28
  misc_feature: MA Experiment 20001560 PARAMETER Experiment Name: At_Drought_Soil_Dry_P Parameter: Organism Value: A. thaliana
  misc_feature: MA Experiment 20001560 PARAMETER Experiment Name: At_Drought_Soil_Dry_P Parameter: Plant Line Value: WS
  misc_feature: MA Experiment 20001560 PARAMETER Experiment Name: At_Drought_Soil_Dry_P Parameter: Post Timepoint (hr) Value: None
  misc_feature: MA Experiment 20001560 PARAMETER Experiment Name: At_Drought_Soil_Dry_P Parameter: Post-Treatment Value: None
  misc_feature: MA Experiment 20001560 PARAMETER Experiment Name: At_Drought_Soil_Dry_P Parameter: Timepoint (day) Value: 14
  misc_feature: MA Experiment 20001560 PARAMETER Experiment Name: At_Drought_Soil_Dry_P Parameter: Treatment Value: Drought vs. No Drought
  misc_feature: MA Experiment ID: 20001904 Result: Down-regulated in Transcription
  misc_feature: MA Experiment 20001904 PARAMETER Experiment Name: At_Drought_Reproduction_P Parameter: Age (day) Value: 37
  misc_feature: MA Experiment 20001904 PARAMETER Experiment Name: At_Drought_Reproduction_P Parameter: Organism Value: A. thaliana
  misc_feature: MA Experiment 20001904 PARAMETER Experiment Name: At_Drought_Reproduction_P Parameter: Plant Line Value: WS
  misc_feature: MA Experiment 20001904 PARAMETER Experiment Name: At_Drought_Reproduction_P Parameter: Timepoint (day) Value: 7
  misc_feature: MA Experiment 20001904 PARAMETER Experiment Name: At_Drought_Reproduction_P Parameter: Tissue Value: Rosettes
  misc_feature: MA Experiment 20001904 PARAMETER Experiment Name: At_Drought_Reproduction_P Parameter: Treatment Value: Drought vs. No Drought
attcagtcggaccaacttgtgaccgaagaaagcaaattgagactacgcaccaactagtcctttggtttgtatcttaagataaaggtttcttttatggacggttcttcgtttctcgacatctctctcgatctcaacaccaatcctttctccgcaaaacttccgaagaaggaggtctcagttttggcttctactcacttaaagaggaaatggttggagcaagacgagagcgcaagtgagttacgagaggagctaaacagagttaattcagagaacaagaagctaacagagatgttagctagagtctgtgagagctacaacgaactacataatcatttggagaagcttcagagtcgccagagccctgaaatcgagcagaccgatataccgataaagaaaagaaaacaagacccggatgagttcttaggctttcctattggactcagtagtggaaaaactgagaacagctccagcaacgaagatcatcatcatcatcatcagcaacatgagcagaaaaatcagcttctttcatgtaaaagaccagtcactgatagcttcaacaaagcaaaagtttcgactgtctacgtgcctactgaaacatcggacacaagcttgacagttaaagatggatttcaatggaggaaatacggacaaaaggttacaagagacaacccgtcacctagagcttactttagatgctcgtttgcaccgtcttgtccagtaaaaaagaaggtacaacgcagcgcagaggatccatcgttacttgtagcgacatacgaagggacgcataaccacttgggtccaaatgcttctgaaggggatgctacaagccagggtgggtcaagcacagtgactttggatctggttaatggctgtcatagactagcgttggagaaaaacgaaaggaataatacgatgcaagaggttctgattcaacaaatggcgtcatcgttaacaaaagattcgaaatttacagctgctcttgctgctgctatatctgggaggttaatggagcaatctagaacatgaacgtttttagtgaatgtattgtttttgtttgtttagaatgattcttcgttttcgaattgtgtctttcgattaggagataaaagatgtatataaatattataagtagatgaagaaatcgtataagtattcgag

SEQ ID NO: 25457 - protein, 310 aa, Arabidopsis thaliana
  peptide (1)..(310): Ceres Seq. ID no. 13488123
  misc_feature (175)..(235): Pfam Name: WRKY DNA -binding domain Pfam Description: WRKY DNA -binding domain
  misc_feature (120)..(310): Homolog of NCBI NO: 40060529 NR Description: putative WRKY4 transcription factor [Vitis
  misc_feature (12)..(128): Homolog of NCBI NO: 21592591 NR Description: putative WRKY-type DNA binding protein
  misc_feature (149)..(310): Homolog of NCBI NO: 21592591 NR Description: putative WRKY-type DNA binding protein
  misc_feature (12)..(128): Homolog of NCBI NO: 15224660 NR Description: WRKY family transcription factor [Arabidopsis
  misc_feature (149)..(310): Homolog of NCBI NO: 15224660 NR Description: WRKY family transcription factor [Arabidopsis
  misc_feature (12)..(128): Homolog of NCBI NO: 17980964 NR Description: WRKY transcription factor 60 [Arabidopsis
  misc_feature (149)..(310): Homolog of NCBI NO: 17980964 NR Description: WRKY transcription factor 60 [Arabidopsis
  misc_feature (24)..(303): Homolog of NCBI NO: 7486317 NR Description: hypothetical protein F28M20.10 - Arabidopsis
  misc_feature (1)..(310): Homolog of NCBI NO: 18417877 NR Description: WRKY family transcription factor [Arabidopsis
  misc_feature (1)..(310): Homolog of NCBI NO: 13506731 NR Description: WRKY DNA-binding protein 18 [Arabidopsis
MDGSSFLDISLDLNTNPFSAKLPKKEVSVLASTHLKRKWLEQDESASELREELNRVNSENKKLTEMLARVCESYNELHNHLEKLQSRQSPEIEQTDIPIKKRKQDPDEFLGFPIGLSSGKTENSSSNEDHHHHHQQHEQKNQLLSCKRPVTDSFNKAKVSTVYVPTETSDTSLTVKDGFQWRKYGQKVTRDNPSPRAYFRCSFAPSCPVKKKVQRSAEDPSLLVATYEGTHNHLGPNASEGDATSQGGSSTVTLDLVNGCHRLALEKNERNNTMQEVLIQQMASSLTKDSKFTAALAAAISGRLMEQSRT

SEQ ID NO: 25458 - protein, 245 aa, Arabidopsis thaliana
  peptide (1)..(245): Ceres Seq. ID no. 13488124
  misc_feature (110)..(170): Pfam Name: WRKY DNA -binding domain Pfam Description: WRKY DNA -binding domain
  misc_feature (55)..(245): Homolog of NCBI NO: 40060529 NR Description: putative WRKY4 transcription factor [Vitis
  misc_feature (1)..(63): Homolog of NCBI NO: 21592591 NR Description: putative WRKY-type DNA binding protein
  misc_feature (84)..(245): Homolog of NCBI NO: 21592591 NR Description: putative WRKY-type DNA binding protein
  misc_feature (1)..(63): Homolog of NCBI NO: 15224660 NR Description: WRKY family transcription factor [Arabidopsis
  misc_feature (84)..(245): Homolog of NCBI NO: 15224660 NR Description: WRKY family transcription factor [Arabidopsis
  misc_feature (1)..(63): Homolog of NCBI NO: 17980964 NR Description: WRKY transcription factor 60 [Arabidopsis
  misc_feature (84)..(245): Homolog of NCBI NO: 17980964 NR Description: WRKY transcription factor 60 [Arabidopsis
  misc_feature (1)..(238): Homolog of NCBI NO: 7486317 NR Description: hypothetical protein F28M20.10 - Arabidopsis
  misc_feature (1)..(245): Homolog of NCBI NO: 18417877 NR Description: WRKY family transcription factor [Arabidopsis
  misc_feature (1)..(245): Homolog of NCBI NO: 13506731 NR Description: WRKY DNA-binding protein 18 [Arabidopsis
MLARVCESYNELHNHLEKLQSRQSPEIEQTDIPIKKRKQDPDEFLGFPIGLSSGKTENSSSNEDHHHHHQQHEQKNQLLSCKRPVTDSFNKAKVSTVYVPTETSDTSLTVKDGFQWRKYGQKVTRDNPSPRAYFRCSFAPSCPVKKKVQRSAEDPSLLVATYEGTHNHLGPNASEGDATSQGGSSTVTLDLVNGCHRLALEKNERNNTMQEVLIQQMASSLTKDSKFTAALAAAISGRLMEQSRT

SEQ ID NO: 25459 - DNA, 1146 bp, Arabidopsis thaliana
  misc_feature (1)..(1146): Ceres Seq. ID no. 12336445
  misc_feature: MA Experiment ID: 20000185 Result: Down-regulated in Transcription
  misc_feature: MA Experiment 20000185 PARAMETER Experiment Name: At_Roots__P Parameter: Age (day) Value: 7 vs. 21
  misc_feature: MA Experiment 20000185 PARAMETER Experiment Name: At_Roots__P Parameter: Organism Value: A. thaliana
  misc_feature: MA Experiment 20000185 PARAMETER Experiment Name: At_Roots__P Parameter: Tissue Value: Roots vs. Whole Plant
  misc_feature: MA Experiment ID: 20000227 Result: Down-regulated in Transcription
  misc_feature: MA Experiment 20000227 PARAMETER Experiment Name: At_Root-Tips-vs-Tops_P Parameter: Tissue Value: Root Tips vs. Root Tops
  misc_feature: MA Experiment ID: 20000264 Result: Down-regulated in Transcription
  misc_feature: MA Experiment 20000264 PARAMETER Experiment Name: At_Open_Flower_P Parameter: Age (day) Value: 21
  misc_feature: MA Experiment 20000264 PARAMETER Experiment Name: At_Open_Flower_P Parameter: Plant Line Value: WS
  misc_feature: MA Experiment 20000264 PARAMETER Experiment Name: At_Open_Flower_P Parameter: Tissue Value: Open Flower vs. Whole Plant
  misc_feature: MA Experiment ID: 20000269 Result: Down-regulated in Transcription
  misc_feature: MA Experiment 20000269 PARAMETER Experiment Name: At_1mM_KNO3_L-vs-H_Roots_P Parameter: Age (day) Value: 7,10,12
  misc_feature: MA Experiment 20000269 PARAMETER Experiment Name: At_1mM_KNO3_L-vs-H_Roots_P Parameter: Organism Value: A. thaliana
  misc_feature: MA Experiment 20000269 PARAMETER Experiment Name: At_1mM_KNO3_L-vs-H_Roots_P Parameter: Plant Line Value: WS
  misc_feature: MA Experiment 20000269 PARAMETER Experiment Name: At_1mM_KNO3_L-vs-H_Roots_P Parameter: Timepoint (day) Value: 7,10,12
  misc_feature: MA Experiment 20000269 PARAMETER Experiment Name: At_1mM_KNO3_L-vs-H_Roots_P Parameter: Tissue Value: Roots
  misc_feature: MA Experiment 20000269 PARAMETER Experiment Name: At_1mM_KNO3_L-vs-H_Roots_P Parameter: Treatment Value: 1mM KNO3 vs. 50mM KNO3
  misc_feature: MA Experiment ID: 20000439 Result: Down-regulated in Transcription
  misc_feature: MA Experiment 20000439 PARAMETER Experiment Name: At_Roots__P Parameter: Age (day) Value: 14 vs. 21
  misc_feature: MA Experiment 20000439 PARAMETER Experiment Name: At_Roots__P Parameter: Organism Value: A. thaliana
  misc_feature: MA Experiment 20000439 PARAMETER Experiment Name: At_Roots__P Parameter: Tissue Value: Roots vs. Whole Plant
  misc_feature: MA Experiment ID: 20000794 Result: Down-regulated in Transcription
  misc_feature: MA Experiment 20000794 PARAMETER Experiment Name: At_Petals_P Parameter: Age (day) Value: 23-25 days
  misc_feature: MA Experiment 20000794 PARAMETER Experiment Name: At_Petals_P Parameter: Plant Line Value: WS
  misc_feature: MA Experiment 20000794 PARAMETER Experiment Name: At_Petals_P Parameter: Tissue Value: Petals vs. Whole plant
  misc_feature: MA Experiment ID: 20001904 Result: Down-regulated in Transcription
  misc_feature: MA Experiment 20001904 PARAMETER Experiment Name: At_Drought_Reproduction_P Parameter: Age (day) Value: 37
  misc_feature: MA Experiment 20001904 PARAMETER Experiment Name: At_Drought_Reproduction_P Parameter: Organism Value: A. thaliana
  misc_feature: MA Experiment 20001904 PARAMETER Experiment Name: At_Drought_Reproduction_P Parameter: Plant Line Value: WS
  misc_feature: MA Experiment 20001904 PARAMETER Experiment Name: At_Drought_Reproduction_P Parameter: Timepoint (day) Value: 7
  misc_feature: MA Experiment 20001904 PARAMETER Experiment Name: At_Drought_Reproduction_P Parameter: Tissue Value: Rosettes
  misc_feature: MA Experiment 20001904 PARAMETER Experiment Name: At_Drought_Reproduction_P Parameter: Treatment Value: Drought vs. No Drought
  misc_feature: MA Experiment ID: 20001905 Result: Down-regulated in Transcription
  misc_feature: MA Experiment 20001905 PARAMETER Experiment Name: At_Drought_Reproduction_P Parameter: Age (day) Value: 40
  misc_feature: MA Experiment 20001905 PARAMETER Experiment Name: At_Drought_Reproduction_P Parameter: Organism Value: A. thaliana
  misc_feature: MA Experiment 20001905 PARAMETER Experiment Name: At_Drought_Reproduction_P Parameter: Plant Line Value: WS
  misc_feature: MA Experiment 20001905 PARAMETER Experiment Name: At_Drought_Reproduction_P Parameter: Timepoint (day) Value: 10
  misc_feature: MA Experiment 20001905 PARAMETER Experiment Name: At_Drought_Reproduction_P Parameter: Tissue Value: Rosettes
  misc_feature: MA Experiment 20001905 PARAMETER Experiment Name: At_Drought_Reproduction_P Parameter: Treatment Value: Drought vs. No Drought
  misc_feature: Phenotype: WHOLE PLANT Color-Yellow-Green Viable 1
  misc_feature: Phenotype: WHOLE PLANT Color-Yellow-Green Viable 1
  misc_feature: Phenotype: WHOLE PLANT Size-Small
  misc_feature: Phenotype: WHOLE PLANT Color-Yellow-Green Viable 1
  misc_feature: Phenotype: WHOLE PLANT Color-Yellow-Green Viable 1
  misc_feature: Phenotype: WHOLE PLANT Size-Small
  misc_feature: Phenotype: WHOLE PLANT Color-Yellow-Green Viable 1
  misc_feature: Phenotype: WHOLE PLANT Color-Yellow-Green Viable 1
  misc_feature: Phenotype: WHOLE PLANT Size-Small
  misc_feature: Phenotype: WHOLE PLANT Color-Yellow-Green Viable 1
  misc_feature: Phenotype: WHOLE PLANT Color-Yellow-Green Viable 1
  misc_feature: Phenotype: WHOLE PLANT Size-Small
  misc_feature: Phenotype: WHOLE PLANT Color-Yellow-Green Viable 1
  misc_feature: Phenotype: WHOLE PLANT Color-Yellow-Green Viable 1
  misc_feature: Phenotype: WHOLE PLANT Size-Small
  misc_feature: Phenotype: WHOLE PLANT Color-Yellow-Green Viable 1
  misc_feature: Phenotype: WHOLE PLANT Color-Yellow-Green Viable 1
  misc_feature: Phenotype: WHOLE PLANT Size-Small
  misc_feature: Phenotype: WHOLE PLANT Color-Yellow-Green Viable 1
  misc_feature: Phenotype: WHOLE PLANT Color-Yellow-Green Viable 1
  misc_feature: Phenotype: WHOLE PLANT Size-Small
  misc_feature: Phenotype: WHOLE PLANT Color-Yellow-Green Viable 1
  misc_feature: Phenotype: WHOLE PLANT Color-Yellow-Green Viable 1
  misc_feature: Phenotype: WHOLE PLANT Color-Yellow-Green Viable 1
  misc_feature: Phenotype: WHOLE PLANT Color-Yellow-Green Viable 1
  misc_feature: Phenotype: WHOLE PLANT Color-Yellow-Green Viable 1
atttcaaaccacacattcaaactaactctgcaaaagaaaaaaaaactcagagcagaggagatcgagagagacaaagagagacaaagagagagagagagagagagagagagagagagagagagagatcttcaacaagcaatgtctatatccatggcgttattctctccgccgatctcttcctcacttcaaaaccctaatctcatccccaagatctcaacctctcttctctccaccaaacgtttctctctaatctccgtccctagagcttcctccgacaatggtacgacttcccccgtcgtgaaaattccgaaggcctgcgtctgtagctgtagaggaagttccggttaaatctccggcggaaagctcctccgcttctgaaaacggcgccgttggaggtgaagcgactgattcgagtactgagacggtaatcaaatatcaaaatgcgaagtgggttaatggaacttgggatctgaaacagttcgagaaagatggcaaaactgattgggattctgttatcgtttctgaggcaaagaggagaaaatggcttgaagataacccggaaacaacgagtaacgacgagcttgttgtcttcgatacttcgattattccatggtgggcatggatgaagagataccatctacctgaagctgaacttctcaatggtcgtgctgcgatgatagggttcttcatggcttactttgttgatagtcttaccggagtaggacttgttgatcaaatggggaatttcttctgcaaaacactcttgtttgtggctgtagctggagttctcttcatccgtaagaatgaagatttagacaaacttaaggatctgttcgatgagactacgttatatgacaaacaatggcaagctgcatggaaagagccagattcatcaacagtttcttcaaagaagtgaacaagttcttacaatctttcattttcctttttttgttatgcaataatctgtgaatcagtgaaagtttatctctactgaactactgatcttcagattttgtaatctttctgctttaaaaatctctatgaagtagtctcaaagataatgtatcgaaggtctttgacttgtaaagcagacctatttcgttttgacgcttgataatttaatcaataagagattttttttttaat

SEQ ID NO: 25460 - protein, 115 aa, Arabidopsis thaliana
  peptide (1)..(115): Ceres Seq. ID no. 12336446
  misc_feature (51)..(102): Homolog of NCBI NO: 7485188 NR Description: hypothetical protein - Arabidopsis thaliana
  misc_feature (51)..(102): Homolog of NCBI NO: 21555799 NR Description: Lil3 protein [Arabidopsis thaliana]
  misc_feature (51)..(102): Homolog of NCBI NO: 18414927 NR Description: Lil3 protein
  misc_feature (51)..(104): Homolog of NCBI NO: 8978078 NR Description: Lil3 protein [Arabidopsis thaliana]
  misc_feature (47)..(104): Homolog of NCBI NO: 30695110 NR Description: Lil3 protein [Arabidopsis thaliana]
  misc_feature (51)..(102): Homolog of NCBI NO: 7485188 NR Description: hypothetical protein - Arabidopsis thaliana
  misc_feature (51)..(102): Homolog of NCBI NO: 21555799 NR Description: Lil3 protein [Arabidopsis thaliana]
  misc_feature (51)..(102): Homolog of NCBI NO: 18414927 NR Description: Lil3 protein
  misc_feature (51)..(104): Homolog of NCBI NO: 8978078 NR Description: Lil3 protein [Arabidopsis thaliana]
  misc_feature (47)..(104): Homolog of NCBI NO: 30695110 NR Description: Lil3 protein [Arabidopsis thaliana]
  misc_feature (51)..(102): Homolog of NCBI NO: 7485188 NR Description: hypothetical protein - Arabidopsis thaliana
  misc_feature (51)..(102): Homolog of NCBI NO: 21555799 NR Description: Lil3 protein [Arabidopsis thaliana]
  misc_feature (51)..(102): Homolog of NCBI NO: 18414927 NR Description: Lil3 protein
  misc_feature (51)..(104): Homolog of NCBI NO: 8978078 NR Description: Lil3 protein [Arabidopsis thaliana]
  misc_feature (47)..(104): Homolog of NCBI NO: 30695110 NR Description: Lil3 protein [Arabidopsis thaliana]
  misc_feature (51)..(102): Homolog of NCBI NO: 7485188 NR Description: hypothetical protein - Arabidopsis thaliana
  misc_feature (51)..(102): Homolog of NCBI NO: 21555799 NR Description: Lil3 protein [Arabidopsis thaliana]
  misc_feature (51)..(102): Homolog of NCBI NO: 18414927 NR Description: Lil3 protein
  misc_feature (51)..(104): Homolog of NCBI NO: 8978078 NR Description: Lil3 protein [Arabidopsis thaliana]
  misc_feature (47)..(104): Homolog of NCBI NO: 30695110 NR Description: Lil3 protein [Arabidopsis thaliana]
ISNHTFKLTLQKKKKLRAEEIERDKERQRERERERERERERDLQQAMSISMALFSPPISSSLQNPNLIPKISTSLLSTKRFSLISVPRASSDNGTTSPVVKIPKACVCSCRGSSG

SEQ ID NO: 25461 - protein, 97 aa, Arabidopsis thaliana
  peptide (1)..(97): Ceres Seq. ID no. 12336447
  misc_feature (1)..(97): Homolog of NCBI NO: 18414927 NR Description: Lil3 protein
  misc_feature (1)..(97): Homolog of NCBI NO: 7485188 NR Description: hypothetical protein - Arabidopsis thaliana
  misc_feature (1)..(97): Homolog of NCBI NO: 21555799 NR Description: Lil3 protein [Arabidopsis thaliana]
  misc_feature (1)..(97): Homolog of NCBI NO: 30695110 NR Description: Lil3 protein [Arabidopsis thaliana]
  misc_feature (1)..(97): Homolog of NCBI NO: 8978078 NR Description: Lil3 protein [Arabidopsis thaliana]
  misc_feature (1)..(97): Homolog of NCBI NO: 18414927 NR Description: Lil3 protein
  misc_feature (1)..(97): Homolog of NCBI NO: 7485188 NR Description: hypothetical protein - Arabidopsis thaliana
  misc_feature (1)..(97): Homolog of NCBI NO: 21555799 NR Description: Lil3 protein [Arabidopsis thaliana]
  misc_feature (1)..(97): Homolog of NCBI NO: 30695110 NR Description: Lil3 protein [Arabidopsis thaliana]
  misc_feature (1)..(97): Homolog of NCBI NO: 8978078 NR Description: Lil3 protein [Arabidopsis thaliana]
  misc_feature (1)..(97): Homolog of NCBI NO: 18414927 NR Description: Lil3 protein
  misc_feature (1)..(97): Homolog of NCBI NO: 7485188 NR Description: hypothetical protein - Arabidopsis thaliana
  misc_feature (1)..(97): Homolog of NCBI NO: 21555799 NR Description: Lil3 protein [Arabidopsis thaliana]
  misc_feature (1)..(97): Homolog of NCBI NO: 30695110 NR Description: Lil3 protein [Arabidopsis thaliana]
  misc_feature (1)..(97): Homolog of NCBI NO: 8978078 NR Description: Lil3 protein [Arabidopsis thaliana]
  misc_feature (1)..(97): Homolog of NCBI NO: 18414927 NR Description: Lil3 protein
  misc_feature (1)..(97): Homolog of NCBI NO: 7485188 NR Description: hypothetical protein - Arabidopsis thaliana
  misc_feature (1)..(97): Homolog of NCBI NO: 21555799 NR Description: Lil3 protein [Arabidopsis thaliana]
  misc_feature (1)..(97): Homolog of NCBI NO: 30695110 NR Description: Lil3 protein [Arabidopsis thaliana]
  misc_feature (1)..(97): Homolog of NCBI NO: 8978078 NR Description: Lil3 protein [Arabidopsis thaliana]
MKRYHLPEAELLNGRAAMIGFFMAYFVDSLTGVGLVDQMGNFFCKTLLFVAVAGVLFIRKNEDLDKLKDLFDETTLYDKQWQAAWKEPDSSTVSSKK

SEQ ID NO: 25462 - protein, 80 aa, Arabidopsis thaliana
  peptide (1)..(80): Ceres Seq. ID no. 12336448
  misc_feature (1)..(80): Homolog of NCBI NO: 18414927 NR Description: Lil3 protein
  misc_feature (1)..(80): Homolog of NCBI NO: 7485188 NR Description: hypothetical protein - Arabidopsis thaliana
  misc_feature (1)..(80): Homolog of NCBI NO: 21555799 NR Description: Lil3 protein [Arabidopsis thaliana]
  misc_feature (1)..(80): Homolog of NCBI NO: 30695110 NR Description: Lil3 protein [Arabidopsis thaliana]
  misc_feature (1)..(80): Homolog of NCBI NO: 8978078 NR Description: Lil3 protein [Arabidopsis thaliana]
  misc_feature (1)..(80): Homolog of NCBI NO: 18414927 NR Description: Lil3 protein
  misc_feature (1)..(80): Homolog of NCBI NO: 7485188 NR Description: hypothetical protein - Arabidopsis thaliana
  misc_feature (1)..(80): Homolog of NCBI NO: 21555799 NR Description: Lil3 protein [Arabidopsis thaliana]
  misc_feature (1)..(80): Homolog of NCBI NO: 30695110 NR Description: Lil3 protein [Arabidopsis thaliana]
  misc_feature (1)..(80): Homolog of NCBI NO: 8978078 NR Description: Lil3 protein [Arabidopsis thaliana]
  misc_feature (1)..(80): Homolog of NCBI NO: 18414927 NR Description: Lil3 protein
  misc_feature (1)..(80): Homolog of NCBI NO: 7485188 NR Description: hypothetical protein - Arabidopsis thaliana
  misc_feature (1)..(80): Homolog of NCBI NO: 21555799 NR Description: Lil3 protein [Arabidopsis thaliana]
  misc_feature (1)..(80): Homolog of NCBI NO: 30695110 NR Description: Lil3 protein [Arabidopsis thaliana]
  misc_feature (1)..(80): Homolog of NCBI NO: 8978078 NR Description: Lil3 protein [Arabidopsis thaliana]
  misc_feature (1)..(80): Homolog of NCBI NO: 18414927 NR Description: Lil3 protein
  misc_feature (1)..(80): Homolog of NCBI NO: 7485188 NR Description: hypothetical protein - Arabidopsis thaliana
  misc_feature (1)..(80): Homolog of NCBI NO: 21555799 NR Description: Lil3 protein [Arabidopsis thaliana]
  misc_feature (1)..(80): Homolog of NCBI NO: 30695110 NR Description: Lil3 protein [Arabidopsis thaliana]
  misc_feature (1)..(80): Homolog of NCBI NO: 8978078 NR Description: Lil3 protein [Arabidopsis thaliana]
MIGFFMAYFVDSLTGVGLVDQMGNFFCKTLLFVAVAGVLFIRKNEDLDKLKDLFDETTLYDKQWQAAWKEPDSSTVSSKK

SEQ ID NO: 25463 - protein, 69 aa, Arabidopsis thaliana
  peptide (1)..(69): Ceres Seq. ID no. 12336449
  misc_feature (5)..(56): Homolog of NCBI NO: 7485188 NR Description: hypothetical protein - Arabidopsis thaliana
  misc_feature (5)..(56): Homolog of NCBI NO: 21555799 NR Description: Lil3 protein [Arabidopsis thaliana]
  misc_feature (5)..(56): Homolog of NCBI NO: 18414927 NR Description: Lil3 protein
  misc_feature (5)..(58): Homolog of NCBI NO: 8978078 NR Description: Lil3 protein [Arabidopsis thaliana]
  misc_feature (1)..(58): Homolog of NCBI NO: 30695110 NR Description: Lil3 protein [Arabidopsis thaliana]
  misc_feature (5)..(56): Homolog of NCBI NO: 7485188 NR Description: hypothetical protein - Arabidopsis thaliana
  misc_feature (5)..(56): Homolog of NCBI NO: 21555799 NR Description: Lil3 protein [Arabidopsis thaliana]
  misc_feature (5)..(56): Homolog of NCBI NO: 18414927 NR Description: Lil3 protein
  misc_feature (5)..(58): Homolog of NCBI NO: 8978078 NR Description: Lil3 protein [Arabidopsis thaliana]
  misc_feature (1)..(58): Homolog of NCBI NO: 30695110 NR Description: Lil3 protein [Arabidopsis thaliana]
  misc_feature (5)..(56): Homolog of NCBI NO: 7485188 NR Description: hypothetical protein - Arabidopsis thaliana
  misc_feature (5)..(56): Homolog of NCBI NO: 21555799 NR Description: Lil3 protein [Arabidopsis thaliana]
  misc_feature (5)..(56): Homolog of NCBI NO: 18414927 NR Description: Lil3 protein
  misc_feature (5)..(58): Homolog of NCBI NO: 8978078 NR Description: Lil3 protein [Arabidopsis thaliana]
  misc_feature (1)..(58): Homolog of NCBI NO: 30695110 NR Description: Lil3 protein [Arabidopsis thaliana]
  misc_feature (5)..(56): Homolog of NCBI NO: 7485188 NR Description: hypothetical protein - Arabidopsis thaliana
  misc_feature (5)..(56): Homolog of NCBI NO: 21555799 NR Description: Lil3 protein [Arabidopsis thaliana]
  misc_feature (5)..(56): Homolog of NCBI NO: 18414927 NR Description: Lil3 protein
  misc_feature (5)..(58): Homolog of NCBI NO: 8978078 NR Description: Lil3 protein [Arabidopsis thaliana]
  misc_feature (1)..(58): Homolog of NCBI NO: 30695110 NR Description: Lil3 protein [Arabidopsis thaliana]
MSISMALFSPPISSSLQNPNLIPKISTSLLSTKRFSLISVPRASSDNGTTSPVVKIPKACVCSCRGSSG

SEQ ID NO: 25464 - DNA, 1029 bp, Arabidopsis thaliana
  misc_feature (1)..(1029): Ceres Seq. ID no. 13490799
  misc_feature: MA Experiment ID: 108434 Result: Up-regulated in Transcription
  misc_feature: MA Experiment 108434 PARAMETER Experiment Name: At_Root_Tips_cDNA_P Parameter: Tissue Value: Root Tips
  misc_feature: MA Experiment ID: 108463 Result: Down-regulated in Transcription
  misc_feature: MA Experiment 108463 PARAMETER Experiment Name: At_Germinating_Seeds_cDNA_P Parameter: Age (day) Value: 3 vs. 0
  misc_feature: MA Experiment 108463 PARAMETER Experiment Name: At_Germinating_Seeds_cDNA_P Parameter: Tissue Value: Germinating Seeds
  misc_feature: MA Experiment ID: 108573 Result: Down-regulated in Transcription
  misc_feature: MA Experiment 108573 PARAMETER Experiment Name: At_Drought_cDNA_P Parameter: Timepoint (hr) Value: 6
  misc_feature: MA Experiment 108573 PARAMETER Experiment Name: At_Drought_cDNA_P Parameter: Tissue Value: Aerial
  misc_feature: MA Experiment 108573 PARAMETER Experiment Name: At_Drought_cDNA_P Parameter: Treatment Value: Drought vs. No Drought
  misc_feature: MA Experiment ID: 108579 Result: Up-regulated in Transcription
  misc_feature: MA Experiment 108579 PARAMETER Experiment Name: At_4deg_Cold_cDNA_P Parameter: Temperature (deg C) Value: 4 vs. 22
  misc_feature: MA Experiment 108579 PARAMETER Experiment Name: At_4deg_Cold_cDNA_P Parameter: Timepoint (hr) Value: 6
  misc_feature: MA Experiment 108579 PARAMETER Experiment Name: At_4deg_Cold_cDNA_P Parameter: Tissue Value: Aerial
  misc_feature: MA Experiment ID: 108585 Result: Down-regulated in Transcription
  misc_feature: MA Experiment 108585 PARAMETER Experiment Name: At_5mM_NaNP_cDNA_P Parameter: Timepoint (hr) Value: 6
  misc_feature: MA Experiment 108585 PARAMETER Experiment Name: At_5mM_NaNP_cDNA_P Parameter: Tissue Value: Aerial
  misc_feature: MA Experiment 108585 PARAMETER Experiment Name: At_5mM_NaNP_cDNA_P Parameter: Treatment Value: null
  misc_feature: MA Experiment ID: 108595 Result: Down-regulated in Transcription
  misc_feature: MA Experiment 108595 PARAMETER Experiment Name: At_Ler-pi_Ovule_cDNA_P Parameter: Plant Line Value: null
  misc_feature: MA Experiment ID: 20000185 Result: Down-regulated in Transcription
  misc_feature: MA Experiment 20000185 PARAMETER Experiment Name: At_Roots__P Parameter: Age (day) Value: 7 vs. 21
  misc_feature: MA Experiment 20000185 PARAMETER Experiment Name: At_Roots__P Parameter: Organism Value: A. thaliana
  misc_feature: MA Experiment 20000185 PARAMETER Experiment Name: At_Roots__P Parameter: Tissue Value: Roots vs. Whole Plant
  misc_feature: MA Experiment ID: 20000224 Result: Up-regulated in Transcription
  misc_feature: MA Experiment ID: 20000436 Result: Down-regulated in Transcription
  misc_feature: MA Experiment 20000436 PARAMETER Experiment Name: At_Drought_P Parameter: Age (day) Value: 7
  misc_feature: MA Experiment 20000436 PARAMETER Experiment Name: At_Drought_P Parameter: Organism Value: A. thaliana
  misc_feature: MA Experiment 20000436 PARAMETER Experiment Name: At_Drought_P Parameter: Plant Line Value: WS
  misc_feature: MA Experiment 20000436 PARAMETER Experiment Name: At_Drought_P Parameter: Timepoint (hr) Value: 12
  misc_feature: MA Experiment 20000436 PARAMETER Experiment Name: At_Drought_P Parameter: Tissue Value: Whole Plant
  misc_feature: MA Experiment 20000436 PARAMETER Experiment Name: At_Drought_P Parameter: Treatment Value: Drought vs. No Drought
  misc_feature: MA Experiment ID: 20000437 Result: Down-regulated in Transcription
  misc_feature: MA Experiment 20000437 PARAMETER Experiment Name: At_Drought_P Parameter: Age (day) Value: 8
  misc_feature: MA Experiment 20000437 PARAMETER Experiment Name: At_Drought_P Parameter: Organism Value: A. thaliana
  misc_feature: MA Experiment 20000437 PARAMETER Experiment Name: At_Drought_P Parameter: Plant Line Value: WS
  misc_feature: MA Experiment 20000437 PARAMETER Experiment Name: At_Drought_P Parameter: Timepoint (hr) Value: 24
  misc_feature: MA Experiment 20000437 PARAMETER Experiment Name: At_Drought_P Parameter: Tissue Value: Whole Plant
  misc_feature: MA Experiment 20000437 PARAMETER Experiment Name: At_Drought_P Parameter: Treatment Value: Drought vs. No Drought
  misc_feature: MA Experiment ID: 20000439 Result: Down-regulated in Transcription
  misc_feature: MA Experiment 20000439 PARAMETER Experiment Name: At_Roots__P Parameter: Age (day) Value: 14 vs. 21
  misc_feature: MA Experiment 20000439 PARAMETER Experiment Name: At_Roots__P Parameter: Organism Value: A. thaliana
  misc_feature: MA Experiment 20000439 PARAMETER Experiment Name: At_Roots__P Parameter: Tissue Value: Roots vs. Whole Plant
  misc_feature: MA Experiment ID: 20001247 Result: Down-regulated in Transcription
  misc_feature: MA Experiment 20001247 PARAMETER Experiment Name: At_Far-red-induction_P Parameter: Age (day) Value: 7
  misc_feature: MA Experiment 20001247 PARAMETER Experiment Name: At_Far-red-induction_P Parameter: Light Value: Far-red vs. White
  misc_feature: MA Experiment 20001247 PARAMETER Experiment Name: At_Far-red-induction_P Parameter: Organism Value: A. thaliana
  misc_feature: MA Experiment 20001247 PARAMETER Experiment Name: At_Far-red-induction_P Parameter: Plant Line Value: Columbia
  misc_feature: MA Experiment 20001247 PARAMETER Experiment Name: At_Far-red-induction_P Parameter: Timepoint (hr) Value: 1
  misc_feature: MA Experiment 20001247 PARAMETER Experiment Name: At_Far-red-induction_P Parameter: Tissue Value: Whole Plant
  misc_feature: MA Experiment ID: 20001248 Result: Down-regulated in Transcription
  misc_feature: MA Experiment 20001248 PARAMETER Experiment Name: At_Far-red-induction_P Parameter: Age (day) Value: 7
  misc_feature: MA Experiment 20001248 PARAMETER Experiment Name: At_Far-red-induction_P Parameter: Light Value: Far-red vs. White
  misc_feature: MA Experiment 20001248 PARAMETER Experiment Name: At_Far-red-induction_P Parameter: Organism Value: A. thaliana
  misc_feature: MA Experiment 20001248 PARAMETER Experiment Name: At_Far-red-induction_P Parameter: Plant Line Value: Columbia
  misc_feature: MA Experiment 20001248 PARAMETER Experiment Name: At_Far-red-induction_P Parameter: Timepoint (hr) Value: 4
  misc_feature: MA Experiment 20001248 PARAMETER Experiment Name: At_Far-red-induction_P Parameter: Tissue Value: Whole Plant
  misc_feature: MA Experiment ID: 20001450 Result: Down-regulated in Transcription
  misc_feature: MA Experiment 20001450 PARAMETER Experiment Name: At_Far-red-induction_P Parameter: Age (day) Value: 7
  misc_feature: MA Experiment 20001450 PARAMETER Experiment Name: At_Far-red-induction_P Parameter: Light Value: Far-red vs. White
  misc_feature: MA Experiment 20001450 PARAMETER Experiment Name: At_Far-red-induction_P Parameter: Organism Value: A. thaliana
  misc_feature: MA Experiment 20001450 PARAMETER Experiment Name: At_Far-red-induction_P Parameter: Plant Line Value: Columbia
  misc_feature: MA Experiment 20001450 PARAMETER Experiment Name: At_Far-red-induction_P Parameter: Timepoint (hr) Value: 8
  misc_feature: MA Experiment 20001450 PARAMETER Experiment Name: At_Far-red-induction_P Parameter: Tissue Value: Whole Plant
  misc_feature: MA Experiment ID: 20001558 Result: Up-regulated in Transcription
  misc_feature: MA Experiment 20001558 PARAMETER Experiment Name: At_Drought_Soil_Dry_P Parameter: Age (day) Value: 27
  misc_feature: MA Experiment 20001558 PARAMETER Experiment Name: At_Drought_Soil_Dry_P Parameter: Organism Value: A. thaliana
  misc_feature: MA Experiment 20001558 PARAMETER Experiment Name: At_Drought_Soil_Dry_P Parameter: Plant Line Value: WS
  misc_feature: MA Experiment 20001558 PARAMETER Experiment Name: At_Drought_Soil_Dry_P Parameter: Post Timepoint (hr) Value: 6
  misc_feature: MA Experiment 20001558 PARAMETER Experiment Name: At_Drought_Soil_Dry_P Parameter: Post-Treatment Value: Re-Water vs. No Drought
  misc_feature: MA Experiment 20001558 PARAMETER Experiment Name: At_Drought_Soil_Dry_P Parameter: Timepoint (day) Value: 13
  misc_feature: MA Experiment 20001558 PARAMETER Experiment Name: At_Drought_Soil_Dry_P Parameter: Treatment Value: Drought vs. No Drought
  misc_feature: MA Experiment ID: 20001560 Result: Up-regulated in Transcription
  misc_feature: MA Experiment 20001560 PARAMETER Experiment Name: At_Drought_Soil_Dry_P Parameter: Age (day) Value: 28
  misc_feature: MA Experiment 20001560 PARAMETER Experiment Name: At_Drought_Soil_Dry_P Parameter: Organism Value: A. thaliana
  misc_feature: MA Experiment 20001560 PARAMETER Experiment Name: At_Drought_Soil_Dry_P Parameter: Plant Line Value: WS
  misc_feature: MA Experiment 20001560 PARAMETER Experiment Name: At_Drought_Soil_Dry_P Parameter: Post Timepoint (hr) Value: None
  misc_feature: MA Experiment 20001560 PARAMETER Experiment Name: At_Drought_Soil_Dry_P Parameter: Post-Treatment Value: None
  misc_feature: MA Experiment 20001560 PARAMETER Experiment Name: At_Drought_Soil_Dry_P Parameter: Timepoint (day) Value: 14
  misc_feature: MA Experiment 20001560 PARAMETER Experiment Name: At_Drought_Soil_Dry_P Parameter: Treatment Value: Drought vs. No Drought
  misc_feature: MA Experiment ID: 20001911 Result: Down-regulated in Transcription
  misc_feature: MA Experiment 20001911 PARAMETER Experiment Name: At_Drought_Reproduction_P Parameter: Age (day) Value: 40
  misc_feature: MA Experiment 20001911 PARAMETER Experiment Name: At_Drought_Reproduction_P Parameter: Organism Value: A. thaliana
  misc_feature: MA Experiment 20001911 PARAMETER Experiment Name: At_Drought_Reproduction_P Parameter: Plant Line Value: WS
  misc_feature: MA Experiment 20001911 PARAMETER Experiment Name: At_Drought_Reproduction_P Parameter: Timepoint (day) Value: 10
  misc_feature: MA Experiment 20001911 PARAMETER Experiment Name: At_Drought_Reproduction_P Parameter: Tissue Value: Flowers
  misc_feature: MA Experiment 20001911 PARAMETER Experiment Name: At_Drought_Reproduction_P Parameter: Treatment Value: Drought vs. No Drought
tttttttttcctttgggactcactgagattactactaccaaatccaacaatggcgatttctttcgcaatcgatccttccatatctccttgcttctccttctcctctccatcttcttcatcaaaaaccttacctttacgaaacaacctccatttccatggcagaccttcaccaatatctccactcatttcaaaacccagtcgaaaattcccaatcttctctgctcaccaaactaataacagtgaagaagcgaattcaaagcagcaagcagatgtaaaaaccctaattaggtcatataaacaagctcttctcaacggagacgaaacctcagttacagaaatcgaaacgatgttttgcaaaatcgagaaggagaagaataaaatggatcaaaaggttttatctttatcaatgaagatagcttcagagaaagagatgaaaattcgattacaagctgattttgataatacaaggaagaagcttgataaagataggcttagtacagagtctaatgcaaaagttcagattcttaagtctcttttacctattattgatagttttgagaaagctaagttacaggttagagttgatactgataaggagaagaagattgatacgagttatcaagggatttataggcaatttgttgaggttttgagatatcttcgtgtttcggttattgcaactgttggcaagccttttgatcctttgttgcacgaggctatttcacgggaagaatctgaggcggttaaagcagggataataaccgaggagctgaacaagggatttgttctaggagatcgtgttctgagaccagcaaaggttaaagtttctttaggacccgtcaacaagaagactccttcagctgctgaggaaataacaccttctgcttgagttcgatgtcgggtaaaagtttcaatgtcttgtgctaatgtccattttttattcacctatcaaagggataccaaaattgcaacaatgtctaatgagaaagttctttggcttcagagtttatgattcatgttttacgattt

SEQ ID NO: 25465 - protein, 295 aa, Arabidopsis thaliana
  peptide (1)..(295): Ceres Seq. ID no. 13490800
  misc_feature (122)..(277): Pfam Name: GrpE Pfam Description: GrpE
  misc_feature (66)..(279): Homolog of NCBI NO: 23041352 NR Description: hypothetical protein [Trichodesmium erythraeum
  misc_feature (101)..(289): Homolog of NCBI NO: 33862294 NR Description: Heat shock protein GrpE [Prochlorococcus marinus
  misc_feature (97)..(277): Homolog of NCBI NO: 37523763 NR Description: heat shock protein [Gloeobacter violaceus]
  misc_feature (133)..(279): Homolog of NCBI NO: 22298857 NR Description: heat shock protein [Thermosynechococcus elongatus
  misc_feature (60)..(290): Homolog of NCBI NO: 15384277 NR Description: co-chaperone CGE1 precursor isoform a
  misc_feature (60)..(290): Homolog of NCBI NO: 15384279 NR Description: co-chaperone CGE1 precursor isoform b
  misc_feature (82)..(292): Homolog of NCBI NO: 30686476 NR Description: chloroplast GrpE protein [Arabidopsis thaliana]
  misc_feature (12)..(292): Homolog of NCBI NO: 18418410 NR Description: chloroplast GrpE protein [Arabidopsis thaliana]
  misc_feature (17)..(295): Homolog of NCBI NO: 21593629 NR Description: putative heat shock protein [Arabidopsis thaliana]
  misc_feature (17)..(295): Homolog of NCBI NO: 18400095 NR Description: heat shock protein -related [Arabidopsis
FFFLWDSLRLLLPNPTMAISFAIDPSISPCFSFSSPSSSSKTLPLRNNLHFHGRPSPISPLISKPSRKFPIFSAHQTNNSEEANSKQQADVKTLIRSYKQALLNGDETSVTEIETMFCKIEKEKNKMDQKVLSLSMKIASEKEMKIRLQADFDNTRKKLDKDRLSTESNAKVQILKSLLPIIDSFEKAKLQVRVDTDKEKKIDTSYQGIYRQFVEVLRYLRVSVIATVGKPFDPLLHEAISREESEAVKAGIITEELNKGFVLGDRVLRPAKVKVSLGPVNKKTPSAAEEITPSA

SEQ ID NO: 25466 - protein, 279 aa, Arabidopsis thaliana
  peptide (1)..(279): Ceres Seq. ID no. 13490801
  misc_feature (106)..(261): Pfam Name: GrpE Pfam Description: GrpE
  misc_feature (50)..(263): Homolog of NCBI NO: 23041352 NR Description: hypothetical protein [Trichodesmium erythraeum
  misc_feature (85)..(273): Homolog of NCBI NO: 33862294 NR Description: Heat shock protein GrpE [Prochlorococcus marinus
  misc_feature (81)..(261): Homolog of NCBI NO: 37523763 NR Description: heat shock protein [Gloeobacter violaceus]
  misc_feature (117)..(263): Homolog of NCBI NO: 22298857 NR Description: heat shock protein [Thermosynechococcus elongatus
  misc_feature (44)..(274): Homolog of NCBI NO: 15384277 NR Description: co-chaperone CGE1 precursor isoform a
  misc_feature (44)..(274): Homolog of NCBI NO: 15384279 NR Description: co-chaperone CGE1 precursor isoform b
  misc_feature (66)..(276): Homolog of NCBI NO: 30686476 NR Description: chloroplast GrpE protein [Arabidopsis thaliana]
  misc_feature (1)..(276): Homolog of NCBI NO: 18418410 NR Description: chloroplast GrpE protein [Arabidopsis thaliana]
  misc_feature (1)..(279): Homolog of NCBI NO: 21593629 NR Description: putative heat shock protein [Arabidopsis thaliana]
  misc_feature (1)..(279): Homolog of NCBI NO: 18400095 NR Description: heat shock protein -related [Arabidopsis
MAISFAIDPSISPCFSFSSPSSSSKTLPLRNNLHFHGRPSPISPLISKPSRKFPIFSAHQTNNSEEANSKQQADVKTLIRSYKQALLNGDETSVTEIETMFCKIEKEKNKMDQKVLSLSMKIASEKEMKIRLQADFDNTRKKLDKDRLSTESNAKVQILKSLLPIIDSFEKAKLQVRVDTDKEKKIDTSYQGIYRQFVEVLRYLRVSVIATVGKPFDPLLHEAISREESEAVKAGIITEELNKGFVLGDRVLRPAKVKVSLGPVNKKTPSAAEEITPSA

SEQ ID NO: 25467 - protein, 180 aa, Arabidopsis thaliana
  peptide (1)..(180): Ceres Seq. ID no. 13490802
  misc_feature (7)..(162): Pfam Name: GrpE Pfam Description: GrpE
  misc_feature (1)..(164): Homolog of NCBI NO: 23041352 NR Description: hypothetical protein [Trichodesmium erythraeum
  misc_feature (1)..(174): Homolog of NCBI NO: 33862294 NR Description: Heat shock protein GrpE [Prochlorococcus marinus
  misc_feature (1)..(162): Homolog of NCBI NO: 37523763 NR Description: heat shock protein [Gloeobacter violaceus]
  misc_feature (18)..(164): Homolog of NCBI NO: 22298857 NR Description: heat shock protein [Thermosynechococcus elongatus
  misc_feature (1)..(175): Homolog of NCBI NO: 15384277 NR Description: co-chaperone CGE1 precursor isoform a
  misc_feature (1)..(175): Homolog of NCBI NO: 15384279 NR Description: co-chaperone CGE1 precursor isoform b
  misc_feature (1)..(177): Homolog of NCBI NO: 30686476 NR Description: chloroplast GrpE protein [Arabidopsis thaliana]
  misc_feature (1)..(177): Homolog of NCBI NO: 18418410 NR Description: chloroplast GrpE protein [Arabidopsis thaliana]
  misc_feature (1)..(180): Homolog of NCBI NO: 21593629 NR Description: putative heat shock protein [Arabidopsis thaliana]
  misc_feature (1)..(180): Homolog of NCBI NO: 18400095 NR Description: heat shock protein -related [Arabidopsis
MFCKIEKEKNKMDQKVLSLSMKIASEKEMKIRLQADFDNTRKKLDKDRLSTESNAKVQILKSLLPIIDSFEKAKLQVRVDTDKEKKIDTSYQGIYRQFVEVLRYLRVSVIATVGKPFDPLLHEAISREESEAVKAGIITEELNKGFVLGDRVLRPAKVKVSLGPVNKKTPSAAEEITPSA

SEQ ID NO: 25468 - DNA, 927 bp, Arabidopsis thaliana
  misc_feature (1)..(927): Ceres Seq. ID no. 12560106
  misc_feature: MA Experiment ID: 20000185 Result: Down-regulated in Transcription
  misc_feature: MA Experiment 20000185 PARAMETER Experiment Name: At_Roots__P Parameter: Age (day) Value: 7 vs. 21
  misc_feature: MA Experiment 20000185 PARAMETER Experiment Name: At_Roots__P Parameter: Organism Value: A. thaliana
  misc_feature: MA Experiment 20000185 PARAMETER Experiment Name: At_Roots__P Parameter: Tissue Value: Roots vs. Whole Plant
  misc_feature: MA Experiment ID: 20000451 Result: Down-regulated in Transcription
  misc_feature: MA Experiment 20000451 PARAMETER Experiment Name: At_CS6879_Shoots-Roots_P Parameter: Age (day) Value: 14
  misc_feature: MA Experiment 20000451 PARAMETER Experiment Name: At_CS6879_Shoots-Roots_P Parameter: Organism Value: A. thaliana
  misc_feature: MA Experiment 20000451 PARAMETER Experiment Name: At_CS6879_Shoots-Roots_P Parameter: Plant Line Value: CS6879 vs. WS
  misc_feature: MA Experiment 20000451 PARAMETER Experiment Name: At_CS6879_Shoots-Roots_P Parameter: Tissue Value: Roots
  misc_feature: MA Experiment ID: 20000455 Result: Up-regulated in Transcription
  misc_feature: MA Experiment 20000455 PARAMETER Experiment Name: At_100uM_ABA_P Parameter: Age (day) Value: 16
  misc_feature: MA Experiment 20000455 PARAMETER Experiment Name: At_100uM_ABA_P Parameter: Organism Value: A. thaliana
  misc_feature: MA Experiment 20000455 PARAMETER Experiment Name: At_100uM_ABA_P Parameter: Plant Line Value: WS
  misc_feature: MA Experiment 20000455 PARAMETER Experiment Name: At_100uM_ABA_P Parameter: Timepoint (hr) Value: 48
  misc_feature: MA Experiment 20000455 PARAMETER Experiment Name: At_100uM_ABA_P Parameter: Tissue Value: Aerial
  misc_feature: MA Experiment 20000455 PARAMETER Experiment Name: At_100uM_ABA_P Parameter: Treatment Value: 100uM ABA vs. No Treatment
  misc_feature: MA Experiment ID: 20000495 Result: Down-regulated in Transcription
  misc_feature: MA Experiment 20000495 PARAMETER Experiment Name: At_Guard_Cells_P Parameter: Harvest Date Value: 8/2/2002
  misc_feature: MA Experiment 20000495 PARAMETER Experiment Name: At_Guard_Cells_P Parameter: Organism Value: A. thaliana
  misc_feature: MA Experiment 20000495 PARAMETER Experiment Name: At_Guard_Cells_P Parameter: Tissue Value: Guard Cells vs. Leaves
  misc_feature: MA Experiment ID: 20000496 Result: Down-regulated in Transcription
  misc_feature: MA Experiment 20000496 PARAMETER Experiment Name: At_Guard_Cells_P Parameter: Harvest Date Value: 7/19/2002
  misc_feature: MA Experiment 20000496 PARAMETER Experiment Name: At_Guard_Cells_P Parameter: Organism Value: Canola
  misc_feature: MA Experiment 20000496 PARAMETER Experiment Name: At_Guard_Cells_P Parameter: Tissue Value: Guard Cells vs. Leaves
  misc_feature: MA Experiment ID: 20000527 Result: Down-regulated in Transcription
  misc_feature: MA Experiment 20000527 PARAMETER Experiment Name: At_10percent_PEG_P Parameter: Age (day) Value: 20
  misc_feature: MA Experiment 20000527 PARAMETER Experiment Name: At_10percent_PEG_P Parameter: Organism Value: A. thaliana
  misc_feature: MA Experiment 20000527 PARAMETER Experiment Name: At_10percent_PEG_P Parameter: Plant Line Value: WS
  misc_feature: MA Experiment 20000527 PARAMETER Experiment Name: At_10percent_PEG_P Parameter: Timepoint (day) Value: 20
  misc_feature: MA Experiment 20000527 PARAMETER Experiment Name: At_10percent_PEG_P Parameter: Tissue Value: Whole Plant
  misc_feature: MA Experiment 20000527 PARAMETER Experiment Name: At_10percent_PEG_P Parameter: Treatment Value: 10percent PEG vs. No Treatment
  misc_feature: MA Experiment ID: 20001248 Result: Down-regulated in Transcription
  misc_feature: MA Experiment 20001248 PARAMETER Experiment Name: At_Far-red-induction_P Parameter: Age (day) Value: 7
  misc_feature: MA Experiment 20001248 PARAMETER Experiment Name: At_Far-red-induction_P Parameter: Light Value: Far-red vs. White
  misc_feature: MA Experiment 20001248 PARAMETER Experiment Name: At_Far-red-induction_P Parameter: Organism Value: A. thaliana
  misc_feature: MA Experiment 20001248 PARAMETER Experiment Name: At_Far-red-induction_P Parameter: Plant Line Value: Columbia
  misc_feature: MA Experiment 20001248 PARAMETER Experiment Name: At_Far-red-induction_P Parameter: Timepoint (hr) Value: 4
  misc_feature: MA Experiment 20001248 PARAMETER Experiment Name: At_Far-red-induction_P Parameter: Tissue Value: Whole Plant
  misc_feature: MA Experiment ID: 20001450 Result: Down-regulated in Transcription
  misc_feature: MA Experiment 20001450 PARAMETER Experiment Name: At_Far-red-induction_P Parameter: Age (day) Value: 7
  misc_feature: MA Experiment 20001450 PARAMETER Experiment Name: At_Far-red-induction_P Parameter: Light Value: Far-red vs. White
  misc_feature: MA Experiment 20001450 PARAMETER Experiment Name: At_Far-red-induction_P Parameter: Organism Value: A. thaliana
  misc_feature: MA Experiment 20001450 PARAMETER Experiment Name: At_Far-red-induction_P Parameter: Plant Line Value: Columbia
  misc_feature: MA Experiment 20001450 PARAMETER Experiment Name: At_Far-red-induction_P Parameter: Timepoint (hr) Value: 8
  misc_feature: MA Experiment 20001450 PARAMETER Experiment Name: At_Far-red-induction_P Parameter: Tissue Value: Whole Plant
  misc_feature: MA Experiment ID: 20001458 Result: Down-regulated in Transcription
  misc_feature: MA Experiment 20001458 PARAMETER Experiment Name: At_50mM_NH4NO3_L-to-H_P Parameter: Age (day) Value: Undefined
  misc_feature: MA Experiment 20001458 PARAMETER Experiment Name: At_50mM_NH4NO3_L-to-H_P Parameter: Organism Value: Undefined
  misc_feature: MA Experiment 20001458 PARAMETER Experiment Name: At_50mM_NH4NO3_L-to-H_P Parameter: Plant Line Value: Undefined
  misc_feature: MA Experiment 20001458 PARAMETER Experiment Name: At_50mM_NH4NO3_L-to-H_P Parameter: Timepoint (hr) Value: 2
  misc_feature: MA Experiment 20001458 PARAMETER Experiment Name: At_50mM_NH4NO3_L-to-H_P Parameter: Tissue Value: Siliques
  misc_feature: MA Experiment 20001458 PARAMETER Experiment Name: At_50mM_NH4NO3_L-to-H_P Parameter: Treatment Value: 50mM NH4NO3 vs. 100mM Manitol
  misc_feature: MA Experiment ID: 20001757 Result: Down-regulated in Transcription
  misc_feature: MA Experiment 20001757 PARAMETER Experiment Name: At_50mM_NH4NO3_L-to-H_P Parameter: Timepoint (hr) Value: 6
  misc_feature: MA Experiment 20001757 PARAMETER Experiment Name: At_50mM_NH4NO3_L-to-H_P Parameter: Tissue Value: Leaf
  misc_feature: MA Experiment 20001757 PARAMETER Experiment Name: At_50mM_NH4NO3_L-to-H_P Parameter: Treatment Value: 50mM NH4NO3 vs 100mM Mannitol
atttttgaaaagtttctaacctctaggccacccactcatggctactctgttcatgaagctggtgagcttctttctaattctatctactttttgtctcactactgtgaactcggagccacagtgccataatttcaaatcgatcattagtttcggtgattctattgccgacactggaaacttgctcgccctctccgatcctaccaatctccctaaggtcgcgtttctaccgtacggagaaaccttcttccaccatccgaccggccgtttctcaaacggccgcctcatcatcgatttcattgctgaatttttgggttttccgcttgtgcctcctttttatggatctcaaaatgcaaattttgagaaaggagttaattttgcgggttggaggagcaacggcactggaacgttcctttcttgaagagagaggcattcattttccttacaccaacgttagtttagcccgtacagcttaagtagcttcaaggagagtttgcctaacttatgtgtctctccttcagactgcagagatatgataagaaaatctttgattctcatgggagaaattggagggaatgactataactacgcattctttgtgggcaaaaacattgaagagatcaaagagctggttccgcttgttattgaaactatctcttctgcaatcacggagttgattggtatgggggggaaaacatttctggtgcccggagagttcccgctcggatgctcagtagcctatttgagtttatatcaaacatcaaacatagaagaatatgatcctctaacaggatgtttgaaatggctgaacaagttttcagaataccacgacgagcagcttcaagcagaactcaacagacttcagaagttgtacccatgtcaacatcatatacgctgactactacaacacactgttgcgtcttgcccaag

SEQ ID NO: 25469 - protein, 126 aa, Arabidopsis thaliana
  peptide (1)..(126): Ceres Seq. ID no. 12560107
  misc_feature (35)..(126): Pfam Name: GDSL-like Lipase/Acylhydrolase Pfam Description: GDSL-like Lipase/Acylhydrolase
  misc_feature (1)..(126): Homolog of NCBI NO: 10764858 NR Description: F1K23.17 [Arabidopsis thaliana]
  misc_feature (1)..(126): Homolog of NCBI NO: 21593234 NR Description: lipase, putative [Arabidopsis thaliana]
  misc_feature (8)..(126): Homolog of NCBI NO: 15225872 NR Description: putative lipase; protein id: At2g27360.1
  misc_feature (1)..(126): Homolog of NCBI NO: 25336243 NR Description: pnrotein F1K23.16 [imported] - Arabidopsis
  misc_feature (4)..(126): Homolog of NCBI NO: 30692564 NR Description: lipase, putative [Arabidopsis thaliana]
  misc_feature (4)..(126): Homolog of NCBI NO: 12322540 NR Description: unknown protein [Arabidopsis thaliana]
  misc_feature (6)..(126): Homolog of NCBI NO: 15218728 NR Description: lipase, putative; protein id: At1g28590.1
  misc_feature (6)..(126): Homolog of NCBI NO: 10764858 NR Description: F1K23.17 [Arabidopsis thaliana]
  misc_feature (4)..(126): Homolog of NCBI NO: 15218725 NR Description: lipase, putative
  misc_feature (1)..(126): Homolog of NCBI NO: 15218723 NR Description: lipase, putative; protein id: At1g28570.1
MATLFMKLVSFFLILSTFCLTTVNSEPQCHNFKSIISFGDSIADTGNLLALSDPTNLPKVAFLPYGETFFHHPTGRFSNGRLIIDFIAEFLGFPLVPPFYGSQNANFEKGVNFAGWRSNGTGTFLS

SEQ ID NO: 25470 - protein, 121 aa, Arabidopsis thaliana
  peptide (1)..(121): Ceres Seq. ID no. 12560108
  misc_feature (30)..(121): Pfam Name: GDSL-like Lipase/Acylhydrolase Pfam Description: GDSL-like Lipase/Acylhydrolase
  misc_feature (1)..(121): Homolog of NCBI NO: 15218723 NR Description: lipase, putative; protein id: At1g28570.1
  misc_feature (1)..(121): Homolog of NCBI NO: 10764858 NR Description: F1K23.17 [Arabidopsis thaliana]
  misc_feature (1)..(121): Homolog of NCBI NO: 21593234 NR Description: lipase, putative [Arabidopsis thaliana]
  misc_feature (3)..(121): Homolog of NCBI NO: 15225872 NR Description: putative lipase; protein id: At2g27360.1
  misc_feature (1)..(121): Homolog of NCBI NO: 25336243 NR Description: pnrotein F1K23.16 [imported] - Arabidopsis
  misc_feature (1)..(121): Homolog of NCBI NO: 30692564 NR Description: lipase, putative [Arabidopsis thaliana]
  misc_feature (1)..(121): Homolog of NCBI NO: 12322540 NR Description: unknown protein [Arabidopsis thaliana]
  misc_feature (1)..(121): Homolog of NCBI NO: 15218728 NR Description: lipase, putative; protein id: At1g28590.1
  misc_feature (1)..(121): Homolog of NCBI NO: 10764858 NR Description: F1K23.17 [Arabidopsis thaliana]
  misc_feature (1)..(121): Homolog of NCBI NO: 15218725 NR Description: lipase, putative
MKLVSFFLILSTFCLTTVNSEPQCHNFKSIISFGDSIADTGNLLALSDPTNLPKVAFLPYGETFFHHPTGRFSNGRLIIDFIAEFLGFPLVPPFYGSQNANFEKGVNFAGWRSNGTGTFLS

SEQ ID NO: 25471 - protein, 121 aa, Arabidopsis thaliana
  peptide (1)..(121): Ceres Seq. ID no. 12560109
  misc_feature (1)..(115): Pfam Name: GDSL-like Lipase/Acylhydrolase Pfam Description: GDSL-like Lipase/Acylhydrolase
  misc_feature (1)..(115): Homolog of NCBI NO: 10764858 NR Description: F1K23.17 [Arabidopsis thaliana]
  misc_feature (1)..(115): Homolog of NCBI NO: 21593234 NR Description: lipase, putative [Arabidopsis thaliana]
  misc_feature (1)..(115): Homolog of NCBI NO: 15225872 NR Description: putative lipase; protein id: At2g27360.1
  misc_feature (1)..(115): Homolog of NCBI NO: 25336243 NR Description: pnrotein F1K23.16 [imported] - Arabidopsis
  misc_feature (1)..(115): Homolog of NCBI NO: 30692564 NR Description: lipase, putative [Arabidopsis thaliana]
  misc_feature (1)..(115): Homolog of NCBI NO: 12322540 NR Description: unknown protein [Arabidopsis thaliana]
  misc_feature (1)..(115): Homolog of NCBI NO: 15218728 NR Description: lipase, putative; protein id: At1g28590.1
  misc_feature (1)..(115): Homolog of NCBI NO: 10764858 NR Description: F1K23.17 [Arabidopsis thaliana]
  misc_feature (1)..(115): Homolog of NCBI NO: 15218725 NR Description: lipase, putative
  misc_feature (1)..(115): Homolog of NCBI NO: 15218723 NR Description: lipase, putative; protein id: At1g28570.1
MIRKSLILMGEIGGNDYNYAFFVGKNIEEIKELVPLVIETISSAITELIGMGGKTFLVPGEFPLGCSVAYLSLYQTSNIEEYDPLTGCLKWLNKFSEYHDEQLQAELNRLQKLYPCQHHIR

SEQ ID NO: 25472 - DNA, 696 bp, Arabidopsis thaliana
  misc_feature (1)..(696): Ceres Seq. ID no. 13496315
  misc_feature: MA Experiment ID: 108668 Result: Up-regulated in Transcription
  misc_feature: MA Experiment 108668 PARAMETER Experiment Name: At_2mM_SA_cDNA_P Parameter: Plant Line Value: WS
  misc_feature: MA Experiment 108668 PARAMETER Experiment Name: At_2mM_SA_cDNA_P Parameter: Timepoint (hr) Value: 6
  misc_feature: MA Experiment 108668 PARAMETER Experiment Name: At_2mM_SA_cDNA_P Parameter: Treatment Value: 2mM SA vs. No Treatment
  misc_feature: Phenotype: INFLORESCENCE Height-Short
  misc_feature: Phenotype: INFLORESCENCE Height-Short
  misc_feature: Phenotype: INFLORESCENCE Branching-Reduced Apical Dominance
  misc_feature: Phenotype: INFLORESCENCE Height-Short
  misc_feature: Phenotype: INFLORESCENCE Height-Short
tctctctctctctctctctctctctttccctccgccatgacaagctcttcatctccttcacgcaaggcgttaagcaagatcgcgtgtaataggttacaaaaggagttatcagagtggcaagtaaatccaccgactgggtttaagcacagagttactgataatcttcaaaaatgggtaattgaggtaacaggagcacctggtacgctttacgctaatgaaacttataatcttcaggttgagtttcctcaacattatcctatggaagctcctcaggtgatttttgttccaccagctccgttacatcctcatatttacagcaatggacatatttgtttagatattctgtatgactcatggtctccagcaatgacagtgagttcagtctgtatcagcattctctcgatgctatcaagttcacccgaaaagcaacgccccactgataatgatcgatatgtgaagaactgcaagaacgggaggtctcctaaagagacaaggtggtggttccatgacgacaaggtttaatgatgacgaccttaagatgtctctcctttcagttacaaaagaggtttatataatttcccaagactgataatactaattgaaattcctcatggcctcccacttttttttctgtaacggatcattatgtataaatgacatctgaaatgtttcagtgtctgaattaacaccttgtgc

SEQ ID NO: 25473 - protein, 173 aa, Arabidopsis thaliana
  peptide (1)..(173): Ceres Seq. ID no. 13496316
  misc_feature (13)..(114): Homolog of NCBI NO: 25293672 NR Description: protein F27F5.13 [imported] - Arabidopsis
  misc_feature (77)..(173): Homolog of NCBI NO: 25293670 NR Description: ubiquitin-conjugating enzyme 18
  misc_feature (13)..(142): Homolog of NCBI NO: 34897008 NR Description: putative ubiquitin-conjugating enzyme E2 [Oryza
  misc_feature (13)..(173): Homolog of NCBI NO: 18419831 NR Description: ubiquitin-conjugating enzyme 17 (UBC17)
  misc_feature (13)..(173): Homolog of NCBI NO: 2801444 NR Description: ubiquitin-conjugating enzyme 16 [Arabidopsis
  misc_feature (13)..(173): Homolog of NCBI NO: 4090259 NR Description: ubiquitin-conjugating enzyme E2 [Pseudotsuga
  misc_feature (13)..(173): Homolog of NCBI NO: 18410856 NR Description: ubiquitin-conjugating enzyme 16 (UBC16)
  misc_feature (13)..(173): Homolog of NCBI NO: 481811 NR Description: ubiquitin-conjugating enzyme UBC2-1 - Arabidopsis
  misc_feature (13)..(173): Homolog of NCBI NO: 18401461 NR Description: ubiquitin-conjugating enzyme 15 (UBC15)
  misc_feature (13)..(173): Homolog of NCBI NO: 18422281 NR Description: ubiquitin-conjugating enzyme 18 (UBC18)
SLSLSLSLFPSAMTSSSSPSRKALSKIACNRLQKELSEWQVNPPTGFKHRVTDNLQKWVIEVTGAPGTLYANETYNLQVEFPQHYPMEAPQVIFVPPAPLHPHIYSNGHICLDILYDSWSPAMTVSSVCISILSMLSSSPEKQRPTDNDRYVKNCKNGRSPKETRWWFHDDKV

SEQ ID NO: 25474 - protein, 161 aa, Arabidopsis thaliana
  peptide (1)..(161): Ceres Seq. ID no. 13496317
  misc_feature (1)..(102): Homolog of NCBI NO: 25293672 NR Description: protein F27F5.13 [imported] - Arabidopsis
  misc_feature (65)..(161): Homolog of NCBI NO: 25293670 NR Description: ubiquitin-conjugating enzyme 18
  misc_feature (1)..(130): Homolog of NCBI NO: 34897008 NR Description: putative ubiquitin-conjugating enzyme E2 [Oryza
  misc_feature (1)..(161): Homolog of NCBI NO: 18419831 NR Description: ubiquitin-conjugating enzyme 17 (UBC17)
  misc_feature (1)..(161): Homolog of NCBI NO: 2801444 NR Description: ubiquitin-conjugating enzyme 16 [Arabidopsis
  misc_feature (1)..(161): Homolog of NCBI NO: 4090259 NR Description: ubiquitin-conjugating enzyme E2 [Pseudotsuga
  misc_feature (1)..(161): Homolog of NCBI NO: 18410856 NR Description: ubiquitin-conjugating enzyme 16 (UBC16)
  misc_feature (1)..(161): Homolog of NCBI NO: 481811 NR Description: ubiquitin-conjugating enzyme UBC2-1 - Arabidopsis
  misc_feature (1)..(161): Homolog of NCBI NO: 18401461 NR Description: ubiquitin-conjugating enzyme 15 (UBC15)
  misc_feature (1)..(161): Homolog of NCBI NO: 18422281 NR Description: ubiquitin-conjugating enzyme 18 (UBC18)
MTSSSSPSRKALSKIACNRLQKELSEWQVNPPTGFKHRVTDNLQKWVIEVTGAPGTLYANETYNLQVEFPQHYPMEAPQVIFVPPAPLHPHIYSNGHICLDILYDSWSPAMTVSSVCISILSMLSSSPEKQRPTDNDRYVKNCKNGRSPKETRWWFHDDKV

SEQ ID NO: 25475 - protein, 87 aa, Arabidopsis thaliana
  peptide (1)..(87): Ceres Seq. ID no. 13496318
  misc_feature (1)..(28): Homolog of NCBI NO: 25293672 NR Description: protein F27F5.13 [imported] - Arabidopsis
  misc_feature (1)..(87): Homolog of NCBI NO: 25293670 NR Description: ubiquitin-conjugating enzyme 18
  misc_feature (1)..(56): Homolog of NCBI NO: 34897008 NR Description: putative ubiquitin-conjugating enzyme E2 [Oryza
  misc_feature (1)..(87): Homolog of NCBI NO: 18419831 NR Description: ubiquitin-conjugating enzyme 17 (UBC17)
  misc_feature (1)..(87): Homolog of NCBI NO: 2801444 NR Description: ubiquitin-conjugating enzyme 16 [Arabidopsis
  misc_feature (1)..(87): Homolog of NCBI NO: 4090259 NR Description: ubiquitin-conjugating enzyme E2 [Pseudotsuga
  misc_feature (1)..(87): Homolog of NCBI NO: 18410856 NR Description: ubiquitin-conjugating enzyme 16 (UBC16)
  misc_feature (1)..(87): Homolog of NCBI NO: 481811 NR Description: ubiquitin-conjugating enzyme UBC2-1 - Arabidopsis
  misc_feature (1)..(87): Homolog of NCBI NO: 18401461 NR Description: ubiquitin-conjugating enzyme 15 (UBC15)
  misc_feature (1)..(87): Homolog of NCBI NO: 18422281 NR Description: ubiquitin-conjugating enzyme 18 (UBC18)
MEAPQVIFVPPAPLHPHIYSNGHICLDILYDSWSPAMTVSSVCISILSMLSSSPEKQRPTDNDRYVKNCKNGRSPKETRWWFHDDKV

SEQ ID NO: 25476 - DNA, 1098 bp, Arabidopsis thaliana
  misc_feature (1)..(1098): Ceres Seq. ID no. 12371845
  misc_feature: MA Experiment ID: 108433 Result: Up-regulated in Transcription
  misc_feature: MA Experiment 108433 PARAMETER Experiment Name: At_rhl_Mutant2_cDNA_P Parameter: Age (day) Value: 7
  misc_feature: MA Experiment 108433 PARAMETER Experiment Name: At_rhl_Mutant2_cDNA_P Parameter: Organism Value: A. thaliana
  misc_feature: MA Experiment 108433 PARAMETER Experiment Name: At_rhl_Mutant2_cDNA_P Parameter: Plant Line Value: rhl Mutant vs. wt landsburg
  misc_feature: MA Experiment 108433 PARAMETER Experiment Name: At_rhl_Mutant2_cDNA_P Parameter: Tissue Value: Roots
  misc_feature: MA Experiment ID: 20000112 Result: Up-regulated in Transcription
  misc_feature: MA Experiment 20000112 PARAMETER Experiment Name: At_42deg_Heat_cDNA_P Parameter: Temperature (deg C) Value: 42 vs. 22
  misc_feature: MA Experiment 20000112 PARAMETER Experiment Name: At_42deg_Heat_cDNA_P Parameter: Timepoint (hr) Value: 2
  misc_feature: MA Experiment 20000112 PARAMETER Experiment Name: At_42deg_Heat_cDNA_P Parameter: Tissue Value: Aerial
ttcgttccctggttcgaaacagcagctagacgaaaactgtgtaatggctatatcactgaagaggaaccgtttcttcattccttatacgaatctcgtcttcttcttcttcttgtgtatctctctgctcgataaaactgtatccatcaggatttcgaatcagatctcggatactgtcgttgattctcccgatcgtcctttgaaatctgcggttttcgctcttggaagcttctggagatcggaggcggcgtttggttgtatcaatggcgtcgtacgaacctccgccggttacgccggtggaacgaagacgaatccggagtataggaacttaggtgatcacgccgagtccgtacaggttgaatatgatccaaggataattggttatcgtcagctcttagatgtattttggtctagtcatgattctagacaagtgtttggacaaggtcctgatgtgggtaatcaatacagatcctgtattttcactaattctacagaagagttgagactggcttctaccagcaaagaaagggagcaacttaatacaagaagcagtatcgtgaccactcaaattcaacagctaggaacgttttatcgcgcagagcctgatcaccagaagttcgagctgaaacaacatccatttcttattcagctaattggaaacatggtagaagaagagcttgagagatcagctctagccacaaaactaaacggttacgcagccgagctctgcccgcctagaatccagaaacatatcgactctagagttaatgagatcattagaaaaggttggcccgtcttgagagacatctaatatataagccttgtgagatcttcgcgttcttggatttgattgcttagtcgcagatgtaagttttggttcattcttttggccaggaattggtcacaacaatgtttatgttcttactcttgccccttgagtggtgattgttcagcgttttgtcttgtttctttatgatctctcaaatagaatatgctttttgttttcatgtaagcagattcatttagattttcattgtatcattatggtattgattaccaattcattgatattatatatatatatgatatactttgattgcc

SEQ ID NO: 25477 - protein, 268 aa, Arabidopsis thaliana
  peptide (1)..(268): Ceres Seq. ID no. 12371846
  misc_feature (67)..(219): Pfam Name: Peptide methionine sulfoxide reductase Pfam Description: Peptide methionine sulfoxide reductase
  misc_feature (66)..(209): Homolog of NCBI NO: 22968448 NR Description: hypothetical protein [Rhodospirillum rubrum]
  misc_feature (67)..(211): Homolog of NCBI NO: 15678563 NR Description: peptide methionine sulfoxide reductase
  misc_feature (68)..(239): Homolog of NCBI NO: 28557615 NR Description: RE51574p [Drosophila melanogaster]
  misc_feature (68)..(239): Homolog of NCBI NO: 24664631 NR Description: Ecdysone-induced protein 28/29kD CG7266-PB
  misc_feature (68)..(239): Homolog of NCBI NO: 311724 NR Description: EIP29 [Drosophila melanogaster]
  misc_feature (68)..(239): Homolog of NCBI NO: 24664627 NR Description: Ecdysone-induced protein 28/29kD CG7266-PA
  misc_feature (68)..(239): Homolog of NCBI NO: 119251 NR Description: Ecdysone-induced protein 28/29 kDa
  misc_feature (68)..(239): Homolog of NCBI NO: 7937 NR Description: put. Eip 28 (aa 1-255) [Drosophila melanogaster]
  misc_feature (67)..(239): Homolog of NCBI NO: 33089114 NR Description: methionine sulfoxide reductase [Apis mellifera
  misc_feature (15)..(268): Homolog of NCBI NO: 15227955 NR Description: putative peptide methionine sulfoxide reductase
SFPGSKQQLDENCVMAISLKRNRFFIPYTNLVFFFFLCISLLDKTVSIRISNQISDTVVDSPDRPLKSAVFALGSFWRSEAAFGCINGVVRTSAGYAGGTKTNPEYRNLGDHAESVQVEYDPRIIGYRQLLDVFWSSHDSRQVFGQGPDVGNQYRSCIFTNSTEELRLASTSKEREQLNTRSSIVTTQIQQLGTFYRAEPDHQKFELKQHPFLIQLIGNMVEEELERSALATKLNGYAAELCPPRIQKHIDSRVNEIIRKGWPVLRDI

SEQ ID NO: 25478 - protein, 254 aa, Arabidopsis thaliana
  peptide (1)..(254): Ceres Seq. ID no. 12371847
  misc_feature (53)..(205): Pfam Name: Peptide methionine sulfoxide reductase Pfam Description: Peptide methionine sulfoxide reductase
  misc_feature (52)..(195): Homolog of NCBI NO: 22968448 NR Description: hypothetical protein [Rhodospirillum rubrum]
  misc_feature (53)..(197): Homolog of NCBI NO: 15678563 NR Description: peptide methionine sulfoxide reductase
  misc_feature (54)..(225): Homolog of NCBI NO: 28557615 NR Description: RE51574p [Drosophila melanogaster]
  misc_feature (54)..(225): Homolog of NCBI NO: 24664631 NR Description: Ecdysone-induced protein 28/29kD CG7266-PB
  misc_feature (54)..(225): Homolog of NCBI NO: 311724 NR Description: EIP29 [Drosophila melanogaster]
  misc_feature (54)..(225): Homolog of NCBI NO: 119251 NR Description: Ecdysone-induced protein 28/29 kDa
  misc_feature (54)..(225): Homolog of NCBI NO: 24664627 NR Description: Ecdysone-induced protein 28/29kD CG7266-PA
  misc_feature (54)..(225): Homolog of NCBI NO: 7937 NR Description: put. Eip 28 (aa 1-255) [Drosophila melanogaster]
  misc_feature (53)..(225): Homolog of NCBI NO: 33089114 NR Description: methionine sulfoxide reductase [Apis mellifera
  misc_feature (1)..(254): Homolog of NCBI NO: 15227955 NR Description: putative peptide methionine sulfoxide reductase
MAISLKRNRFFIPYTNLVFFFFLCISLLDKTVSIRISNQISDTVVDSPDRPLKSAVFALGSFWRSEAAFGCINGVVRTSAGYAGGTKTNPEYRNLGDHAESVQVEYDPRIIGYRQLLDVFWSSHDSRQVFGQGPDVGNQYRSCIFTNSTEELRLASTSKEREQLNTRSSIVTTQIQQLGTFYRAEPDHQKFELKQHPFLIQLIGNMVEEELERSALATKLNGYAAELCPPRIQKHIDSRVNEIIRKGWPVLRDI

SEQ ID NO: 25479 - DNA, 697 bp, Arabidopsis thaliana
  misc_feature (1)..(697): Ceres Seq. ID no. 12678113
  misc_feature: MA Experiment ID: 20000180 Result: Down-regulated in Transcription
  misc_feature: MA Experiment 20000180 PARAMETER Experiment Name: At_Germinating_Seeds_P Parameter: Age (hr) Value: 24 vs. 0
  misc_feature: MA Experiment 20000180 PARAMETER Experiment Name: At_Germinating_Seeds_P Parameter: Tissue Value: Germinating Seeds
  misc_feature: MA Experiment ID: 20000227 Result: Up-regulated in Transcription
  misc_feature: MA Experiment 20000227 PARAMETER Experiment Name: At_Root-Tips-vs-Tops_P Parameter: Tissue Value: Root Tips vs. Root Tops
  misc_feature: MA Experiment ID: 20000264 Result: Up-regulated in Transcription
  misc_feature: MA Experiment 20000264 PARAMETER Experiment Name: At_Open_Flower_P Parameter: Age (day) Value: 21
  misc_feature: MA Experiment 20000264 PARAMETER Experiment Name: At_Open_Flower_P Parameter: Plant Line Value: WS
  misc_feature: MA Experiment 20000264 PARAMETER Experiment Name: At_Open_Flower_P Parameter: Tissue Value: Open Flower vs. Whole Plant
  misc_feature: MA Experiment ID: 20000453 Result: Down-regulated in Transcription
  misc_feature: MA Experiment 20000453 PARAMETER Experiment Name: At_100uM_ABA_P Parameter: Age (day) Value: 15
  misc_feature: MA Experiment 20000453 PARAMETER Experiment Name: At_100uM_ABA_P Parameter: Organism Value: A. thaliana
  misc_feature: MA Experiment 20000453 PARAMETER Experiment Name: At_100uM_ABA_P Parameter: Plant Line Value: WS
  misc_feature: MA Experiment 20000453 PARAMETER Experiment Name: At_100uM_ABA_P Parameter: Timepoint (hr) Value: 24
  misc_feature: MA Experiment 20000453 PARAMETER Experiment Name: At_100uM_ABA_P Parameter: Tissue Value: Aerial
  misc_feature: MA Experiment 20000453 PARAMETER Experiment Name: At_100uM_ABA_P Parameter: Treatment Value: 100uM ABA vs. No Treatment
  misc_feature: MA Experiment ID: 20000456 Result: Up-regulated in Transcription
  misc_feature: MA Experiment 20000456 PARAMETER Experiment Name: At_100uM_BA_P Parameter: Age (day) Value: 14
  misc_feature: MA Experiment 20000456 PARAMETER Experiment Name: At_100uM_BA_P Parameter: Organism Value: A. thaliana
  misc_feature: MA Experiment 20000456 PARAMETER Experiment Name: At_100uM_BA_P Parameter: Plant Line Value: WS
  misc_feature: MA Experiment 20000456 PARAMETER Experiment Name: At_100uM_BA_P Parameter: Timepoint (hr) Value: 6
  misc_feature: MA Experiment 20000456 PARAMETER Experiment Name: At_100uM_BA_P Parameter: Tissue Value: Aerial
  misc_feature: MA Experiment 20000456 PARAMETER Experiment Name: At_100uM_BA_P Parameter: Treatment Value: 100uM BA vs. No Treatment
  misc_feature: MA Experiment ID: 20000495 Result: Up-regulated in Transcription
  misc_feature: MA Experiment 20000495 PARAMETER Experiment Name: At_Guard_Cells_P Parameter: Harvest Date Value: 8/2/2002
  misc_feature: MA Experiment 20000495 PARAMETER Experiment Name: At_Guard_Cells_P Parameter: Organism Value: A. thaliana
  misc_feature: MA Experiment 20000495 PARAMETER Experiment Name: At_Guard_Cells_P Parameter: Tissue Value: Guard Cells vs. Leaves
  misc_feature: MA Experiment ID: 20000794 Result: Down-regulated in Transcription
  misc_feature: MA Experiment 20000794 PARAMETER Experiment Name: At_Petals_P Parameter: Age (day) Value: 23-25 days
  misc_feature: MA Experiment 20000794 PARAMETER Experiment Name: At_Petals_P Parameter: Plant Line Value: WS
  misc_feature: MA Experiment 20000794 PARAMETER Experiment Name: At_Petals_P Parameter: Tissue Value: Petals vs. Whole plant
  misc_feature: MA Experiment ID: 20001247 Result: Down-regulated in Transcription
  misc_feature: MA Experiment 20001247 PARAMETER Experiment Name: At_Far-red-induction_P Parameter: Age (day) Value: 7
  misc_feature: MA Experiment 20001247 PARAMETER Experiment Name: At_Far-red-induction_P Parameter: Light Value: Far-red vs. White
  misc_feature: MA Experiment 20001247 PARAMETER Experiment Name: At_Far-red-induction_P Parameter: Organism Value: A. thaliana
  misc_feature: MA Experiment 20001247 PARAMETER Experiment Name: At_Far-red-induction_P Parameter: Plant Line Value: Columbia
  misc_feature: MA Experiment 20001247 PARAMETER Experiment Name: At_Far-red-induction_P Parameter: Timepoint (hr) Value: 1
  misc_feature: MA Experiment 20001247 PARAMETER Experiment Name: At_Far-red-induction_P Parameter: Tissue Value: Whole Plant
  misc_feature: MA Experiment ID: 20001458 Result: Up-regulated in Transcription
  misc_feature: MA Experiment 20001458 PARAMETER Experiment Name: At_50mM_NH4NO3_L-to-H_P Parameter: Age (day) Value: Undefined
  misc_feature: MA Experiment 20001458 PARAMETER Experiment Name: At_50mM_NH4NO3_L-to-H_P Parameter: Organism Value: Undefined
  misc_feature: MA Experiment 20001458 PARAMETER Experiment Name: At_50mM_NH4NO3_L-to-H_P Parameter: Plant Line Value: Undefined
  misc_feature: MA Experiment 20001458 PARAMETER Experiment Name: At_50mM_NH4NO3_L-to-H_P Parameter: Timepoint (hr) Value: 2
  misc_feature: MA Experiment 20001458 PARAMETER Experiment Name: At_50mM_NH4NO3_L-to-H_P Parameter: Tissue Value: Siliques
  misc_feature: MA Experiment 20001458 PARAMETER Experiment Name: At_50mM_NH4NO3_L-to-H_P Parameter: Treatment Value: 50mM NH4NO3 vs. 100mM Manitol
  misc_feature: MA Experiment ID: 20001556 Result: Up-regulated in Transcription
  misc_feature: MA Experiment 20001556 PARAMETER Experiment Name: At_Drought_Soil_Dry_P Parameter: Age (day) Value: 26
  misc_feature: MA Experiment 20001556 PARAMETER Experiment Name: At_Drought_Soil_Dry_P Parameter: Organism Value: A. thaliana
  misc_feature: MA Experiment 20001556 PARAMETER Experiment Name: At_Drought_Soil_Dry_P Parameter: Plant Line Value: WS
  misc_feature: MA Experiment 20001556 PARAMETER Experiment Name: At_Drought_Soil_Dry_P Parameter: Post Timepoint (hr) Value: None
  misc_feature: MA Experiment 20001556 PARAMETER Experiment Name: At_Drought_Soil_Dry_P Parameter: Post-Treatment Value: None
  misc_feature: MA Experiment 20001556 PARAMETER Experiment Name: At_Drought_Soil_Dry_P Parameter: Timepoint (day) Value: 12
  misc_feature: MA Experiment 20001556 PARAMETER Experiment Name: At_Drought_Soil_Dry_P Parameter: Treatment Value: Drought vs. No Drought
  misc_feature: MA Experiment ID: 20001557 Result: Up-regulated in Transcription
  misc_feature: MA Experiment 20001557 PARAMETER Experiment Name: At_Drought_Soil_Dry_P Parameter: Age (day) Value: 27
  misc_feature: MA Experiment 20001557 PARAMETER Experiment Name: At_Drought_Soil_Dry_P Parameter: Organism Value: A. thaliana
  misc_feature: MA Experiment 20001557 PARAMETER Experiment Name: At_Drought_Soil_Dry_P Parameter: Plant Line Value: WS
  misc_feature: MA Experiment 20001557 PARAMETER Experiment Name: At_Drought_Soil_Dry_P Parameter: Post Timepoint (hr) Value: 3
  misc_feature: MA Experiment 20001557 PARAMETER Experiment Name: At_Drought_Soil_Dry_P Parameter: Post-Treatment Value: Re-Water vs. No Drought
  misc_feature: MA Experiment 20001557 PARAMETER Experiment Name: At_Drought_Soil_Dry_P Parameter: Timepoint (day) Value: 13
  misc_feature: MA Experiment 20001557 PARAMETER Experiment Name: At_Drought_Soil_Dry_P Parameter: Treatment Value: Drought vs. No Drought
  misc_feature: MA Experiment ID: 20001558 Result: Up-regulated in Transcription
  misc_feature: MA Experiment 20001558 PARAMETER Experiment Name: At_Drought_Soil_Dry_P Parameter: Age (day) Value: 27
  misc_feature: MA Experiment 20001558 PARAMETER Experiment Name: At_Drought_Soil_Dry_P Parameter: Organism Value: A. thaliana
  misc_feature: MA Experiment 20001558 PARAMETER Experiment Name: At_Drought_Soil_Dry_P Parameter: Plant Line Value: WS
  misc_feature: MA Experiment 20001558 PARAMETER Experiment Name: At_Drought_Soil_Dry_P Parameter: Post Timepoint (hr) Value: 6
  misc_feature: MA Experiment 20001558 PARAMETER Experiment Name: At_Drought_Soil_Dry_P Parameter: Post-Treatment Value: Re-Water vs. No Drought
  misc_feature: MA Experiment 20001558 PARAMETER Experiment Name: At_Drought_Soil_Dry_P Parameter: Timepoint (day) Value: 13
  misc_feature: MA Experiment 20001558 PARAMETER Experiment Name: At_Drought_Soil_Dry_P Parameter: Treatment Value: Drought vs. No Drought
  misc_feature: MA Experiment ID: 20001560 Result: Up-regulated in Transcription
  misc_feature: MA Experiment 20001560 PARAMETER Experiment Name: At_Drought_Soil_Dry_P Parameter: Age (day) Value: 28
  misc_feature: MA Experiment 20001560 PARAMETER Experiment Name: At_Drought_Soil_Dry_P Parameter: Organism Value: A. thaliana
  misc_feature: MA Experiment 20001560 PARAMETER Experiment Name: At_Drought_Soil_Dry_P Parameter: Plant Line Value: WS
  misc_feature: MA Experiment 20001560 PARAMETER Experiment Name: At_Drought_Soil_Dry_P Parameter: Post Timepoint (hr) Value: None
  misc_feature: MA Experiment 20001560 PARAMETER Experiment Name: At_Drought_Soil_Dry_P Parameter: Post-Treatment Value: None
  misc_feature: MA Experiment 20001560 PARAMETER Experiment Name: At_Drought_Soil_Dry_P Parameter: Timepoint (day) Value: 14
  misc_feature: MA Experiment 20001560 PARAMETER Experiment Name: At_Drought_Soil_Dry_P Parameter: Treatment Value: Drought vs. No Drought
  misc_feature: MA Experiment ID: 20001756 Result: Up-regulated in Transcription
  misc_feature: MA Experiment 20001756 PARAMETER Experiment Name: At_50mM_NH4NO3_L-to-H_P Parameter: Timepoint (hr) Value: 4
  misc_feature: MA Experiment 20001756 PARAMETER Experiment Name: At_50mM_NH4NO3_L-to-H_P Parameter: Tissue Value: Leaf
  misc_feature: MA Experiment 20001756 PARAMETER Experiment Name: At_50mM_NH4NO3_L-to-H_P Parameter: Treatment Value: 50mM NH4NO3 vs 100mM Mannitol
  misc_feature: MA Experiment ID: 20001757 Result: Up-regulated in Transcription
  misc_feature: MA Experiment 20001757 PARAMETER Experiment Name: At_50mM_NH4NO3_L-to-H_P Parameter: Timepoint (hr) Value: 6
  misc_feature: MA Experiment 20001757 PARAMETER Experiment Name: At_50mM_NH4NO3_L-to-H_P Parameter: Tissue Value: Leaf
  misc_feature: MA Experiment 20001757 PARAMETER Experiment Name: At_50mM_NH4NO3_L-to-H_P Parameter: Treatment Value: 50mM NH4NO3 vs 100mM Mannitol
atcctctcactgcctcttttctcactcactgttacttcgctaaaaccctaatttcgccattcccttctctaagacatttagaaatggctttctgcaacaaacttagcggtatcttgagacaaggggtttctcagagctcaaatggtccagttacatctatgcttggctctcttcgttacatgtcctctaagctttttgttggtggtctctcttggggaactgatgacagctccttaaagcaagctttcactagctttggtgaagtcacagaagcaacggtgattgcagacagagagacagggaggtcgaggggattcggatttgttagcttcagctgtgaggattctgctaacaatgccataaaagaaatggatggaaaggagctgaatggtaggcaaatccgtgtgaatcttgcaaccgaaagatcgagtgccccgagatcatcatttggtggtggtggcggttacggtggtggcggtggtggtggctactaaagcaaacaagccagaggatttgagagagagaggagcctcagaactttcagtagttagttagtttgtttgtttcctctttgtttaactgcaaataaccttaactggttttgttaaacttatttagccctgttttttggttgtgtctgaataccgtagtattgttgctccatcttctgcaaatctattagcatcgagttcgattc

SEQ ID NO: 25480 - protein, 163 aa, Arabidopsis thaliana
  peptide (1)..(163): Ceres Seq. ID no. 12678114
  misc_feature (64)..(135): Pfam Name: RNA recognition motif. (a.k.a. RRM, RBD, or RNP domain) Pfam Description: RNA recognition motif. (a.k.a. RRM, RBD, or RNP
  misc_feature (150)..(163): Homolog of NCBI NO: 15239505 NR Description: glycine-rich RNA-binding protein
  misc_feature (28)..(161): Homolog of NCBI NO: 15239505 NR Description: glycine-rich RNA-binding protein
  misc_feature (28)..(163): Homolog of NCBI NO: 7439995 NR Description: RNA binding protein 3 - wood tobacco
  misc_feature (47)..(161): Homolog of NCBI NO: 322514 NR Description: glycine-rich RNA-binding protein (clone A81) -
  misc_feature (28)..(163): Homolog of NCBI NO: 7439994 NR Description: glycine-rich RNA-binding protein - garden pea
  misc_feature (28)..(161): Homolog of NCBI NO: 15236359 NR Description: glycine-rich RNA-binding protein AtGRP2
  misc_feature (28)..(163): Homolog of NCBI NO: 30682622 NR Description: glycine-rich RNA-binding protein (AtGRP2)
  misc_feature (28)..(163): Homolog of NCBI NO: 2826811 NR Description: AtGRP2 [Arabidopsis thaliana]
  misc_feature (28)..(163): Homolog of NCBI NO: 21553972 NR Description: glycine-rich RNA binding protein, putative
  misc_feature (28)..(163): Homolog of NCBI NO: 15229525 NR Description: glycine-rich RNA-binding protein
PLTASFLTHCYFAKTLISPFPSLRHLEMAFCNKLSGILRQGVSQSSNGPVTSMLGSLRYMSSKLFVGGLSWGTDDSSLKQAFTSFGEVTEATVIADRETGRSRGFGFVSFSCEDSANNAIKEMDGKELNGRQIRVNLATERSSAPRSSFGGGGGYGGGGGGGY

SEQ ID NO: 25481 - protein, 136 aa, Arabidopsis thaliana
  peptide (1)..(136): Ceres Seq. ID no. 12678115
  misc_feature (37)..(108): Pfam Name: RNA recognition motif. (a.k.a. RRM, RBD, or RNP domain) Pfam Description: RNA recognition motif. (a.k.a. RRM, RBD, or RNP
  misc_feature (1)..(136): Homolog of NCBI NO: 2826811 NR Description: AtGRP2 [Arabidopsis thaliana]
  misc_feature (1)..(136): Homolog of NCBI NO: 21553972 NR Description: glycine-rich RNA binding protein, putative
  misc_feature (1)..(134): Homolog of NCBI NO: 15239505 NR Description: glycine-rich RNA-binding protein
  misc_feature (20)..(134): Homolog of NCBI NO: 322514 NR Description: glycine-rich RNA-binding protein (clone A81) -
  misc_feature (1)..(134): Homolog of NCBI NO: 15236359 NR Description: glycine-rich RNA-binding protein AtGRP2
  misc_feature (1)..(136): Homolog of NCBI NO: 30682622 NR Description: glycine-rich RNA-binding protein (AtGRP2)
  misc_feature (1)..(136): Homolog of NCBI NO: 7439994 NR Description: glycine-rich RNA-binding protein - garden pea
  misc_feature (1)..(136): Homolog of NCBI NO: 7439995 NR Description: RNA binding protein 3 - wood tobacco
  misc_feature (123)..(136): Homolog of NCBI NO: 15239505 NR Description: glycine-rich RNA-binding protein
  misc_feature (1)..(136): Homolog of NCBI NO: 15229525 NR Description: glycine-rich RNA-binding protein
MAFCNKLSGILRQGVSQSSNGPVTSMLGSLRYMSSKLFVGGLSWGTDDSSLKQAFTSFGEVTEATVIADRETGRSRGFGFVSFSCEDSANNAIKEMDGKELNGRQIRVNLATERSSAPRSSFGGGGGYGGGGGGGY

SEQ ID NO: 25482 - protein, 111 aa, Arabidopsis thaliana
  peptide (1)..(111): Ceres Seq. ID no. 12678116
  misc_feature (12)..(83): Pfam Name: RNA recognition motif. (a.k.a. RRM, RBD, or RNP domain) Pfam Description: RNA recognition motif. (a.k.a. RRM, RBD, or RNP
  misc_feature (98)..(111): Homolog of NCBI NO: 15239505 NR Description: glycine-rich RNA-binding protein
  misc_feature (1)..(109): Homolog of NCBI NO: 15239505 NR Description: glycine-rich RNA-binding protein
  misc_feature (1)..(111): Homolog of NCBI NO: 7439995 NR Description: RNA binding protein 3 - wood tobacco
  misc_feature (1)..(109): Homolog of NCBI NO: 322514 NR Description: glycine-rich RNA-binding protein (clone A81) -
  misc_feature (1)..(111): Homolog of NCBI NO: 7439994 NR Description: glycine-rich RNA-binding protein - garden pea
  misc_feature (1)..(109): Homolog of NCBI NO: 15236359 NR Description: glycine-rich RNA-binding protein AtGRP2
  misc_feature (1)..(111): Homolog of NCBI NO: 30682622 NR Description: glycine-rich RNA-binding protein (AtGRP2)
  misc_feature (1)..(111): Homolog of NCBI NO: 2826811 NR Description: AtGRP2 [Arabidopsis thaliana]
  misc_feature (1)..(111): Homolog of NCBI NO: 21553972 NR Description: glycine-rich RNA binding protein, putative
  misc_feature (1)..(111): Homolog of NCBI NO: 15229525 NR Description: glycine-rich RNA-binding protein
MLGSLRYMSSKLFVGGLSWGTDDSSLKQAFTSFGEVTEATVIADRETGRSRGFGFVSFSCEDSANNAIKEMDGKELNGRQIRVNLATERSSAPRSSFGGGGGYGGGGGGGY

SEQ ID NO: 25483 - DNA, 1081 bp, Arabidopsis thaliana
  misc_feature (1)..(1081): Ceres Seq. ID no. 13486839
  misc_feature: MA Experiment ID: 108462 Result: Up-regulated in Transcription
  misc_feature: MA Experiment 108462 PARAMETER Experiment Name: At_Germinating_Seeds_cDNA_P Parameter: Age (day) Value: 2 vs. 0
  misc_feature: MA Experiment 108462 PARAMETER Experiment Name: At_Germinating_Seeds_cDNA_P Parameter: Tissue Value: Germinating Seeds
  misc_feature: MA Experiment ID: 108463 Result: Up-regulated in Transcription
  misc_feature: MA Experiment 108463 PARAMETER Experiment Name: At_Germinating_Seeds_cDNA_P Parameter: Age (day) Value: 3 vs. 0
  misc_feature: MA Experiment 108463 PARAMETER Experiment Name: At_Germinating_Seeds_cDNA_P Parameter: Tissue Value: Germinating Seeds
  misc_feature: MA Experiment ID: 108464 Result: Up-regulated in Transcription
  misc_feature: MA Experiment 108464 PARAMETER Experiment Name: At_Germinating_Seeds_cDNA_P Parameter: Age (day) Value: 4 vs. 0
  misc_feature: MA Experiment 108464 PARAMETER Experiment Name: At_Germinating_Seeds_cDNA_P Parameter: Tissue Value: Germinating Seeds
  misc_feature: MA Experiment ID: 108469 Result: Up-regulated in Transcription
  misc_feature: MA Experiment ID: 108488 Result: Down-regulated in Transcription
  misc_feature: MA Experiment ID: 108489 Result: Down-regulated in Transcription
  misc_feature: MA Experiment ID: 108576 Result: Up-regulated in Transcription
  misc_feature: MA Experiment 108576 PARAMETER Experiment Name: At_42deg_Heat_cDNA_P Parameter: Temperature (deg C) Value: 42 vs. 22
  misc_feature: MA Experiment 108576 PARAMETER Experiment Name: At_42deg_Heat_cDNA_P Parameter: Timepoint (hr) Value: 1
  misc_feature: MA Experiment 108576 PARAMETER Experiment Name: At_42deg_Heat_cDNA_P Parameter: Tissue Value: Aerial
  misc_feature: MA Experiment ID: 108577 Result: Up-regulated in Transcription
  misc_feature: MA Experiment 108577 PARAMETER Experiment Name: At_42deg_Heat_cDNA_P Parameter: Temperature (deg C) Value: 42 vs. 22
  misc_feature: MA Experiment 108577 PARAMETER Experiment Name: At_42deg_Heat_cDNA_P Parameter: Timepoint (hr) Value: 6
  misc_feature: MA Experiment 108577 PARAMETER Experiment Name: At_42deg_Heat_cDNA_P Parameter: Tissue Value: Aerial
  misc_feature: MA Experiment ID: 108595 Result: Up-regulated in Transcription
  misc_feature: MA Experiment 108595 PARAMETER Experiment Name: At_Ler-pi_Ovule_cDNA_P Parameter: Plant Line Value: null
  misc_feature: MA Experiment ID: 20000089 Result: Up-regulated in Transcription
  misc_feature: MA Experiment ID: 20000093 Result: Up-regulated in Transcription
  misc_feature: MA Experiment 20000093 PARAMETER Experiment Name: At_42deg_Heat_cDNA_P Parameter: Temperature (deg C) Value: 42 vs. 22
  misc_feature: MA Experiment 20000093 PARAMETER Experiment Name: At_42deg_Heat_cDNA_P Parameter: Timepoint (hr) Value: 0.5
  misc_feature: MA Experiment 20000093 PARAMETER Experiment Name: At_42deg_Heat_cDNA_P Parameter: Tissue Value: Aerial
  misc_feature: MA Experiment ID: 20000111 Result: Up-regulated in Transcription
  misc_feature: MA Experiment 20000111 PARAMETER Experiment Name: At_42deg_Heat_cDNA_P Parameter: Temperature (deg C) Value: 42 vs. 22
  misc_feature: MA Experiment 20000111 PARAMETER Experiment Name: At_42deg_Heat_cDNA_P Parameter: Timepoint (hr) Value: 6
  misc_feature: MA Experiment 20000111 PARAMETER Experiment Name: At_42deg_Heat_cDNA_P Parameter: Tissue Value: Aerial
  misc_feature: MA Experiment ID: 20000113 Result: Up-regulated in Transcription
  misc_feature: MA Experiment 20000113 PARAMETER Experiment Name: At_42deg_Heat_cDNA_P Parameter: Temperature (deg C) Value: 42 vs. 22
  misc_feature: MA Experiment 20000113 PARAMETER Experiment Name: At_42deg_Heat_cDNA_P Parameter: Timepoint (hr) Value: 8
  misc_feature: MA Experiment 20000113 PARAMETER Experiment Name: At_42deg_Heat_cDNA_P Parameter: Tissue Value: Aerial
  misc_feature: MA Experiment ID: 20000144 Result: Up-regulated in Transcription
  misc_feature: MA Experiment 20000144 PARAMETER Experiment Name: At_42deg_Heat_cDNA_P Parameter: Temperature (deg C) Value: 42 vs. 22
  misc_feature: MA Experiment 20000144 PARAMETER Experiment Name: At_42deg_Heat_cDNA_P Parameter: Timepoint (hr) Value: 1
  misc_feature: MA Experiment 20000144 PARAMETER Experiment Name: At_42deg_Heat_cDNA_P Parameter: Tissue Value: Aerial
  misc_feature: MA Experiment ID: 20000179 Result: Up-regulated in Transcription
  misc_feature: MA Experiment 20000179 PARAMETER Experiment Name: At_Germinating_Seeds_P Parameter: Age (hr) Value: 6 vs. 0
  misc_feature: MA Experiment 20000179 PARAMETER Experiment Name: At_Germinating_Seeds_P Parameter: Tissue Value: Germinating Seeds
  misc_feature: MA Experiment ID: 20000180 Result: Up-regulated in Transcription
  misc_feature: MA Experiment 20000180 PARAMETER Experiment Name: At_Germinating_Seeds_P Parameter: Age (hr) Value: 24 vs. 0
  misc_feature: MA Experiment 20000180 PARAMETER Experiment Name: At_Germinating_Seeds_P Parameter: Tissue Value: Germinating Seeds
  misc_feature: MA Experiment ID: 20000495 Result: Down-regulated in Transcription
  misc_feature: MA Experiment 20000495 PARAMETER Experiment Name: At_Guard_Cells_P Parameter: Harvest Date Value: 8/2/2002
  misc_feature: MA Experiment 20000495 PARAMETER Experiment Name: At_Guard_Cells_P Parameter: Organism Value: A. thaliana
  misc_feature: MA Experiment 20000495 PARAMETER Experiment Name: At_Guard_Cells_P Parameter: Tissue Value: Guard Cells vs. Leaves
  misc_feature: MA Experiment ID: 20000496 Result: Down-regulated in Transcription
  misc_feature: MA Experiment 20000496 PARAMETER Experiment Name: At_Guard_Cells_P Parameter: Harvest Date Value: 7/19/2002
  misc_feature: MA Experiment 20000496 PARAMETER Experiment Name: At_Guard_Cells_P Parameter: Organism Value: Canola
  misc_feature: MA Experiment 20000496 PARAMETER Experiment Name: At_Guard_Cells_P Parameter: Tissue Value: Guard Cells vs. Leaves
  misc_feature: MA Experiment ID: 20000794 Result: Down-regulated in Transcription
  misc_feature: MA Experiment 20000794 PARAMETER Experiment Name: At_Petals_P Parameter: Age (day) Value: 23-25 days
  misc_feature: MA Experiment 20000794 PARAMETER Experiment Name: At_Petals_P Parameter: Plant Line Value: WS
  misc_feature: MA Experiment 20000794 PARAMETER Experiment Name: At_Petals_P Parameter: Tissue Value: Petals vs. Whole plant
  misc_feature: MA Experiment ID: 20001451 Result: Down-regulated in Transcription
  misc_feature: MA Experiment 20001451 PARAMETER Experiment Name: At_Far-red-induction_P Parameter: Age (day) Value: 7
  misc_feature: MA Experiment 20001451 PARAMETER Experiment Name: At_Far-red-induction_P Parameter: Light Value: Far-red vs. White
  misc_feature: MA Experiment 20001451 PARAMETER Experiment Name: At_Far-red-induction_P Parameter: Organism Value: A. thaliana
  misc_feature: MA Experiment 20001451 PARAMETER Experiment Name: At_Far-red-induction_P Parameter: Plant Line Value: Columbia
  misc_feature: MA Experiment 20001451 PARAMETER Experiment Name: At_Far-red-induction_P Parameter: Timepoint (hr) Value: 24
  misc_feature: MA Experiment 20001451 PARAMETER Experiment Name: At_Far-red-induction_P Parameter: Tissue Value: Whole Plant
  misc_feature: MA Experiment ID: 20001905 Result: Down-regulated in Transcription
  misc_feature: MA Experiment 20001905 PARAMETER Experiment Name: At_Drought_Reproduction_P Parameter: Age (day) Value: 40
  misc_feature: MA Experiment 20001905 PARAMETER Experiment Name: At_Drought_Reproduction_P Parameter: Organism Value: A. thaliana
  misc_feature: MA Experiment 20001905 PARAMETER Experiment Name: At_Drought_Reproduction_P Parameter: Plant Line Value: WS
  misc_feature: MA Experiment 20001905 PARAMETER Experiment Name: At_Drought_Reproduction_P Parameter: Timepoint (day) Value: 10
  misc_feature: MA Experiment 20001905 PARAMETER Experiment Name: At_Drought_Reproduction_P Parameter: Tissue Value: Rosettes
  misc_feature: MA Experiment 20001905 PARAMETER Experiment Name: At_Drought_Reproduction_P Parameter: Treatment Value: Drought vs. No Drought
  misc_feature: MA Experiment ID: 20001911 Result: Down-regulated in Transcription
  misc_feature: MA Experiment 20001911 PARAMETER Experiment Name: At_Drought_Reproduction_P Parameter: Age (day) Value: 40
  misc_feature: MA Experiment 20001911 PARAMETER Experiment Name: At_Drought_Reproduction_P Parameter: Organism Value: A. thaliana
  misc_feature: MA Experiment 20001911 PARAMETER Experiment Name: At_Drought_Reproduction_P Parameter: Plant Line Value: WS
  misc_feature: MA Experiment 20001911 PARAMETER Experiment Name: At_Drought_Reproduction_P Parameter: Timepoint (day) Value: 10
  misc_feature: MA Experiment 20001911 PARAMETER Experiment Name: At_Drought_Reproduction_P Parameter: Tissue Value: Flowers
  misc_feature: MA Experiment 20001911 PARAMETER Experiment Name: At_Drought_Reproduction_P Parameter: Treatment Value: Drought vs. No Drought
aaaaggctccggctttatcattctcagaccatcatcactaagcagtaagtaagcactataatcgcagaagatagataaaatggaagtagggtttctgggtttgggaatcatgggaaaagccatgtcaatgaatctattgaagaatggattcaaagtcactgtatggaacagaacactctccaagtgtgatgagcttgtggagcatggtgcatcagtatgtgagagtccagctgaagtaatcaagaaatgcaaatacactattgctatgctctctgatccttgtgctgctctttcggttgttttcgataaaggcggtgttttggagcagatatgtgaaggaaaaggttatatcgatatgtcgactgttgatgcagagacttctttgaagatcaatgaggcaatcaccgggaagggtggtcggttcgtagaaggtccggtttcaggtagcaaaaagccagctgaagatggccaactcattatccttgctgctggtgacaaggcactctttgaggaatcaatcccagcttttgatgtcttggggaagagatcgttttacttgggacaagttggaaacggagctaaaatgaagctaatagtgaacatgataatgggaagcatgatgaatgcattctctgaggggcttgtattggctgacaagagtggacttagctctgacactcttttggatattctggatctgggagcaatgactaacccgatgttcaaggggaaaggaccttcaatgaacaagagtagtttacccaccagcatttccattgaaacatcagcagaaagacatgaggctagctcttgctcttggcgatgaaaacgcggtttccatgcctgtagccgcggctgcaaacgaggcttttaagaaggcgagaagcttgggactaggagatctcgacttctctgctgtgattgaagctgtgaaattctcccgcgaatagcaaactgtttcaaaacatccactcatttggattggctgagatactgaaatcattgttatcttcccaaatagagatttactcatttggccaaacacacattttactccttcaccaaataaaaagtcttaacc

SEQ ID NO: 25484 - protein, 248 aa, Arabidopsis thaliana
  peptide (1)..(248): Ceres Seq. ID no. 13486840
  misc_feature (2)..(162): Pfam Name: NAD binding domain of 6-phosphogluconate dehydrogenase Pfam Description: NAD binding domain of 6-phosphogluconate
  misc_feature (1)..(212): Homolog of NCBI NO: 13277568 NR Description: Similar to RIKEN cDNA 3930401K13 gene [Homo
  misc_feature (4)..(219): Homolog of NCBI NO: 23054597 NR Description: hypothetical protein [Geobacter metallireducens]
  misc_feature (4)..(234): Homolog of NCBI NO: 39996474 NR Description: 3-hydroxyisobutyrate dehydrogenase family protein
  misc_feature (1)..(71): Homolog of NCBI NO: 8778467 NR Description: F1L3.35 [Arabidopsis thaliana]
  misc_feature (71)..(234): Homolog of NCBI NO: 8778467 NR Description: F1L3.35 [Arabidopsis thaliana]
  misc_feature (1)..(234): Homolog of NCBI NO: 18394513 NR Description: expressed protein [Arabidopsis thaliana]
  misc_feature (1)..(226): Homolog of NCBI NO: 29368238 NR Description: gamma hydroxybutyrate dehydrogenase-like protein
  misc_feature (1)..(248): Homolog of NCBI NO: 15146314 NR Description: AT3g25530/MWL2_15 [Arabidopsis thaliana]
  misc_feature (1)..(234): Homolog of NCBI NO: 15375068 NR Description: gamma hydroxybutyrate dehydrogenase [Arabidopsis
  misc_feature (1)..(234): Homolog of NCBI NO: 18404556 NR Description: gamma hydroxybutyrate dehydrogenase [Arabidopsis
MEVGFLGLGIMGKAMSMNLLKNGFKVTVWNRTLSKCDELVEHGASVCESPAEVIKKCKYTIAMLSDPCAALSVVFDKGGVLEQICEGKGYIDMSTVDAETSLKINEAITGKGGRFVEGPVSGSKKPAEDGQLIILAAGDKALFEESIPAFDVLGKRSFYLGQVGNGAKMKLIVNMIMGSMMNAFSEGLVLADKSGLSSDTLLDILDLGAMTNPMFKGKGPSMNKSSLPTSISIETSAERHEASSCSWR

SEQ ID NO: 25485 - protein, 238 aa, Arabidopsis thaliana
  peptide (1)..(238): Ceres Seq. ID no. 13486841
  misc_feature (1)..(152): Pfam Name: NAD binding domain of 6-phosphogluconate dehydrogenase Pfam Description: NAD binding domain of 6-phosphogluconate
  misc_feature (1)..(202): Homolog of NCBI NO: 13277568 NR Description: Similar to RIKEN cDNA 3930401K13 gene [Homo
  misc_feature (1)..(209): Homolog of NCBI NO: 23054597 NR Description: hypothetical protein [Geobacter metallireducens]
  misc_feature (1)..(224): Homolog of NCBI NO: 39996474 NR Description: 3-hydroxyisobutyrate dehydrogenase family protein
  misc_feature (1)..(61): Homolog of NCBI NO: 8778467 NR Description: F1L3.35 [Arabidopsis thaliana]
  misc_feature (61)..(224): Homolog of NCBI NO: 8778467 NR Description: F1L3.35 [Arabidopsis thaliana]
  misc_feature (1)..(224): Homolog of NCBI NO: 18394513 NR Description: expressed protein [Arabidopsis thaliana]
  misc_feature (1)..(216): Homolog of NCBI NO: 29368238 NR Description: gamma hydroxybutyrate dehydrogenase-like protein
  misc_feature (1)..(238): Homolog of NCBI NO: 15146314 NR Description: AT3g25530/MWL2_15 [Arabidopsis thaliana]
  misc_feature (1)..(224): Homolog of NCBI NO: 15375068 NR Description: gamma hydroxybutyrate dehydrogenase [Arabidopsis
  misc_feature (1)..(224): Homolog of NCBI NO: 18404556 NR Description: gamma hydroxybutyrate dehydrogenase [Arabidopsis
MGKAMSMNLLKNGFKVTVWNRTLSKCDELVEHGASVCESPAEVIKKCKYTIAMLSDPCAALSVVFDKGGVLEQICEGKGYIDMSTVDAETSLKINEAITGKGGRFVEGPVSGSKKPAEDGQLIILAAGDKALFEESIPAFDVLGKRSFYLGQVGNGAKMKLIVNMIMGSMMNAFSEGLVLADKSGLSSDTLLDILDLGAMTNPMFKGKGPSMNKSSLPTSISIETSAERHEASSCSWR

SEQ ID NO: 25486 - protein, 234 aa, Arabidopsis thaliana
  peptide (1)..(234): Ceres Seq. ID no. 13486842
  misc_feature (1)..(148): Pfam Name: NAD binding domain of 6-phosphogluconate dehydrogenase Pfam Description: NAD binding domain of 6-phosphogluconate
  misc_feature (1)..(198): Homolog of NCBI NO: 13277568 NR Description: Similar to RIKEN cDNA 3930401K13 gene [Homo
  misc_feature (1)..(205): Homolog of NCBI NO: 23054597 NR Description: hypothetical protein [Geobacter metallireducens]
  misc_feature (1)..(220): Homolog of NCBI NO: 39996474 NR Description: 3-hydroxyisobutyrate dehydrogenase family protein
  misc_feature (1)..(57): Homolog of NCBI NO: 8778467 NR Description: F1L3.35 [Arabidopsis thaliana]
  misc_feature (57)..(220): Homolog of NCBI NO: 8778467 NR Description: F1L3.35 [Arabidopsis thaliana]
  misc_feature (1)..(220): Homolog of NCBI NO: 18394513 NR Description: expressed protein [Arabidopsis thaliana]
  misc_feature (1)..(212): Homolog of NCBI NO: 29368238 NR Description: gamma hydroxybutyrate dehydrogenase-like protein
  misc_feature (1)..(234): Homolog of NCBI NO: 15146314 NR Description: AT3g25530/MWL2_15 [Arabidopsis thaliana]
  misc_feature (1)..(220): Homolog of NCBI NO: 15375068 NR Description: gamma hydroxybutyrate dehydrogenase [Arabidopsis
  misc_feature (1)..(220): Homolog of NCBI NO: 18404556 NR Description: gamma hydroxybutyrate dehydrogenase [Arabidopsis
MSMNLLKNGFKVTVWNRTLSKCDELVEHGASVCESPAEVIKKCKYTIAMLSDPCAALSVVFDKGGVLEQICEGKGYIDMSTVDAETSLKINEAITGKGGRFVEGPVSGSKKPAEDGQLIILAAGDKALFEESIPAFDVLGKRSFYLGQVGNGAKMKLIVNMIMGSMMNAFSEGLVLADKSGLSSDTLLDILDLGAMTNPMFKGKGPSMNKSSLPTSISIETSAERHEASSCSWR

SEQ ID NO: 25487 - DNA, 1129 bp, Arabidopsis thaliana; identical to SEQ ID NO: 23424
  misc_feature (1)..(1129): Ceres Seq. ID no. 12325093
  misc_feature: MA Experiment ID: 20000185 Result: Down-regulated in Transcription
  misc_feature: MA Experiment 20000185 PARAMETER Experiment Name: At_Roots__P Parameter: Age (day) Value: 7 vs. 21
  misc_feature: MA Experiment 20000185 PARAMETER Experiment Name: At_Roots__P Parameter: Organism Value: A. thaliana
  misc_feature: MA Experiment 20000185 PARAMETER Experiment Name: At_Roots__P Parameter: Tissue Value: Roots vs. Whole Plant
  misc_feature: MA Experiment ID: 20000437 Result: Down-regulated in Transcription
  misc_feature: MA Experiment 20000437 PARAMETER Experiment Name: At_Drought_P Parameter: Age (day) Value: 8
  misc_feature: MA Experiment 20000437 PARAMETER Experiment Name: At_Drought_P Parameter: Organism Value: A. thaliana
  misc_feature: MA Experiment 20000437 PARAMETER Experiment Name: At_Drought_P Parameter: Plant Line Value: WS
  misc_feature: MA Experiment 20000437 PARAMETER Experiment Name: At_Drought_P Parameter: Timepoint (hr) Value: 24
  misc_feature: MA Experiment 20000437 PARAMETER Experiment Name: At_Drought_P Parameter: Tissue Value: Whole Plant
  misc_feature: MA Experiment 20000437 PARAMETER Experiment Name: At_Drought_P Parameter: Treatment Value: Drought vs. No Drought
  misc_feature: MA Experiment ID: 20000439 Result: Down-regulated in Transcription
  misc_feature: MA Experiment 20000439 PARAMETER Experiment Name: At_Roots__P Parameter: Age (day) Value: 14 vs. 21
  misc_feature: MA Experiment 20000439 PARAMETER Experiment Name: At_Roots__P Parameter: Organism Value: A. thaliana
  misc_feature: MA Experiment 20000439 PARAMETER Experiment Name: At_Roots__P Parameter: Tissue Value: Roots vs. Whole Plant
  misc_feature: MA Experiment ID: 20000496 Result: Up-regulated in Transcription
  misc_feature: MA Experiment 20000496 PARAMETER Experiment Name: At_Guard_Cells_P Parameter: Harvest Date Value: 7/19/2002
  misc_feature: MA Experiment 20000496 PARAMETER Experiment Name: At_Guard_Cells_P Parameter: Organism Value: Canola
  misc_feature: MA Experiment 20000496 PARAMETER Experiment Name: At_Guard_Cells_P Parameter: Tissue Value: Guard Cells vs. Leaves
  misc_feature: MA Experiment ID: 20000794 Result: Down-regulated in Transcription
  misc_feature: MA Experiment 20000794 PARAMETER Experiment Name: At_Petals_P Parameter: Age (day) Value: 23-25 days
  misc_feature: MA Experiment 20000794 PARAMETER Experiment Name: At_Petals_P Parameter: Plant Line Value: WS
  misc_feature: MA Experiment 20000794 PARAMETER Experiment Name: At_Petals_P Parameter: Tissue Value: Petals vs. Whole plant
  misc_feature: MA Experiment ID: 20001757 Result: Up-regulated in Transcription
  misc_feature: MA Experiment 20001757 PARAMETER Experiment Name: At_50mM_NH4NO3_L-to-H_P Parameter: Timepoint (hr) Value: 6
  misc_feature: MA Experiment 20001757 PARAMETER Experiment Name: At_50mM_NH4NO3_L-to-H_P Parameter: Tissue Value: Leaf
  misc_feature: MA Experiment 20001757 PARAMETER Experiment Name: At_50mM_NH4NO3_L-to-H_P Parameter: Treatment Value: 50mM NH4NO3 vs 100mM Mannitol
  misc_feature: Phenotype: WHOLE PLANT Size-Small
  misc_feature: Phenotype: INFLORESCENCE Height-Short
  misc_feature: Phenotype: INFLORESCENCE Internode Length-Short Internode
  misc_feature: Phenotype: SILIQUES Length-Short
  misc_feature: Phenotype: SILIQUES Other
  misc_feature: Phenotype: FERTILITY Fertility-Reduced
  misc_feature: Phenotype: FLOWERS Other
  misc_feature: Phenotype: INFLORESCENCE Branching-Reduced Apical Dominance
  misc_feature: Phenotype: INFLORESCENCE Height-Short
  misc_feature: Phenotype: INFLORESCENCE Internode Length-Short Internode
  misc_feature: Phenotype: SILIQUES Length-Short
  misc_feature: Phenotype: FERTILITY Fertility-Reduced
  misc_feature: Phenotype: SENESCENCE TIME Senescence Time-Late Senescence
  misc_feature: Phenotype: ROSETTE LEAVES Shape-Serrate
  misc_feature: Phenotype: ROSETTE LEAVES Shape-Serrate
  misc_feature: Phenotype: ROSETTE LEAVES Other
  misc_feature: Phenotype: ROSETTE LEAVES Other
  misc_feature: Phenotype: WHOLE PLANT Size-Small
  misc_feature: Phenotype: WHOLE PLANT Size-Small
  misc_feature: Phenotype: INFLORESCENCE Branching-Reduced Apical Dominance
  misc_feature: Phenotype: INFLORESCENCE Height-Short
  misc_feature: Phenotype: INFLORESCENCE Internode Length-Short Internode
  misc_feature: Phenotype: INFLORESCENCE Strength-Weak
  misc_feature: Phenotype: SILIQUES Length-Short
  misc_feature: Phenotype: FERTILITY Fertility-Reduced
  misc_feature: Phenotype: SENESCENCE TIME Senescence Time-Late Senescence
  misc_feature: Phenotype: ROSETTE LEAVES Shape-Lanceolate
  misc_feature: Phenotype: ROSETTE LEAVES Shape-Serrate
  misc_feature: Phenotype: ROSETTE LEAVES Other
  misc_feature: Phenotype: WHOLE PLANT Size-Small
  misc_feature: Phenotype: WHOLE PLANT Size-Small
  misc_feature: Phenotype: INFLORESCENCE Internode Length-Short Internode
  misc_feature: Phenotype: FERTILITY Fertility-Reduced
  misc_feature: Phenotype: ROSETTE LEAVES Shape-Oval
  misc_feature: Phenotype: ROSETTE LEAVES Other
  misc_feature: Phenotype: WHOLE PLANT Color-Dark Green
  misc_feature: Phenotype: WHOLE PLANT Dwarf-Misc. Dwarf
  misc_feature: Phenotype: WHOLE PLANT Size-Small
  misc_feature: Phenotype: INFLORESCENCE Flowering Time-Late Flowering

SEQ ID NO: 25488 - protein, 332 aa, Arabidopsis thaliana; identical to SEQ ID NO: 23425
  peptide (1)..(332): Ceres Seq. ID no. 12325094
  misc_feature (299)..(332): Pfam Name: TPR Domain Pfam Description: TPR Domain
  misc_feature (299)..(332): Pfam Name: TPR Domain Pfam Description: TPR Domain
  misc_feature (117)..(332): Homolog of NCBI NO: 34914598 NR Description: P0520B06.12 [Oryza sativa (japonica
  misc_feature (17)..(332): Homolog of NCBI NO: 9294636 NR Description: emb|CAB41081.1~gene_id:MAG2.7~similar to unknown
  misc_feature (17)..(332): Homolog of NCBI NO: 9294636 NR Description: emb|CAB41081.1~gene_id:MAG2.7~similar to unknown
  misc_feature (17)..(332): Homolog of NCBI NO: 18400278 NR Description: expressed protein
  misc_feature (117)..(332): Homolog of NCBI NO: 34914598 NR Description: P0520B06.12 [Oryza sativa (japonica
  misc_feature (17)..(332): Homolog of NCBI NO: 18400278 NR Description: expressed protein

SEQ ID NO: 25489 - protein, 316 aa, Arabidopsis thaliana; identical to SEQ ID NO: 23426
  peptide (1)..(316): Ceres Seq. ID no. 12325095
  misc_feature (283)..(316): Pfam Name: TPR Domain Pfam Description: TPR Domain
  misc_feature (283)..(316): Pfam Name: TPR Domain Pfam Description: TPR Domain
  misc_feature (101)..(316): Homolog of NCBI NO: 34914598 NR Description: P0520B06.12 [Oryza sativa (japonica
  misc_feature (1)..(316): Homolog of NCBI NO: 9294636 NR Description: emb|CAB41081.1~gene_id:MAG2.7~similar to unknown
  misc_feature (1)..(316): Homolog of NCBI NO: 9294636 NR Description: emb|CAB41081.1~gene_id:MAG2.7~similar to unknown
  misc_feature (1)..(316): Homolog of NCBI NO: 18400278 NR Description: expressed protein
  misc_feature (101)..(316): Homolog of NCBI NO: 34914598 NR Description: P0520B06.12 [Oryza sativa (japonica
  misc_feature (1)..(316): Homolog of NCBI NO: 18400278 NR Description: expressed protein

SEQ ID NO: 25490 - protein, 220 aa, Arabidopsis thaliana; identical to SEQ ID NO: 23427
  peptide (1)..(220): Ceres Seq. ID no. 12325096
  misc_feature (187)..(220): Pfam Name: TPR Domain Pfam Description: TPR Domain
  misc_feature (187)..(220): Pfam Name: TPR Domain Pfam Description: TPR Domain
  misc_feature (5)..(220): Homolog of NCBI NO: 34914598 NR Description: P0520B06.12 [Oryza sativa (japonica
  misc_feature (1)..(220): Homolog of NCBI NO: 9294636 NR Description: emb|CAB41081.1~gene_id:MAG2.7~similar to unknown
  misc_feature (1)..(220): Homolog of NCBI NO: 9294636 NR Description: emb|CAB41081.1~gene_id:MAG2.7~similar to unknown
  misc_feature (1)..(220): Homolog of NCBI NO: 18400278 NR Description: expressed protein
  misc_feature (5)..(220): Homolog of NCBI NO: 34914598 NR Description: P0520B06.12 [Oryza sativa (japonica
  misc_feature (1)..(220): Homolog of NCBI NO: 18400278 NR Description: expressed protein

SEQ ID NO: 25491 - DNA, 970 bp, Arabidopsis thaliana
  misc_feature (1)..(970): Ceres Seq. ID no. 13503912
  misc_feature: MA Experiment ID: 20000069 Result: Up-regulated in Transcription
  misc_feature: MA Experiment 20000069 PARAMETER Experiment Name: At_100uM_ABA_Mutants_cDNA_P Parameter: Plant Line Value: CS23
  misc_feature: MA Experiment 20000069 PARAMETER Experiment Name: At_100uM_ABA_Mutants_cDNA_P Parameter: Timepoint (hr) Value: 6
  misc_feature: MA Experiment 20000069 PARAMETER Experiment Name: At_100uM_ABA_Mutants_cDNA_P Parameter: Tissue Value: Aerial
  misc_feature: MA Experiment 20000069 PARAMETER Experiment Name: At_100uM_ABA_Mutants_cDNA_P Parameter: Treatment Value: 100uM ABA vs. No Treatment
  misc_feature: MA Experiment ID: 20000087 Result: Up-regulated in Transcription
  misc_feature: MA Experiment 20000087 PARAMETER Experiment Name: At_100uM_ABA_Mutants_cDNA_P Parameter: Plant Line Value: WS
  misc_feature: MA Experiment 20000087 PARAMETER Experiment Name: At_100uM_ABA_Mutants_cDNA_P Parameter: Timepoint (hr) Value: 6
  misc_feature: MA Experiment 20000087 PARAMETER Experiment Name: At_100uM_ABA_Mutants_cDNA_P Parameter: Tissue Value: Aerial
  misc_feature: MA Experiment 20000087 PARAMETER Experiment Name: At_100uM_ABA_Mutants_cDNA_P Parameter: Treatment Value: 100uM ABA vs. No Treatment
  misc_feature: MA Experiment ID: 20000182 Result: Up-regulated in Transcription
  misc_feature: MA Experiment 20000182 PARAMETER Experiment Name: At_2mM_SA_P Parameter: Age (day) Value: 14
  misc_feature: MA Experiment 20000182 PARAMETER Experiment Name: At_2mM_SA_P Parameter: Organism Value: A. thaliana
  misc_feature: MA Experiment 20000182 PARAMETER Experiment Name: At_2mM_SA_P Parameter: Plant Line Value: WS
  misc_feature: MA Experiment 20000182 PARAMETER Experiment Name: At_2mM_SA_P Parameter: Timepoint (hr) Value: 6
  misc_feature: MA Experiment 20000182 PARAMETER Experiment Name: At_2mM_SA_P Parameter: Tissue Value: Aerial
  misc_feature: MA Experiment 20000182 PARAMETER Experiment Name: At_2mM_SA_P Parameter: Treatment Value: 2mM SA vs. No Treatment
  misc_feature: MA Experiment ID: 20000227 Result: Down-regulated in Transcription
  misc_feature: MA Experiment 20000227 PARAMETER Experiment Name: At_Root-Tips-vs-Tops_P Parameter: Tissue Value: Root Tips vs. Root Tops
  misc_feature: MA Experiment ID: 20000527 Result: Down-regulated in Transcription
  misc_feature: MA Experiment 20000527 PARAMETER Experiment Name: At_10percent_PEG_P Parameter: Age (day) Value: 20
  misc_feature: MA Experiment 20000527 PARAMETER Experiment Name: At_10percent_PEG_P Parameter: Organism Value: A. thaliana
  misc_feature: MA Experiment 20000527 PARAMETER Experiment Name: At_10percent_PEG_P Parameter: Plant Line Value: WS
  misc_feature: MA Experiment 20000527 PARAMETER Experiment Name: At_10percent_PEG_P Parameter: Timepoint (day) Value: 20
  misc_feature: MA Experiment 20000527 PARAMETER Experiment Name: At_10percent_PEG_P Parameter: Tissue Value: Whole Plant
  misc_feature: MA Experiment 20000527 PARAMETER Experiment Name: At_10percent_PEG_P Parameter: Treatment Value: 10percent PEG vs. No Treatment
  misc_feature: MA Experiment ID: 20001554 Result: Down-regulated in Transcription
  misc_feature: MA Experiment 20001554 PARAMETER Experiment Name: At_Drought_Soil_Dry_P Parameter: Age (day) Value: 21
  misc_feature: MA Experiment 20001554 PARAMETER Experiment Name: At_Drought_Soil_Dry_P Parameter: Organism Value: A. thaliana
  misc_feature: MA Experiment 20001554 PARAMETER Experiment Name: At_Drought_Soil_Dry_P Parameter: Plant Line Value: WS
  misc_feature: MA Experiment 20001554 PARAMETER Experiment Name: At_Drought_Soil_Dry_P Parameter: Post Timepoint (hr) Value: None
  misc_feature: MA Experiment 20001554 PARAMETER Experiment Name: At_Drought_Soil_Dry_P Parameter: Post-Treatment Value: None
  misc_feature: MA Experiment 20001554 PARAMETER Experiment Name: At_Drought_Soil_Dry_P Parameter: Timepoint (day) Value: 7
  misc_feature: MA Experiment 20001554 PARAMETER Experiment Name: At_Drought_Soil_Dry_P Parameter: Treatment Value: Drought vs. No Drought
  misc_feature: MA Experiment ID: 20001556 Result: Down-regulated in Transcription
  misc_feature: MA Experiment 20001556 PARAMETER Experiment Name: At_Drought_Soil_Dry_P Parameter: Age (day) Value: 26
  misc_feature: MA Experiment 20001556 PARAMETER Experiment Name: At_Drought_Soil_Dry_P Parameter: Organism Value: A. thaliana
  misc_feature: MA Experiment 20001556 PARAMETER Experiment Name: At_Drought_Soil_Dry_P Parameter: Plant Line Value: WS
  misc_feature: MA Experiment 20001556 PARAMETER Experiment Name: At_Drought_Soil_Dry_P Parameter: Post Timepoint (hr) Value: None
  misc_feature: MA Experiment 20001556 PARAMETER Experiment Name: At_Drought_Soil_Dry_P Parameter: Post-Treatment Value: None
  misc_feature: MA Experiment 20001556 PARAMETER Experiment Name: At_Drought_Soil_Dry_P Parameter: Timepoint (day) Value: 12
  misc_feature: MA Experiment 20001556 PARAMETER Experiment Name: At_Drought_Soil_Dry_P Parameter: Treatment Value: Drought vs. No Drought
  misc_feature: MA Experiment ID: 20001560 Result: Down-regulated in Transcription
  misc_feature: MA Experiment 20001560 PARAMETER Experiment Name: At_Drought_Soil_Dry_P Parameter: Age (day) Value: 28
  misc_feature: MA Experiment 20001560 PARAMETER Experiment Name: At_Drought_Soil_Dry_P Parameter: Organism Value: A. thaliana
  misc_feature: MA Experiment 20001560 PARAMETER Experiment Name: At_Drought_Soil_Dry_P Parameter: Plant Line Value: WS
  misc_feature: MA Experiment 20001560 PARAMETER Experiment Name: At_Drought_Soil_Dry_P Parameter: Post Timepoint (hr) Value: None
  misc_feature: MA Experiment 20001560 PARAMETER Experiment Name: At_Drought_Soil_Dry_P Parameter: Post-Treatment Value: None
  misc_feature: MA Experiment 20001560 PARAMETER Experiment Name: At_Drought_Soil_Dry_P Parameter: Timepoint (day) Value: 14
  misc_feature: MA Experiment 20001560 PARAMETER Experiment Name: At_Drought_Soil_Dry_P Parameter: Treatment Value: Drought vs. No Drought
  misc_feature: MA Experiment ID: 20001905 Result: Up-regulated in Transcription
  misc_feature: MA Experiment 20001905 PARAMETER Experiment Name: At_Drought_Reproduction_P Parameter: Age (day) Value: 40
  misc_feature: MA Experiment 20001905 PARAMETER Experiment Name: At_Drought_Reproduction_P Parameter: Organism Value: A. thaliana
  misc_feature: MA Experiment 20001905 PARAMETER Experiment Name: At_Drought_Reproduction_P Parameter: Plant Line Value: WS
  misc_feature: MA Experiment 20001905 PARAMETER Experiment Name: At_Drought_Reproduction_P Parameter: Timepoint (day) Value: 10
  misc_feature: MA Experiment 20001905 PARAMETER Experiment Name: At_Drought_Reproduction_P Parameter: Tissue Value: Rosettes
  misc_feature: MA Experiment 20001905 PARAMETER Experiment Name: At_Drought_Reproduction_P Parameter: Treatment Value: Drought vs. No Drought
ataatccccaaagagattttaagaaaaaggtgtaagaaataaacaaccgagttttgagatatggaggagaagaagagcaaagtgatattacatgggacgtggataagcacatactcaaagagggtcgaaatcgctcttaaactcaagggtgtactctacgagtacctcgaagaagatcttcagaacaaaagtgaatcgctgattcaactcaacccggtgcacaagaagattcctgttcttgtccatgatgggaaaccagtggctgaatcacttgtgattcttgaatatatcgatgagacgtggacaaactctcctcgtttcttcccagaggatccttatgaaagggcccaggtccggttctgggtcagctacatcaaccaacaggtgtttgaggtcatgggtcaagtcatgtcccaggagggtgaagctcaagcaaagtctgtagaagaggcaagaaaaagattcaaagttcttgatgagggactcaagaagcatttcccgaataaaaacatcagaaggaatgatgatgttgggcttttggaaatcaccatcattgctactctcggaggctacaaagctcatcgtgaagcaatcggtgtagacataattggtccagtgaacactccgactttatacaactggatagagcgcctgcaagatctaagtgtgataaaagaagtcgaagtgcctcatgatacgttggtgacatttatccagaagtatagacaaaagtgtctccagcaggctgcaaatgcataattagatcaagatgctggtctagtgatgaatcatctggatttaatattgtctcagaggataatagaataagagttagataactatttaaagtaagaaataattccctgagagttgtgtatgaacttatcgtagctattactgtatgataatgaactaaagaaaaccgtttgcggtatctccatgctctatagttgatacgctttgttgttat

SEQ ID NO: 25492 - protein, 232 aa, Arabidopsis thaliana
  peptide (1)..(232): Ceres Seq. ID no. 13503913
  misc_feature (2)..(226): Homolog of NCBI NO: 30697685 NR Description: glutathione transferase, putative [Arabidopsis
  misc_feature (1)..(232): Homolog of NCBI NO: 15221302 NR Description: glutathione transferase, putative [Arabidopsis
MEEKKSKVILHGTWISTYSKRVEIALKLKGVLYEYLEEDLQNKSESLIQLNPVHKKIPVLVHDGKPVAESLVILEYIDETWTNSPRFFPEDPYERAQVRFWVSYINQQVFEVMGQVMSQEGEAQAKSVEEARKRFKVLDEGLKKHFPNKNIRRNDDVGLLEITIIATLGGYKAHREAIGVDIIGPVNTPTLYNWIERLQDLSVIKEVEVPHDTLVTFIQKYRQKCLQQAANA

SEQ ID NO: 25493 - protein, 120 aa, Arabidopsis thaliana
  peptide (1)..(120): Ceres Seq. ID no. 13503914
  misc_feature (1)..(114): Homolog of NCBI NO: 30697685 NR Description: glutathione transferase, putative [Arabidopsis
  misc_feature (1)..(120): Homolog of NCBI NO: 15221302 NR Description: glutathione transferase, putative [Arabidopsis
MGQVMSQEGEAQAKSVEEARKRFKVLDEGLKKHFPNKNIRRNDDVGLLEITIIATLGGYKAHREAIGVDIIGPVNTPTLYNWIERLQDLSVIKEVEVPHDTLVTFIQKYRQKCLQQAANA

SEQ ID NO: 25494 - protein, 116 aa, Arabidopsis thaliana
  peptide (1)..(116): Ceres Seq. ID no. 13503915
  misc_feature (1)..(110): Homolog of NCBI NO: 30697685 NR Description: glutathione transferase, putative [Arabidopsis
  misc_feature (1)..(116): Homolog of NCBI NO: 15221302 NR Description: glutathione transferase, putative [Arabidopsis
MSQEGEAQAKSVEEARKRFKVLDEGLKKHFPNKNIRRNDDVGLLEITIIATLGGYKAHREAIGVDIIGPVNTPTLYNWIERLQDLSVIKEVEVPHDTLVTFIQKYRQKCLQQAANA

SEQ ID NO: 25495 - DNA, 1334 bp, Arabidopsis thaliana
  misc_feature (1)..(1334): Ceres Seq. ID no. 13617376
  misc_feature: MA Experiment ID: 20000234 Result: Down-regulated in Transcription
  misc_feature: MA Experiment 20000234 PARAMETER Experiment Name: At_Siliques_P Parameter: Age (day) Value: 21
  misc_feature: MA Experiment 20000234 PARAMETER Experiment Name: At_Siliques_P Parameter: Organism Value: A. thaliana
  misc_feature: MA Experiment 20000234 PARAMETER Experiment Name: At_Siliques_P Parameter: Plant Line Value: WS
  misc_feature: MA Experiment 20000234 PARAMETER Experiment Name: At_Siliques_P Parameter: Tissue Value: Less Than 5mm Siliques vs. Whole Plant
atctacgcatgaaaatatgattctgtcttttttttgtttgtctatctttcaatactttaaaaagtgtatttctagaggcgatttgtcatttcccgaataggaatttgagtaaaaaaaaacactctgttttttatttccactaatatcaaatcggcgaatatagttcccaccattcttatctccttgtcgtcactcggaattttttaaataataggatcgctttaataatataatctctataatttatagttccttttccaatattggcgtctccgttgaagctttccacaaatctcaaatttgtttggagactctcaaatgtatccttctctcgacgatgatttcgtctctgatttgttttgcttcgatcaaagcaatggagcagaacttgatgattacacacagtttggtgtaaatttgcagactgatcaagaggatacctttccagattttgtgtcatatggtgtgaatttgcagcaggagccagatgaagtctttagtattggagcttctcaattggatttgtcctcgtataatggagttttgtcgctagagccagaacaggtggggcaacaagattgtgaagttgtgcaggaagaagaagtagagatcaattctggttcatctggtggagctgttaaggaagaacaggaacatttagatgacgattgctccagaaagcgggcaaggactggatcgtgtagcagaggaggaggaactaaagcgtgtcgtgaaaggttgaggagggagaagctaaatgagaggtttatggatttgagctcggttttggagcctgggaggactcctaagactgataaaccggctatactcgatgatgcaatccgtatattgaatcaacttagagatgaagctcttaagcttgaagaaactaaccagaagcttttagaggagatcaagagtctcaaggcggagaagaacgagctgagggaggaaaagctggtgttgaaggcggataaagagaagacagaacaacagttaaagtctatgacggctccatcttcagggttcatacctcatattccagctgcatttaaccacaacaaaatggctgtttatccaagttacggttacatgccaatgtggcattatatgcctcaatccgttcgtgacacatctcgtgatcaagaactcaggcctcctgctgcttaaactctcaattgtttttttttggtacccatagggaactcatagagatttctgaatcacttggtttaggattcttccgtttggcaagtgtaaaagctttactcttgatcttgggttgtatttttcttataaaataaatataactccagaaacttgtgattcttctc

SEQ ID NO: 25496 - protein, 283 aa, Arabidopsis thaliana
  peptide (1)..(283): Ceres Seq. ID no. 13617377
  misc_feature (131)..(182): Pfam Name: Helix-loop-helix DNA-binding domain Pfam Description: Helix-loop-helix DNA-binding domain
  misc_feature (114)..(268): Homolog of NCBI NO: 38636768 NR Description: helix-loop-helix-like protein
  misc_feature (114)..(268): Homolog of NCBI NO: 29367409 NR Description: helix-loop-helix-like protein
  misc_feature (112)..(283): Homolog of NCBI NO: 32352190 NR Description: hypothetical protein [Oryza sativa (japonica
  misc_feature (93)..(283): Homolog of NCBI NO: 21592325 NR Description: bHLH transcription factor, putative [Arabidopsis
  misc_feature (93)..(283): Homolog of NCBI NO: 15239706 NR Description: bHLH protein [Arabidopsis thaliana]
  misc_feature (114)..(283): Homolog of NCBI NO: 15223710 NR Description: bHLH protein [Arabidopsis thaliana]
  misc_feature (61)..(283): Homolog of NCBI NO: 22331274 NR Description: bHLH protein [Arabidopsis thaliana]
  misc_feature (61)..(283): Homolog of NCBI NO: 20127030 NR Description: putative bHLH transcription factor [Arabidopsis
  misc_feature (12)..(283): Homolog of NCBI NO: 30682847 NR Description: bHLH protein [Arabidopsis thaliana]
  misc_feature (1)..(283): Homolog of NCBI NO: 18414212 NR Description: bHLH protein [Arabidopsis thaliana]
MYPSLDDDFVSDLFCFDQSNGAELDDYTQFGVNLQTDQEDTFPDFVSYGVNLQQEPDEVFSIGASQLDLSSYNGVLSLEPEQVGQQDCEVVQEEEVEINSGSSGGAVKEEQEHLDDDCSRKRARTGSCSRGGGTKACRERLRREKLNERFMDLSSVLEPGRTPKTDKPAILDDAIRILNQLRDEALKLEETNQKLLEEIKSLKAEKNELREEKLVLKADKEKTEQQLKSMTAPSSGFIPHIPAAFNHNKMAVYPSYGYMPMWHYMPQSVRDTSRDQELRPPAA

SEQ ID NO: 25497 - DNA, 1483 bp, Arabidopsis thaliana
  misc_feature (1)..(1483): Ceres Seq. ID no. 12357662
  misc_feature: MA Experiment ID: 108434 Result: Down-regulated in Transcription
  misc_feature: MA Experiment 108434 PARAMETER Experiment Name: At_Root_Tips_cDNA_P Parameter: Tissue Value: Root Tips
  misc_feature: MA Experiment ID: 108461 Result: Up-regulated in Transcription
  misc_feature: MA Experiment 108461 PARAMETER Experiment Name: At_Germinating_Seeds_cDNA_P Parameter: Age (day) Value: 1 vs. 0
  misc_feature: MA Experiment 108461 PARAMETER Experiment Name: At_Germinating_Seeds_cDNA_P Parameter: Tissue Value: Germinating Seeds
  misc_feature: MA Experiment ID: 108462 Result: Up-regulated in Transcription
  misc_feature: MA Experiment 108462 PARAMETER Experiment Name: At_Germinating_Seeds_cDNA_P Parameter: Age (day) Value: 2 vs. 0
  misc_feature: MA Experiment 108462 PARAMETER Experiment Name: At_Germinating_Seeds_cDNA_P Parameter: Tissue Value: Germinating Seeds
  misc_feature: MA Experiment ID: 108463 Result: Up-regulated in Transcription
  misc_feature: MA Experiment 108463 PARAMETER Experiment Name: At_Germinating_Seeds_cDNA_P Parameter: Age (day) Value: 3 vs. 0
  misc_feature: MA Experiment 108463 PARAMETER Experiment Name: At_Germinating_Seeds_cDNA_P Parameter: Tissue Value: Germinating Seeds
  misc_feature: MA Experiment ID: 108464 Result: Up-regulated in Transcription
  misc_feature: MA Experiment 108464 PARAMETER Experiment Name: At_Germinating_Seeds_cDNA_P Parameter: Age (day) Value: 4 vs. 0
  misc_feature: MA Experiment 108464 PARAMETER Experiment Name: At_Germinating_Seeds_cDNA_P Parameter: Tissue Value: Germinating Seeds
  misc_feature: MA Experiment ID: 108488 Result: Down-regulated in Transcription
  misc_feature: MA Experiment ID: 108574 Result: Up-regulated in Transcription
  misc_feature: MA Experiment 108574 PARAMETER Experiment Name: At_Wounding__cDNA_P Parameter: Timepoint (hr) Value: 1
  misc_feature: MA Experiment 108574 PARAMETER Experiment Name: At_Wounding__cDNA_P Parameter: Tissue Value: Aerial
  misc_feature: MA Experiment 108574 PARAMETER Experiment Name: At_Wounding__cDNA_P Parameter: Treatment Value: Wounding vs. No Wounding
  misc_feature: MA Experiment ID: 108577 Result: Down-regulated in Transcription
  misc_feature: MA Experiment 108577 PARAMETER Experiment Name: At_42deg_Heat_cDNA_P Parameter: Temperature (deg C) Value: 42 vs. 22
  misc_feature: MA Experiment 108577 PARAMETER Experiment Name: At_42deg_Heat_cDNA_P Parameter: Timepoint (hr) Value: 6
  misc_feature: MA Experiment 108577 PARAMETER Experiment Name: At_42deg_Heat_cDNA_P Parameter: Tissue Value: Aerial
  misc_feature: MA Experiment ID: 108579 Result: Up-regulated in Transcription
  misc_feature: MA Experiment 108579 PARAMETER Experiment Name: At_4deg_Cold_cDNA_P Parameter: Temperature (deg C) Value: 4 vs. 22
  misc_feature: MA Experiment 108579 PARAMETER Experiment Name: At_4deg_Cold_cDNA_P Parameter: Timepoint (hr) Value: 6
  misc_feature: MA Experiment 108579 PARAMETER Experiment Name: At_4deg_Cold_cDNA_P Parameter: Tissue Value: Aerial
  misc_feature: MA Experiment ID: 108585 Result: Up-regulated in Transcription
  misc_feature: MA Experiment 108585 PARAMETER Experiment Name: At_5mM_NaNP_cDNA_P Parameter: Timepoint (hr) Value: 6
  misc_feature: MA Experiment 108585 PARAMETER Experiment Name: At_5mM_NaNP_cDNA_P Parameter: Tissue Value: Aerial
  misc_feature: MA Experiment 108585 PARAMETER Experiment Name: At_5mM_NaNP_cDNA_P Parameter: Treatment Value: null
  misc_feature: MA Experiment ID: 108595 Result: Up-regulated in Transcription
  misc_feature: MA Experiment 108595 PARAMETER Experiment Name: At_Ler-pi_Ovule_cDNA_P Parameter: Plant Line Value: null
  misc_feature: MA Experiment ID: 108667 Result: Up-regulated in Transcription
  misc_feature: MA Experiment 108667 PARAMETER Experiment Name: At_2mM_SA_cDNA_P Parameter: Plant Line Value: WS
  misc_feature: MA Experiment 108667 PARAMETER Experiment Name: At_2mM_SA_cDNA_P Parameter: Timepoint (hr) Value: 1
  misc_feature: MA Experiment 108667 PARAMETER Experiment Name: At_2mM_SA_cDNA_P Parameter: Treatment Value: 2mM SA vs. No Treatment
  misc_feature: MA Experiment ID: 20000089 Result: Down-regulated in Transcription
  misc_feature: MA Experiment ID: 20000093 Result: Up-regulated in Transcription
  misc_feature: MA Experiment 20000093 PARAMETER Experiment Name: At_42deg_Heat_cDNA_P Parameter: Temperature (deg C) Value: 42 vs. 22
  misc_feature: MA Experiment 20000093 PARAMETER Experiment Name: At_42deg_Heat_cDNA_P Parameter: Timepoint (hr) Value: 0.5
  misc_feature: MA Experiment 20000093 PARAMETER Experiment Name: At_42deg_Heat_cDNA_P Parameter: Tissue Value: Aerial
  misc_feature: MA Experiment ID: 20000113 Result: Up-regulated in Transcription
  misc_feature: MA Experiment 20000113 PARAMETER Experiment Name: At_42deg_Heat_cDNA_P Parameter: Temperature (deg C) Value: 42 vs. 22
  misc_feature: MA Experiment 20000113 PARAMETER Experiment Name: At_42deg_Heat_cDNA_P Parameter: Timepoint (hr) Value: 8
  misc_feature: MA Experiment 20000113 PARAMETER Experiment Name: At_42deg_Heat_cDNA_P Parameter: Tissue Value: Aerial
  misc_feature: MA Experiment ID: 20000185 Result: Down-regulated in Transcription
  misc_feature: MA Experiment 20000185 PARAMETER Experiment Name: At_Roots__P Parameter: Age (day) Value: 7 vs. 21
  misc_feature: MA Experiment 20000185 PARAMETER Experiment Name: At_Roots__P Parameter: Organism Value: A. thaliana
  misc_feature: MA Experiment 20000185 PARAMETER Experiment Name: At_Roots__P Parameter: Tissue Value: Roots vs. Whole Plant
  misc_feature: MA Experiment ID: 20000213 Result: Up-regulated in Transcription
  misc_feature: MA Experiment 20000213 PARAMETER Experiment Name: At_4deg_Cold_P Parameter: Timepoint (hr) Value: 2
  misc_feature: MA Experiment ID: 20000234 Result: Down-regulated in Transcription
  misc_feature: MA Experiment 20000234 PARAMETER Experiment Name: At_Siliques_P Parameter: Age (day) Value: 21
  misc_feature: MA Experiment 20000234 PARAMETER Experiment Name: At_Siliques_P Parameter: Organism Value: A. thaliana
  misc_feature: MA Experiment 20000234 PARAMETER Experiment Name: At_Siliques_P Parameter: Plant Line Value: WS
  misc_feature: MA Experiment 20000234 PARAMETER Experiment Name: At_Siliques_P Parameter: Tissue Value: Less Than 5mm Siliques vs. Whole Plant
  misc_feature: MA Experiment ID: 20000235 Result: Down-regulated in Transcription
  misc_feature: MA Experiment 20000235 PARAMETER Experiment Name: At_Siliques_P Parameter: Age (day) Value: 21
  misc_feature: MA Experiment 20000235 PARAMETER Experiment Name: At_Siliques_P Parameter: Organism Value: A. thaliana
  misc_feature: MA Experiment 20000235 PARAMETER Experiment Name: At_Siliques_P Parameter: Plant Line Value: WS
  misc_feature: MA Experiment 20000235 PARAMETER Experiment Name: At_Siliques_P Parameter: Tissue Value: 5-10mm Siliques vs. Whole Plant
  misc_feature: MA Experiment ID: 20000264 Result: Down-regulated in Transcription
  misc_feature: MA Experiment 20000264 PARAMETER Experiment Name: At_Open_Flower_P Parameter: Age (day) Value: 21
  misc_feature: MA Experiment 20000264 PARAMETER Experiment Name: At_Open_Flower_P Parameter: Plant Line Value: WS
  misc_feature: MA Experiment 20000264 PARAMETER Experiment Name: At_Open_Flower_P Parameter: Tissue Value: Open Flower vs. Whole Plant
  misc_feature: MA Experiment ID: 20000265 Result: Down-regulated in Transcription
  misc_feature: MA Experiment 20000265 PARAMETER Experiment Name: At_Open_Flower_P Parameter: Age (day) Value: 21
  misc_feature: MA Experiment 20000265 PARAMETER Experiment Name: At_Open_Flower_P Parameter: Plant Line Value: WS
  misc_feature: MA Experiment 20000265 PARAMETER Experiment Name: At_Open_Flower_P Parameter: Tissue Value: Closed Flower vs. Whole Plant
  misc_feature: MA Experiment ID: 20000267 Result: Up-regulated in Transcription
  misc_feature: MA Experiment 20000267 PARAMETER Experiment Name: At_Drought_P Parameter: Age (day) Value: 7
  misc_feature: MA Experiment 20000267 PARAMETER Experiment Name: At_Drought_P Parameter: Organism Value: A. thaliana
  misc_feature: MA Experiment 20000267 PARAMETER Experiment Name: At_Drought_P Parameter: Plant Line Value: WS
  misc_feature: MA Experiment 20000267 PARAMETER Experiment Name: At_Drought_P Parameter: Timepoint (hr) Value: 6
  misc_feature: MA Experiment 20000267 PARAMETER Experiment Name: At_Drought_P Parameter: Tissue Value: Whole Plant
  misc_feature: MA Experiment 20000267 PARAMETER Experiment Name: At_Drought_P Parameter: Treatment Value: Drought vs. No Drought
  misc_feature: MA Experiment ID: 20000286 Result: Down-regulated in Transcription
  misc_feature: MA Experiment 20000286 PARAMETER Experiment Name: At_Open_Flower_P Parameter: Age (day) Value: 21
  misc_feature: MA Experiment 20000286 PARAMETER Experiment Name: At_Open_Flower_P Parameter: Plant Line Value: WS
  misc_feature: MA Experiment 20000286 PARAMETER Experiment Name: At_Open_Flower_P Parameter: Tissue Value: Half Open vs. Whole Plant
  misc_feature: MA Experiment ID: 20000438 Result: Down-regulated in Transcription
  misc_feature: MA Experiment 20000438 PARAMETER Experiment Name: At_Shoots__P Parameter: Age (day) Value: 14
  misc_feature: MA Experiment 20000438 PARAMETER Experiment Name: At_Shoots__P Parameter: Tissue Value: Shoots vs. Whole Plant
  misc_feature: MA Experiment ID: 20000439 Result: Down-regulated in Transcription
  misc_feature: MA Experiment 20000439 PARAMETER Experiment Name: At_Roots__P Parameter: Age (day) Value: 14 vs. 21
  misc_feature: MA Experiment 20000439 PARAMETER Experiment Name: At_Roots__P Parameter: Organism Value: A. thaliana
  misc_feature: MA Experiment 20000439 PARAMETER Experiment Name: At_Roots__P Parameter: Tissue Value: Roots vs. Whole Plant
  misc_feature: MA Experiment ID: 20000441 Result: Up-regulated in Transcription
  misc_feature: MA Experiment 20000441 PARAMETER Experiment Name: At_1uM_BR-BRZ__P Parameter: Tissue Value: Shoot Apices
  misc_feature: MA Experiment 20000441 PARAMETER Experiment Name: At_1uM_BR-BRZ__P Parameter: Treatment Value: 1uM BR vs. No Treatment
  misc_feature: MA Experiment ID: 20000443 Result: Up-regulated in Transcription
  misc_feature: MA Experiment 20000443 PARAMETER Experiment Name: At_1uM_BR-BRZ__P Parameter: Tissue Value: Shoot Apices
  misc_feature: MA Experiment 20000443 PARAMETER Experiment Name: At_1uM_BR-BRZ__P Parameter: Treatment Value: 1uM BRZ vs. No Treatment
  misc_feature: MA Experiment ID: 20000460 Result: Up-regulated in Transcription
  misc_feature: MA Experiment 20000460 PARAMETER Experiment Name: At_10percent_PEG_P Parameter: Age (day) Value: 12
  misc_feature: MA Experiment 20000460 PARAMETER Experiment Name: At_10percent_PEG_P Parameter: Organism Value: A. thaliana
  misc_feature: MA Experiment 20000460 PARAMETER Experiment Name: At_10percent_PEG_P Parameter: Plant Line Value: WS
  misc_feature: MA Experiment 20000460 PARAMETER Experiment Name: At_10percent_PEG_P Parameter: Timepoint (day) Value: 12
  misc_feature: MA Experiment 20000460 PARAMETER Experiment Name: At_10percent_PEG_P Parameter: Tissue Value: Whole Plant
  misc_feature: MA Experiment 20000460 PARAMETER Experiment Name: At_10percent_PEG_P Parameter: Treatment Value: 10percent PEG vs. No Treatment
  misc_feature: MA Experiment ID: 20000495 Result: Down-regulated in Transcription
  misc_feature: MA Experiment 20000495 PARAMETER Experiment Name: At_Guard_Cells_P Parameter: Harvest Date Value: 8/2/2002
  misc_feature: MA Experiment 20000495 PARAMETER Experiment Name: At_Guard_Cells_P Parameter: Organism Value: A. thaliana
  misc_feature: MA Experiment 20000495 PARAMETER Experiment Name: At_Guard_Cells_P Parameter: Tissue Value: Guard Cells vs. Leaves
  misc_feature: MA Experiment ID: 20000573 Result: Down-regulated in Transcription
  misc_feature: MA Experiment 20000573 PARAMETER Experiment Name: At_100uM_ABA_Mutants__P Parameter: Organism Value: A. thaliana
  misc_feature: MA Experiment 20000573 PARAMETER Experiment Name: At_100uM_ABA_Mutants__P Parameter: Plant Line Value: CS22 vs. Ler wt
  misc_feature: MA Experiment 20000573 PARAMETER Experiment Name: At_100uM_ABA_Mutants__P Parameter: Timepoint (hr) Value: N/A
  misc_feature: MA Experiment 20000573 PARAMETER Experiment Name: At_100uM_ABA_Mutants__P Parameter: Tissue Value: Whole Plant
  misc_feature: MA Experiment 20000573 PARAMETER Experiment Name: At_100uM_ABA_Mutants__P Parameter: Treatment Value: None
  misc_feature: MA Experiment ID: 20000574 Result: Down-regulated in Transcription
  misc_feature: MA Experiment 20000574 PARAMETER Experiment Name: At_100uM_ABA_Mutants__P Parameter: Organism Value: A. thaliana
  misc_feature: MA Experiment 20000574 PARAMETER Experiment Name: At_100uM_ABA_Mutants__P Parameter: Plant Line Value: CS23 vs. Ler wt
  misc_feature: MA Experiment 20000574 PARAMETER Experiment Name: At_100uM_ABA_Mutants__P Parameter: Timepoint (hr) Value: N/A
  misc_feature: MA Experiment 20000574 PARAMETER Experiment Name: At_100uM_ABA_Mutants__P Parameter: Tissue Value: Whole Plant
  misc_feature: MA Experiment 20000574 PARAMETER Experiment Name: At_100uM_ABA_Mutants__P Parameter: Treatment Value: None
  misc_feature: MA Experiment ID: 20000794 Result: Down-regulated in Transcription
  misc_feature: MA Experiment 20000794 PARAMETER Experiment Name: At_Petals_P Parameter: Age (day) Value: 23-25 days
  misc_feature: MA Experiment 20000794 PARAMETER Experiment Name: At_Petals_P Parameter: Plant Line Value: WS
  misc_feature: MA Experiment 20000794 PARAMETER Experiment Name: At_Petals_P Parameter: Tissue Value: Petals vs. Whole plant
  misc_feature: MA Experiment ID: 20001556 Result: Down-regulated in Transcription
  misc_feature: MA Experiment 20001556 PARAMETER Experiment Name: At_Drought_Soil_Dry_P Parameter: Age (day) Value: 26
  misc_feature: MA Experiment 20001556 PARAMETER Experiment Name: At_Drought_Soil_Dry_P Parameter: Organism Value: A. thaliana
  misc_feature: MA Experiment 20001556 PARAMETER Experiment Name: At_Drought_Soil_Dry_P Parameter: Plant Line Value: WS
  misc_feature: MA Experiment 20001556 PARAMETER Experiment Name: At_Drought_Soil_Dry_P Parameter: Post Timepoint (hr) Value: None
  misc_feature: MA Experiment 20001556 PARAMETER Experiment Name: At_Drought_Soil_Dry_P Parameter: Post-Treatment Value: None
  misc_feature: MA Experiment 20001556 PARAMETER Experiment Name: At_Drought_Soil_Dry_P Parameter: Timepoint (day) Value: 12
  misc_feature: MA Experiment 20001556 PARAMETER Experiment Name: At_Drought_Soil_Dry_P Parameter: Treatment Value: Drought vs. No Drought
  misc_feature: MA Experiment ID: 20001757 Result: Down-regulated in Transcription
  misc_feature: MA Experiment 20001757 PARAMETER Experiment Name: At_50mM_NH4NO3_L-to-H_P Parameter: Timepoint (hr) Value: 6
  misc_feature: MA Experiment 20001757 PARAMETER Experiment Name: At_50mM_NH4NO3_L-to-H_P Parameter: Tissue Value: Leaf
  misc_feature: MA Experiment 20001757 PARAMETER Experiment Name: At_50mM_NH4NO3_L-to-H_P Parameter: Treatment Value: 50mM NH4NO3 vs 100mM Mannitol
atcaatcatcatcatcactctctctcaatccaacaaagaaaaaaaaagtcttcttctttttttacaagtctgagaattttctacagaaacaaaaatctgattgtttttcccactttgcatctgttttgaggatgccagctacggattttcaaggatcatttggaaggtcgttgctaagtttacggcgagaccaagttgactcatcaacagtcgtctccggaagtagtagccaccacgagccaagcaccatggaggttgagctagattcgtttcaaagacaagtcgctgagaaattcatcgatctcaacgcttcttcaaacgaccttctctctctcgaatggatcggaaagcttcttgattctttcctctgttgtcaagaagagtttcgagctatcgtattcaaccaccgatctcagatctctaaatctccgatggaccgtttgatttcagattacttcgaacgcagcatcaaagctctagatgtctgtaacgccatccgcgacggtatcgaacagatccgtcaatgggagaaacttgccgatattgtgatctctgctttagatagtcaccgtccgatcggagaaggtcagctccggcgagctaagaaagctctgattgatttagcaatcggaatgcttgacgagaaagatcatccttctggaaccaatctagctcatcgtaaccgttcattcggaagagtcaaagacagtcaccaccgttcgattggtcatttcagatctctttcttggagtgtttcaagatcatggtcagcttctaagcagttacaagctttagcgagtaacttggcaacgcctcgaccaaacgatgtcgttgctagcaatggtttagctgtaccggtttacacaatgacttcggttttgctttttgtgatgtgggttttggtagctgcgattccttgtcaagaccgtggattgcaagttaacttctttgtgcctaggcatttccaatgggcagctccggttatgtcgttgcacgataagattgttgaggaatctaagagaagagataggaagaattgttgtggtttgcttaaggagattgataggattgagaagagttcgaggttgatgaatgaattgatcgattcgattcatttcccgttgaatgatgacaaggaagttgaggtgaaacagagagttgatgagcttgttcaagttcgtgaagctttgagaaatggtttggatccgtttgagaggaaagtaagagaagttttccatcggattgtgagaagcagaactgagagtcttgattctctttgatcttgcacatgtttgtctgaatatgatgaatgattcatgtttggattttttgttttgtttttgtttttctctatttatcctttttgatcacttgtaaaaaagaaactcaaagagtgtagaagtgtcatcttctctttgtgatgctgatagtgattctgttcttctttgtgtagctacttgcttagattgaagttattttttcc

SEQ ID NO: 25498 - protein, 425 aa, Arabidopsis thaliana
  peptide (1)..(425): Ceres Seq. ID no. 12357663
  misc_feature (44)..(425): Pfam Name: Protein of unknown function (DUF793) Pfam Description: Protein of unknown function (DUF793)
  misc_feature (46)..(425): Homolog of NCBI NO: 15236522 NR Description: putative protein
  misc_feature (103)..(425): Homolog of NCBI NO: 15222577 NR Description: hypothetical protein; protein id: At1g63930.1
  misc_feature (44)..(425): Homolog of NCBI NO: 38345505 NR Description: OSJNBa0039K24.3 [Oryza sativa (japonica
  misc_feature (44)..(425): Homolog of NCBI NO: 15218428 NR Description: hypothetical protein; protein id: At1g43630.1
  misc_feature (45)..(423): Homolog of NCBI NO: 21553882 NR Description: unknown [Arabidopsis thaliana]
  misc_feature (45)..(423): Homolog of NCBI NO: 15237130 NR Description: putative protein
  misc_feature (44)..(425): Homolog of NCBI NO: 21536674 NR Description: unknown [Arabidopsis thaliana]
  misc_feature (44)..(425): Homolog of NCBI NO: 18410617 NR Description: expressed protein
  misc_feature (44)..(425): Homolog of NCBI NO: 21593634 NR Description: unknown [Arabidopsis thaliana]
  misc_feature (44)..(425): Homolog of NCBI NO: 18394649 NR Description: expressed protein
QSSSSLSLNPTKKKKVFFFFYKSENFLQKQKSDCFSHFASVLRMPATDFQGSFGRSLLSLRRDQVDSSTVVSGSSSHHEPSTMEVELDSFQRQVAEKFIDLNASSNDLLSLEWIGKLLDSFLCCQEEFRAIVFNHRSQISKSPMDRLISDYFERSIKALDVCNAIRDGIEQIRQWEKLADIVISALDSHRPIGEGQLRRAKKALIDLAIGMLDEKDHPSGTNLAHRNRSFGRVKDSHHRSIGHFRSLSWSVSRSWSASKQLQALASNLATPRPNDVVASNGLAVPVYTMTSVLLFVMWVLVAAIPCQDRGLQVNFFVPRHFQWAAPVMSLHDKIVEESKRRDRKNCCGLLKEIDRIEKSSRLMNELIDSIHFPLNDDKEVEVKQRVDELVQVREALRNGLDPFERKVREVFHRIVRSRTESLDSL

SEQ ID NO: 25499 - protein, 382 aa, Arabidopsis thaliana
  peptide (1)..(382): Ceres Seq. ID no. 12357664
  misc_feature (1)..(382): Pfam Name: Protein of unknown function (DUF793) Pfam Description: Protein of unknown function (DUF793)
  misc_feature (2)..(380): Homolog of NCBI NO: 21553882 NR Description: unknown [Arabidopsis thaliana]
  misc_feature (2)..(380): Homolog of NCBI NO: 15237130 NR Description: putative protein
  misc_feature (3)..(382): Homolog of NCBI NO: 15236522 NR Description: putative protein
  misc_feature (60)..(382): Homolog of NCBI NO: 15222577 NR Description: hypothetical protein; protein id: At1g63930.1
  misc_feature (1)..(382): Homolog of NCBI NO: 38345505 NR Description: OSJNBa0039K24.3 [Oryza sativa (japonica
  misc_feature (1)..(382): Homolog of NCBI NO: 15218428 NR Description: hypothetical protein; protein id: At1g43630.1
  misc_feature (1)..(382): Homolog of NCBI NO: 21536674 NR Description: unknown [Arabidopsis thaliana]
  misc_feature (1)..(382): Homolog of NCBI NO: 18410617 NR Description: expressed protein
  misc_feature (1)..(382): Homolog of NCBI NO: 21593634 NR Description: unknown [Arabidopsis thaliana]
  misc_feature (1)..(382): Homolog of NCBI NO: 18394649 NR Description: expressed protein
MPATDFQGSFGRSLLSLRRDQVDSSTVVSGSSSHHEPSTMEVELDSFQRQVAEKFIDLNASSNDLLSLEWIGKLLDSFLCCQEEFRAIVFNHRSQISKSPMDRLISDYFERSIKALDVCNAIRDGIEQIRQWEKLADIVISALDSHRPIGEGQLRRAKKALIDLAIGMLDEKDHPSGTNLAHRNRSFGRVKDSHHRSIGHFRSLSWSVSRSWSASKQLQALASNLATPRPNDVVASNGLAVPVYTMTSVLLFVMWVLVAAIPCQDRGLQVNFFVPRHFQWAAPVMSLHDKIVEESKRRDRKNCCGLLKEIDRIEKSSRLMNELIDSIHFPLNDDKEVEVKQRVDELVQVREALRNGLDPFERKVREVFHRIVRSRTESLDSL

SEQ ID NO: 25500 - protein, 343 aa, Arabidopsis thaliana
  peptide (1)..(343): Ceres Seq. ID no. 12357665
  misc_feature (1)..(343): Pfam Name: Protein of unknown function (DUF793) Pfam Description: Protein of unknown function (DUF793)
  misc_feature (1)..(341): Homolog of NCBI NO: 21553882 NR Description: unknown [Arabidopsis thaliana]
  misc_feature (1)..(341): Homolog of NCBI NO: 15237130 NR Description: putative protein
  misc_feature (1)..(343): Homolog of NCBI NO: 15236522 NR Description: putative protein
  misc_feature (21)..(343): Homolog of NCBI NO: 15222577 NR Description: hypothetical protein; protein id: At1g63930.1
  misc_feature (1)..(343): Homolog of NCBI NO: 38345505 NR Description: OSJNBa0039K24.3 [Oryza sativa (japonica
  misc_feature (1)..(343): Homolog of NCBI NO: 15218428 NR Description: hypothetical protein; protein id: At1g43630.1
  misc_feature (1)..(343): Homolog of NCBI NO: 21536674 NR Description: unknown [Arabidopsis thaliana]
  misc_feature (1)..(343): Homolog of NCBI NO: 18410617 NR Description: expressed protein
  misc_feature (1)..(343): Homolog of NCBI NO: 21593634 NR Description: unknown [Arabidopsis thaliana]
  misc_feature (1)..(343): Homolog of NCBI NO: 18394649 NR Description: expressed protein
MEVELDSFQRQVAEKFIDLNASSNDLLSLEWIGKLLDSFLCCQEEFRAIVFNHRSQISKSPMDRLISDYFERSIKALDVCNAIRDGIEQIRQWEKLADIVISALDSHRPIGEGQLRRAKKALIDLAIGMLDEKDHPSGTNLAHRNRSFGRVKDSHHRSIGHFRSLSWSVSRSWSASKQLQALASNLATPRPNDVVASNGLAVPVYTMTSVLLFVMWVLVAAIPCQDRGLQVNFFVPRHFQWAAPVMSLHDKIVEESKRRDRKNCCGLLKEIDRIEKSSRLMNELIDSIHFPLNDDKEVEVKQRVDELVQVREALRNGLDPFERKVREVFHRIVRSRTESLDSL

SEQ ID NO: 25501 - DNA, 1437 bp, Arabidopsis thaliana; identical to SEQ ID NO: 21900
  misc_feature (1)..(1437): Ceres Seq. ID no. 13497598
  misc_feature: MA Experiment ID: 108434 Result: Up-regulated in Transcription
  misc_feature: MA Experiment 108434 PARAMETER Experiment Name: At_Root_Tips_cDNA_P Parameter: Tissue Value: Root Tips
  misc_feature: MA Experiment ID: 108462 Result: Down-regulated in Transcription
  misc_feature: MA Experiment 108462 PARAMETER Experiment Name: At_Germinating_Seeds_cDNA_P Parameter: Age (day) Value: 2 vs. 0
  misc_feature: MA Experiment 108462 PARAMETER Experiment Name: At_Germinating_Seeds_cDNA_P Parameter: Tissue Value: Germinating Seeds
  misc_feature: MA Experiment ID: 108463 Result: Down-regulated in Transcription
  misc_feature: MA Experiment 108463 PARAMETER Experiment Name: At_Germinating_Seeds_cDNA_P Parameter: Age (day) Value: 3 vs. 0
  misc_feature: MA Experiment 108463 PARAMETER Experiment Name: At_Germinating_Seeds_cDNA_P Parameter: Tissue Value: Germinating Seeds
  misc_feature: MA Experiment ID: 108464 Result: Down-regulated in Transcription
  misc_feature: MA Experiment 108464 PARAMETER Experiment Name: At_Germinating_Seeds_cDNA_P Parameter: Age (day) Value: 4 vs. 0
  misc_feature: MA Experiment 108464 PARAMETER Experiment Name: At_Germinating_Seeds_cDNA_P Parameter: Tissue Value: Germinating Seeds
  misc_feature: MA Experiment ID: 20000184 Result: Up-regulated in Transcription
  misc_feature: MA Experiment 20000184 PARAMETER Experiment Name: At_Shoots__P Parameter: Age (day) Value: 7
  misc_feature: MA Experiment 20000184 PARAMETER Experiment Name: At_Shoots__P Parameter: Tissue Value: Shoots vs. Whole Plant
  misc_feature: MA Experiment ID: 20000227 Result: Up-regulated in Transcription
  misc_feature: MA Experiment 20000227 PARAMETER Experiment Name: At_Root-Tips-vs-Tops_P Parameter: Tissue Value: Root Tips vs. Root Tops
  misc_feature: MA Experiment ID: 20000234 Result: Up-regulated in Transcription
  misc_feature: MA Experiment 20000234 PARAMETER Experiment Name: At_Siliques_P Parameter: Age (day) Value: 21
  misc_feature: MA Experiment 20000234 PARAMETER Experiment Name: At_Siliques_P Parameter: Organism Value: A. thaliana
  misc_feature: MA Experiment 20000234 PARAMETER Experiment Name: At_Siliques_P Parameter: Plant Line Value: WS
  misc_feature: MA Experiment 20000234 PARAMETER Experiment Name: At_Siliques_P Parameter: Tissue Value: Less Than 5mm Siliques vs. Whole Plant
  misc_feature: MA Experiment ID: 20001557 Result: Up-regulated in Transcription
  misc_feature: MA Experiment 20001557 PARAMETER Experiment Name: At_Drought_Soil_Dry_P Parameter: Age (day) Value: 27
  misc_feature: MA Experiment 20001557 PARAMETER Experiment Name: At_Drought_Soil_Dry_P Parameter: Organism Value: A. thaliana
  misc_feature: MA Experiment 20001557 PARAMETER Experiment Name: At_Drought_Soil_Dry_P Parameter: Plant Line Value: WS
  misc_feature: MA Experiment 20001557 PARAMETER Experiment Name: At_Drought_Soil_Dry_P Parameter: Post Timepoint (hr) Value: 3
  misc_feature: MA Experiment 20001557 PARAMETER Experiment Name: At_Drought_Soil_Dry_P Parameter: Post-Treatment Value: Re-Water vs. No Drought
  misc_feature: MA Experiment 20001557 PARAMETER Experiment Name: At_Drought_Soil_Dry_P Parameter: Timepoint (day) Value: 13
  misc_feature: MA Experiment 20001557 PARAMETER Experiment Name: At_Drought_Soil_Dry_P Parameter: Treatment Value: Drought vs. No Drought
  misc_feature: MA Experiment ID: 20001558 Result: Up-regulated in Transcription
  misc_feature: MA Experiment 20001558 PARAMETER Experiment Name: At_Drought_Soil_Dry_P Parameter: Age (day) Value: 27
  misc_feature: MA Experiment 20001558 PARAMETER Experiment Name: At_Drought_Soil_Dry_P Parameter: Organism Value: A. thaliana
  misc_feature: MA Experiment 20001558 PARAMETER Experiment Name: At_Drought_Soil_Dry_P Parameter: Plant Line Value: WS
  misc_feature: MA Experiment 20001558 PARAMETER Experiment Name: At_Drought_Soil_Dry_P Parameter: Post Timepoint (hr) Value: 6
  misc_feature: MA Experiment 20001558 PARAMETER Experiment Name: At_Drought_Soil_Dry_P Parameter: Post-Treatment Value: Re-Water vs. No Drought
  misc_feature: MA Experiment 20001558 PARAMETER Experiment Name: At_Drought_Soil_Dry_P Parameter: Timepoint (day) Value: 13
  misc_feature: MA Experiment 20001558 PARAMETER Experiment Name: At_Drought_Soil_Dry_P Parameter: Treatment Value: Drought vs. No Drought
  misc_feature: MA Experiment ID: 20001560 Result: Up-regulated in Transcription
  misc_feature: MA Experiment 20001560 PARAMETER Experiment Name: At_Drought_Soil_Dry_P Parameter: Age (day) Value: 28
  misc_feature: MA Experiment 20001560 PARAMETER Experiment Name: At_Drought_Soil_Dry_P Parameter: Organism Value: A. thaliana
  misc_feature: MA Experiment 20001560 PARAMETER Experiment Name: At_Drought_Soil_Dry_P Parameter: Plant Line Value: WS
  misc_feature: MA Experiment 20001560 PARAMETER Experiment Name: At_Drought_Soil_Dry_P Parameter: Post Timepoint (hr) Value: None
  misc_feature: MA Experiment 20001560 PARAMETER Experiment Name: At_Drought_Soil_Dry_P Parameter: Post-Treatment Value: None
  misc_feature: MA Experiment 20001560 PARAMETER Experiment Name: At_Drought_Soil_Dry_P Parameter: Timepoint (day) Value: 14
  misc_feature: MA Experiment 20001560 PARAMETER Experiment Name: At_Drought_Soil_Dry_P Parameter: Treatment Value: Drought vs. No Drought
  misc_feature: MA Experiment ID: 20001757 Result: Up-regulated in Transcription
  misc_feature: MA Experiment 20001757 PARAMETER Experiment Name: At_50mM_NH4NO3_L-to-H_P Parameter: Timepoint (hr) Value: 6
  misc_feature: MA Experiment 20001757 PARAMETER Experiment Name: At_50mM_NH4NO3_L-to-H_P Parameter: Tissue Value: Leaf
  misc_feature: MA Experiment 20001757 PARAMETER Experiment Name: At_50mM_NH4NO3_L-to-H_P Parameter: Treatment Value: 50mM NH4NO3 vs 100mM Mannitol

SEQ ID NO: 25502 - protein, 428 aa, Arabidopsis thaliana; identical to SEQ ID NO: 21901
  peptide (1)..(428): Ceres Seq. ID no. 13497599
  misc_feature (47)..(291): Pfam Name: Ribosomal protein L4/L1 family Pfam Description: Ribosomal protein L4/L1 family
  misc_feature (47)..(291): Pfam Name: Ribosomal protein L4/L1 family Pfam Description: Ribosomal protein L4/L1 family
  misc_feature (27)..(393): Homolog of NCBI NO: 1350686 NR Description: 60S RIBOSOMAL PROTEIN L4 (L1)
  misc_feature (71)..(428): Homolog of NCBI NO: 6441068 NR Description: 60S ribosomal protein L4 [Chlamydomonas sp. HS-5]
  misc_feature (122)..(428): Homolog of NCBI NO: 13605831 NR Description: AT5g02870/F9G14_180 [Arabidopsis thaliana]
  misc_feature (25)..(428): Homolog of NCBI NO: 34897236 NR Description: putative 60S ribosomal protein L1
  misc_feature (25)..(428): Homolog of NCBI NO: 34393487 NR Description: putative 60S ribosomal protein L4/L1
  misc_feature (27)..(393): Homolog of NCBI NO: 1350686 NR Description: 60S RIBOSOMAL PROTEIN L4 (L1)
  misc_feature (122)..(428): Homolog of NCBI NO: 13605831 NR Description: AT5g02870/F9G14_180 [Arabidopsis thaliana]
  misc_feature (25)..(428): Homolog of NCBI NO: 34393487 NR Description: putative 60S ribosomal protein L4/L1
  misc_feature (23)..(428): Homolog of NCBI NO: 15232723 NR Description: 60S ribosomal protein L4/L1 (RPL4A) [Arabidopsis
  misc_feature (23)..(428): Homolog of NCBI NO: 21593543 NR Description: 60S ribosomal protein L4-B (L1) [Arabidopsis
  misc_feature (23)..(428): Homolog of NCBI NO: 15242558 NR Description: 60S ribosomal protein L4/L1 (RPL4D) [Arabidopsis
  misc_feature (23)..(428): Homolog of NCBI NO: 26450328 NR Description: putative 60S ribosomal protein [Arabidopsis
  misc_feature (24)..(428): Homolog of NCBI NO: 17367847 NR Description: 60S ribosomal protein L4 (L1)
  misc_feature (25)..(428): Homolog of NCBI NO: 34897236 NR Description: putative 60S ribosomal protein L1
  misc_feature (71)..(428): Homolog of NCBI NO: 6441068 NR Description: 60S ribosomal protein L4 [Chlamydomonas sp. HS-5]
  misc_feature (24)..(428): Homolog of NCBI NO: 17367847 NR Description: 60S ribosomal protein L4 (L1)
  misc_feature (23)..(428): Homolog of NCBI NO: 26450328 NR Description: putative 60S ribosomal protein [Arabidopsis
  misc_feature (23)..(428): Homolog of NCBI NO: 15242558 NR Description: 60S ribosomal protein L4/L1 (RPL4D) [Arabidopsis
  misc_feature (23)..(428): Homolog of NCBI NO: 21593543 NR Description: 60S ribosomal protein L4-B (L1) [Arabidopsis
  misc_feature (23)..(428): Homolog of NCBI NO: 15232723 NR Description: 60S ribosomal protein L4/L1 (RPL4A) [Arabidopsis

SEQ ID NO: 25503 - protein, 406 aa, Arabidopsis thaliana; identical to SEQ ID NO: 21902
  peptide (1)..(406): Ceres Seq. ID no. 13497600
  misc_feature (25)..(269): Pfam Name: Ribosomal protein L4/L1 family Pfam Description: Ribosomal protein L4/L1 family
  misc_feature (25)..(269): Pfam Name: Ribosomal protein L4/L1 family Pfam Description: Ribosomal protein L4/L1 family
  misc_feature (5)..(371): Homolog of NCBI NO: 1350686 NR Description: 60S RIBOSOMAL PROTEIN L4 (L1)
  misc_feature (49)..(406): Homolog of NCBI NO: 6441068 NR Description: 60S ribosomal protein L4 [Chlamydomonas sp. HS-5]
  misc_feature (100)..(406): Homolog of NCBI NO: 13605831 NR Description: AT5g02870/F9G14_180 [Arabidopsis thaliana]
  misc_feature (3)..(406): Homolog of NCBI NO: 34897236 NR Description: putative 60S ribosomal protein L1
  misc_feature (3)..(406): Homolog of NCBI NO: 34393487 NR Description: putative 60S ribosomal protein L4/L1
  misc_feature (5)..(371): Homolog of NCBI NO: 1350686 NR Description: 60S RIBOSOMAL PROTEIN L4 (L1)
  misc_feature (100)..(406): Homolog of NCBI NO: 13605831 NR Description: AT5g02870/F9G14_180 [Arabidopsis thaliana]
  misc_feature (3)..(406): Homolog of NCBI NO: 34393487 NR Description: putative 60S ribosomal protein L4/L1
  misc_feature (1)..(406): Homolog of NCBI NO: 15232723 NR Description: 60S ribosomal protein L4/L1 (RPL4A) [Arabidopsis
  misc_feature (1)..(406): Homolog of NCBI NO: 21593543 NR Description: 60S ribosomal protein L4-B (L1) [Arabidopsis
  misc_feature (1)..(406): Homolog of NCBI NO: 15242558 NR Description: 60S ribosomal protein L4/L1 (RPL4D) [Arabidopsis
  misc_feature (1)..(406): Homolog of NCBI NO: 26450328 NR Description: putative 60S ribosomal protein [Arabidopsis
  misc_feature (2)..(406): Homolog of NCBI NO: 17367847 NR Description: 60S ribosomal protein L4 (L1)
  misc_feature (3)..(406): Homolog of NCBI NO: 34897236 NR Description: putative 60S ribosomal protein L1
  misc_feature (49)..(406): Homolog of NCBI NO: 6441068 NR Description: 60S ribosomal protein L4 [Chlamydomonas sp. HS-5]
  misc_feature (2)..(406): Homolog of NCBI NO: 17367847 NR Description: 60S ribosomal protein L4 (L1)
  misc_feature (1)..(406): Homolog of NCBI NO: 26450328 NR Description: putative 60S ribosomal protein [Arabidopsis
  misc_feature (1)..(406): Homolog of NCBI NO: 15242558 NR Description: 60S ribosomal protein L4/L1 (RPL4D) [Arabidopsis
  misc_feature (1)..(406): Homolog of NCBI NO: 21593543 NR Description: 60S ribosomal protein L4-B (L1) [Arabidopsis
  misc_feature (1)..(406): Homolog of NCBI NO: 15232723 NR Description: 60S ribosomal protein L4/L1 (RPL4A) [Arabidopsis

SEQ ID NO: 25504 - protein, 388 aa, Arabidopsis thaliana; identical to SEQ ID NO: 21903
  peptide (1)..(388): Ceres Seq. ID no. 13497601
  misc_feature (7)..(251): Pfam Name: Ribosomal protein L4/L1 family Pfam Description: Ribosomal protein L4/L1 family
  misc_feature (7)..(251): Pfam Name: Ribosomal protein L4/L1 family Pfam Description: Ribosomal protein L4/L1 family
  misc_feature (1)..(353): Homolog of NCBI NO: 1350686 NR Description: 60S RIBOSOMAL PROTEIN L4 (L1)
  misc_feature (31)..(388): Homolog of NCBI NO: 6441068 NR Description: 60S ribosomal protein L4 [Chlamydomonas sp. HS-5]
  misc_feature (82)..(388): Homolog of NCBI NO: 13605831 NR Description: AT5g02870/F9G14_180 [Arabidopsis thaliana]
  misc_feature (1)..(388): Homolog of NCBI NO: 34897236 NR Description: putative 60S ribosomal protein L1
  misc_feature (1)..(388): Homolog of NCBI NO: 34393487 NR Description: putative 60S ribosomal protein L4/L1
  misc_feature (1)..(353): Homolog of NCBI NO: 1350686 NR Description: 60S RIBOSOMAL PROTEIN L4 (L1)
  misc_feature (82)..(388): Homolog of NCBI NO: 13605831 NR Description: AT5g02870/F9G14_180 [Arabidopsis thaliana]
  misc_feature (1)..(388): Homolog of NCBI NO: 34393487 NR Description: putative 60S ribosomal protein L4/L1
  misc_feature (1)..(388): Homolog of NCBI NO: 15232723 NR Description: 60S ribosomal protein L4/L1 (RPL4A) [Arabidopsis
  misc_feature (1)..(388): Homolog of NCBI NO: 21593543 NR Description: 60S ribosomal protein L4-B (L1) [Arabidopsis
  misc_feature (1)..(388): Homolog of NCBI NO: 15242558 NR Description: 60S ribosomal protein L4/L1 (RPL4D) [Arabidopsis
  misc_feature (1)..(388): Homolog of NCBI NO: 26450328 NR Description: putative 60S ribosomal protein [Arabidopsis
  misc_feature (1)..(388): Homolog of NCBI NO: 17367847 NR Description: 60S ribosomal protein L4 (L1)
  misc_feature (1)..(388): Homolog of NCBI NO: 34897236 NR Description: putative 60S ribosomal protein L1
  misc_feature (31)..(388): Homolog of NCBI NO: 6441068 NR Description: 60S ribosomal protein L4 [Chlamydomonas sp. HS-5]
  misc_feature (1)..(388): Homolog of NCBI NO: 17367847 NR Description: 60S ribosomal protein L4 (L1)
  misc_feature (1)..(388): Homolog of NCBI NO: 26450328 NR Description: putative 60S ribosomal protein [Arabidopsis
  misc_feature (1)..(388): Homolog of NCBI NO: 15242558 NR Description: 60S ribosomal protein L4/L1 (RPL4D) [Arabidopsis
  misc_feature (1)..(388): Homolog of NCBI NO: 21593543 NR Description: 60S ribosomal protein L4-B (L1) [Arabidopsis
  misc_feature (1)..(388): Homolog of NCBI NO: 15232723 NR Description: 60S ribosomal protein L4/L1 (RPL4A) [Arabidopsis

SEQ ID NO: 25505 - DNA, 1417 bp, Arabidopsis thaliana
  misc_feature (1)..(1417): Ceres Seq. ID no. 13486896
  misc_feature: MA Experiment ID: 108569 Result: Up-regulated in Transcription
  misc_feature: MA Experiment 108569 PARAMETER Experiment Name: At_0.001%_MeJA__cDNA_P Parameter: Timepoint (hr) Value: 6
  misc_feature: MA Experiment 108569 PARAMETER Experiment Name: At_0.001%_MeJA__cDNA_P Parameter: Tissue Value: Aerial
  misc_feature: MA Experiment 108569 PARAMETER Experiment Name: At_0.001%_MeJA__cDNA_P Parameter: Treatment Value: 0.001% MeJA vs. No Treatment
  misc_feature: MA Experiment ID: 108573 Result: Up-regulated in Transcription
  misc_feature: MA Experiment 108573 PARAMETER Experiment Name: At_Drought_cDNA_P Parameter: Timepoint (hr) Value: 6
  misc_feature: MA Experiment 108573 PARAMETER Experiment Name: At_Drought_cDNA_P Parameter: Tissue Value: Aerial
  misc_feature: MA Experiment 108573 PARAMETER Experiment Name: At_Drought_cDNA_P Parameter: Treatment Value: Drought vs. No Drought
atttccctttttctctgtaattttcaattcccaaaataaagaagctttcgtttctctctcgcattgacccttcttctccagttttatgttttgcctctctcccacttctgtaaataatcttctcacatccccgcacgattattctctagccgatcaacgaacacagagacgctaatgtatttgactcgattcgaatcattagtcttctaatcacaccgattgatttccacccacagatttcttgtctgaaatttagggttagcgaaggtttggatcaatgatgcaaggtgaagtacaattgcagccaccggattcacagaaactaagtgattccgctcctttgttaggagatcacaccaattcttcttcggcgtctccttctgctgcgtctgtggtggcaggaaatagcgatgagataaaggctgaagaagatttagagaacgatgcttcttcagctccttgttgtcgtatttgtttggaggacgatagtgaattgttaggcgatgaattgatttcaccttgtatgtgtaaaggcactcaacaattcgtgcatcgctcatgtctcgatcattggcgatcggttaaagaaggttttgctttctctcactgtactacttgcaaagcacagtttcatctgagagtcgaaccctttgaggataacaattcgtggcgtagaaaagctaaattcagactctttgtcgcaagagatgtgcttttggttttcttagctgtgcagactgttatcgctgtgatggccggattcgcatatatgatggacaaagacggagagtttcgcaactctttcaacgatgattgggatcgtattttgtcgaaacatcccatcccgttttattactgcattggggttatatccttctttgtgctgactggatttcttggaatcattctacattgctctgctctcaacggtaatgacccgaggatggctggatgccagaactgctgttatggatggggtgtcttggattgtttccctgcttcaatggaagcttgtttcgctcttgttgttgtttttgtcgtcatctttgccattcttggtttagcgtatgggtttcttgctgcaactatggctatccaaaggatatggcagagacattaccatattctcaccaagcgagagctcacaaaggagtacattgtggaggatcttcacggaagttacactcccccgaagctggatgcagagcacgaaggaagactgaaaatgctgaaacttctgtgaccgtgttttttaactgtcaaataaaggttgtaaggagtttcgggcacatgagagagacgagttcatacgtatatgttcacagagtgtctttcttttctttatcatgcgatgaaaagtacctaatggatattttgtcttatatatatttattataattatggtatgaggtgatgc

SEQ ID NO: 25506 - protein, 321 aa, Arabidopsis thaliana
  peptide (1)..(321): Ceres Seq. ID no. 13486897
  misc_feature (63)..(114): Pfam Name: Zinc finger, C3HC4 type (RING finger) Pfam Description: Zinc finger, C3HC4 type (RING finger)
  misc_feature (49)..(238): Homolog of NCBI NO: 28393273 NR Description: unknown protein [Arabidopsis thaliana]
  misc_feature (49)..(159): Homolog of NCBI NO: 15227153 NR Description: zinc finger (C3HC4-type RING finger) protein
  misc_feature (195)..(321): Homolog of NCBI NO: 15227153 NR Description: zinc finger (C3HC4-type RING finger) protein
  misc_feature (46)..(155): Homolog of NCBI NO: 34912564 NR Description: P0410E03.20 [Oryza sativa (japonica
  misc_feature (200)..(321): Homolog of NCBI NO: 34912564 NR Description: P0410E03.20 [Oryza sativa (japonica
  misc_feature (17)..(321): Homolog of NCBI NO: 40253895 NR Description: zinc finger (C3HC4-type RING finger) protein
  misc_feature (195)..(321): Homolog of NCBI NO: 25402638 NR Description: hypothetical protein [imported] - Arabidopsis
  misc_feature (1)..(162): Homolog of NCBI NO: 25402638 NR Description: hypothetical protein [imported] - Arabidopsis
  misc_feature (2)..(321): Homolog of NCBI NO: 21593635 NR Description: unknown [Arabidopsis thaliana]
  misc_feature (1)..(321): Homolog of NCBI NO: 18391230 NR Description: zinc finger (C3HC4-type RING finger) protein
MMQGEVQLQPPDSQKLSDSAPLLGDHTNSSSASPSAASVVAGNSDEIKAEEDLENDASSAPCCRICLEDDSELLGDELISPCMCKGTQQFVHRSCLDHWRSVKEGFAFSHCTTCKAQFHLRVEPFEDNNSWRRKAKFRLFVARDVLLVFLAVQTVIAVMAGFAYMMDKDGEFRNSFNDDWDRILSKHPIPFYYCIGVISFFVLTGFLGIILHCSALNGNDPRMAGCQNCCYGWGVLDCFPASMEACFALVVVFVVIFAILGLAYGFLAATMAIQRIWQRHYHILTKRELTKEYIVEDLHGSYTPPKLDAEHEGRLKMLKLL

SEQ ID NO: 25507 - protein, 320 aa, Arabidopsis thaliana
  peptide (1)..(320): Ceres Seq. ID no. 13486898
  misc_feature (62)..(113): Pfam Name: Zinc finger, C3HC4 type (RING finger) Pfam Description: Zinc finger, C3HC4 type (RING finger)
  misc_feature (48)..(237): Homolog of NCBI NO: 28393273 NR Description: unknown protein [Arabidopsis thaliana]
  misc_feature (48)..(158): Homolog of NCBI NO: 15227153 NR Description: zinc finger (C3HC4-type RING finger) protein
  misc_feature (194)..(320): Homolog of NCBI NO: 15227153 NR Description: zinc finger (C3HC4-type RING finger) protein
  misc_feature (45)..(154): Homolog of NCBI NO: 34912564 NR Description: P0410E03.20 [Oryza sativa (japonica
  misc_feature (199)..(320): Homolog of NCBI NO: 34912564 NR Description: P0410E03.20 [Oryza sativa (japonica
  misc_feature (16)..(320): Homolog of NCBI NO: 40253895 NR Description: zinc finger (C3HC4-type RING finger) protein
  misc_feature (194)..(320): Homolog of NCBI NO: 25402638 NR Description: hypothetical protein [imported] - Arabidopsis
  misc_feature (1)..(161): Homolog of NCBI NO: 25402638 NR Description: hypothetical protein [imported] - Arabidopsis
  misc_feature (1)..(320): Homolog of NCBI NO: 21593635 NR Description: unknown [Arabidopsis thaliana]
  misc_feature (1)..(320): Homolog of NCBI NO: 18391230 NR Description: zinc finger (C3HC4-type RING finger) protein
MQGEVQLQPPDSQKLSDSAPLLGDHTNSSSASPSAASVVAGNSDEIKAEEDLENDASSAPCCRICLEDDSELLGDELISPCMCKGTQQFVHRSCLDHWRSVKEGFAFSHCTTCKAQFHLRVEPFEDNNSWRRKAKFRLFVARDVLLVFLAVQTVIAVMAGFAYMMDKDGEFRNSFNDDWDRILSKHPIPFYYCIGVISFFVLTGFLGIILHCSALNGNDPRMAGCQNCCYGWGVLDCFPASMEACFALVVVFVVIFAILGLAYGFLAATMAIQRIWQRHYHILTKRELTKEYIVEDLHGSYTPPKLDAEHEGRLKMLKLL

SEQ ID NO: 25508 - protein, 239 aa, Arabidopsis thaliana
  peptide (1)..(239): Ceres Seq. ID no. 13486899
  misc_feature (1)..(73): Homolog of NCBI NO: 34912564 NR Description: P0410E03.20 [Oryza sativa (japonica
  misc_feature (118)..(239): Homolog of NCBI NO: 34912564 NR Description: P0410E03.20 [Oryza sativa (japonica
  misc_feature (1)..(239): Homolog of NCBI NO: 40253895 NR Description: zinc finger (C3HC4-type RING finger) protein
  misc_feature (113)..(239): Homolog of NCBI NO: 25402638 NR Description: hypothetical protein [imported] - Arabidopsis
  misc_feature (1)..(80): Homolog of NCBI NO: 25402638 NR Description: hypothetical protein [imported] - Arabidopsis
  misc_feature (1)..(239): Homolog of NCBI NO: 21593635 NR Description: unknown [Arabidopsis thaliana]
  misc_feature (1)..(239): Homolog of NCBI NO: 18391230 NR Description: zinc finger (C3HC4-type RING finger) protein
  misc_feature (1)..(156): Homolog of NCBI NO: 28393273 NR Description: unknown protein [Arabidopsis thaliana]
  misc_feature (1)..(77): Homolog of NCBI NO: 15227153 NR Description: zinc finger (C3HC4-type RING finger) protein
  misc_feature (113)..(239): Homolog of NCBI NO: 15227153 NR Description: zinc finger (C3HC4-type RING finger) protein
MCKGTQQFVHRSCLDHWRSVKEGFAFSHCTTCKAQFHLRVEPFEDNNSWRRKAKFRLFVARDVLLVFLAVQTVIAVMAGFAYMMDKDGEFRNSFNDDWDRILSKHPIPFYYCIGVISFFVLTGFLGIILHCSALNGNDPRMAGCQNCCYGWGVLDCFPASMEACFALVVVFVVIFAILGLAYGFLAATMAIQRIWQRHYHILTKRELTKEYIVEDLHGSYTPPKLDAEHEGRLKMLKLL

SEQ ID NO: 25509 - DNA, 1059 bp, Arabidopsis thaliana
  misc_feature (1)..(1059): Ceres Seq. ID no. 12322024
  misc_feature: MA Experiment ID: 108668 Result: Up-regulated in Transcription
  misc_feature: MA Experiment 108668 PARAMETER Experiment Name: At_2mM_SA_cDNA_P Parameter: Plant Line Value: WS
  misc_feature: MA Experiment 108668 PARAMETER Experiment Name: At_2mM_SA_cDNA_P Parameter: Timepoint (hr) Value: 6
  misc_feature: MA Experiment 108668 PARAMETER Experiment Name: At_2mM_SA_cDNA_P Parameter: Treatment Value: 2mM SA vs. No Treatment
  misc_feature: MA Experiment ID: 20000180 Result: Up-regulated in Transcription
  misc_feature: MA Experiment 20000180 PARAMETER Experiment Name: At_Germinating_Seeds_P Parameter: Age (hr) Value: 24 vs. 0
  misc_feature: MA Experiment 20000180 PARAMETER Experiment Name: At_Germinating_Seeds_P Parameter: Tissue Value: Germinating Seeds
  misc_feature: MA Experiment ID: 20000185 Result: Up-regulated in Transcription
  misc_feature: MA Experiment 20000185 PARAMETER Experiment Name: At_Roots__P Parameter: Age (day) Value: 7 vs. 21
  misc_feature: MA Experiment 20000185 PARAMETER Experiment Name: At_Roots__P Parameter: Organism Value: A. thaliana
  misc_feature: MA Experiment 20000185 PARAMETER Experiment Name: At_Roots__P Parameter: Tissue Value: Roots vs. Whole Plant
  misc_feature: MA Experiment ID: 20000234 Result: Up-regulated in Transcription
  misc_feature: MA Experiment 20000234 PARAMETER Experiment Name: At_Siliques_P Parameter: Age (day) Value: 21
  misc_feature: MA Experiment 20000234 PARAMETER Experiment Name: At_Siliques_P Parameter: Organism Value: A. thaliana
  misc_feature: MA Experiment 20000234 PARAMETER Experiment Name: At_Siliques_P Parameter: Plant Line Value: WS
  misc_feature: MA Experiment 20000234 PARAMETER Experiment Name: At_Siliques_P Parameter: Tissue Value: Less Than 5mm Siliques vs. Whole Plant
  misc_feature: MA Experiment ID: 20000286 Result: Up-regulated in Transcription
  misc_feature: MA Experiment 20000286 PARAMETER Experiment Name: At_Open_Flower_P Parameter: Age (day) Value: 21
  misc_feature: MA Experiment 20000286 PARAMETER Experiment Name: At_Open_Flower_P Parameter: Plant Line Value: WS
  misc_feature: MA Experiment 20000286 PARAMETER Experiment Name: At_Open_Flower_P Parameter: Tissue Value: Half Open vs. Whole Plant
  misc_feature: MA Experiment ID: 20000439 Result: Up-regulated in Transcription
  misc_feature: MA Experiment 20000439 PARAMETER Experiment Name: At_Roots__P Parameter: Age (day) Value: 14 vs. 21
  misc_feature: MA Experiment 20000439 PARAMETER Experiment Name: At_Roots__P Parameter: Organism Value: A. thaliana
  misc_feature: MA Experiment 20000439 PARAMETER Experiment Name: At_Roots__P Parameter: Tissue Value: Roots vs. Whole Plant
  misc_feature: MA Experiment ID: 20000794 Result: Down-regulated in Transcription
  misc_feature: MA Experiment 20000794 PARAMETER Experiment Name: At_Petals_P Parameter: Age (day) Value: 23-25 days
  misc_feature: MA Experiment 20000794 PARAMETER Experiment Name: At_Petals_P Parameter: Plant Line Value: WS
  misc_feature: MA Experiment 20000794 PARAMETER Experiment Name: At_Petals_P Parameter: Tissue Value: Petals vs. Whole plant
  misc_feature: MA Experiment ID: 20001451 Result: Down-regulated in Transcription
  misc_feature: MA Experiment 20001451 PARAMETER Experiment Name: At_Far-red-induction_P Parameter: Age (day) Value: 7
  misc_feature: MA Experiment 20001451 PARAMETER Experiment Name: At_Far-red-induction_P Parameter: Light Value: Far-red vs. White
  misc_feature: MA Experiment 20001451 PARAMETER Experiment Name: At_Far-red-induction_P Parameter: Organism Value: A. thaliana
  misc_feature: MA Experiment 20001451 PARAMETER Experiment Name: At_Far-red-induction_P Parameter: Plant Line Value: Columbia
  misc_feature: MA Experiment 20001451 PARAMETER Experiment Name: At_Far-red-induction_P Parameter: Timepoint (hr) Value: 24
  misc_feature: MA Experiment 20001451 PARAMETER Experiment Name: At_Far-red-induction_P Parameter: Tissue Value: Whole Plant
agtgtgaaagagcaaaagcataaatagcatcgagagagacactgttctcattcattcgcaaattcgttgaccatatttgatagaatcaagcgatgatgaatcttagggttttgttcctcgctctccttctccttgcatctcctctgcttcaagttgctagatgtcaatcggatgccgaggatcattcaagtcttgttgacgatgttgtgggagaaaacactgatgatgcggttgaggaagatgaccatgatttggatatgaacttgtcctcatttccaggagttgagactgtttgtgttttccccaaaaacagtgccaaattggttccagctggagaagagactgagctccttgttggtcttaaaaatgaagggaaaactagagtaggtgtgatgggaattagggccagcgttcatcttccttatgatcataagttgttggttcagaatctaaccatgttgagacttaacaatgcatccatcccaacgtctcttcaagcaacattcccatacatctttgcagtcagccagtacttgcagcctggagcatttgatctggtgggttatatcatatacgatgtggaaggaaagccataccagagtgtcttctacaatggaaccatagaggtagttgaatctggaggtcttctcagcggcgaatctgttttccttttaacactcggaatcggtctcctcctcctcctcggtctatgggcatacagccaagttcagcgtctcaccaagaaaaccaaaaaggtttccaaggtggaagtaggaactaggtctaccgatgcatcactcgatgaatggctcgagggaactactttggccaagacatcgtctgggaaaacaaagaacaagaagaactaaaggagagctgttttgctccttccagttgttatagactcagcttcggcgttttgaaagagtttccaagtttaaagttcagtcttgaggaaatttagggttttaaacgacactttttttgttccagcattgtactctttagacaatctttacttcttgtcataaatattctcctcatgaaacaagttaactt

SEQ ID NO: 25510 - protein, 258 aa, Arabidopsis thaliana
  peptide (1)..(258): Ceres Seq. ID no. 12322025
  misc_feature (10)..(258): Homolog of NCBI NO: 12846635 NR Description: unnamed protein product [Mus musculus]
  misc_feature (1)..(258): Homolog of NCBI NO: 4507237 NR Description: signal sequence receptor, alpha; TRAP alpha [Homo
  misc_feature (4)..(258): Homolog of NCBI NO: 34783867 NR Description: Unknown (protein for MGC:64448) [Xenopus laevis]
  misc_feature (10)..(258): Homolog of NCBI NO: 31982666 NR Description: signal sequence receptor, alpha
  misc_feature (10)..(258): Homolog of NCBI NO: 34875232 NR Description: similar to Ac2-238 [Rattus norvegicus]
  misc_feature (126)..(257): Homolog of NCBI NO: 15227250 NR Description: putative TRAP protein; protein id: At2g16595.1
  misc_feature (6)..(258): Homolog of NCBI NO: 547391 NR Description: alpha-subunit; putative
  misc_feature (2)..(258): Homolog of NCBI NO: 25335776 NR Description: hypothetical protein At2g21160 [imported] -
  misc_feature (1)..(258): Homolog of NCBI NO: 18399609 NR Description: putative signal sequence receptor, alpha subunit
  misc_feature (1)..(258): Homolog of NCBI NO: 21555380 NR Description: putative signal sequence receptor, alpha subunit
MMNLRVLFLALLLLASPLLQVARCQSDAEDHSSLVDDVVGENTDDAVEEDDHDLDMNLSSFPGVETVCVFPKNSAKLVPAGEETELLVGLKNEGKTRVGVMGIRASVHLPYDHKLLVQNLTMLRLNNASIPTSLQATFPYIFAVSQYLQPGAFDLVGYIIYDVEGKPYQSVFYNGTIEVVESGGLLSGESVFLLTLGIGLLLLLGLWAYSQVQRLTKKTKKVSKVEVGTRSTDASLDEWLEGTTLAKTSSGKTKNKKN

SEQ ID NO: 25511 - protein, 257 aa, Arabidopsis thaliana
  peptide (1)..(257): Ceres Seq. ID no. 12322026
  misc_feature (9)..(257): Homolog of NCBI NO: 12846635 NR Description: unnamed protein product [Mus musculus]
  misc_feature (1)..(257): Homolog of NCBI NO: 4507237 NR Description: signal sequence receptor, alpha; TRAP alpha [Homo
  misc_feature (3)..(257): Homolog of NCBI NO: 34783867 NR Description: Unknown (protein for MGC:64448) [Xenopus laevis]
  misc_feature (9)..(257): Homolog of NCBI NO: 31982666 NR Description: signal sequence receptor, alpha
  misc_feature (9)..(257): Homolog of NCBI NO: 34875232 NR Description: similar to Ac2-238 [Rattus norvegicus]
  misc_feature (125)..(256): Homolog of NCBI NO: 15227250 NR Description: putative TRAP protein; protein id: At2g16595.1
  misc_feature (5)..(257): Homolog of NCBI NO: 547391 NR Description: alpha-subunit; putative
  misc_feature (1)..(257): Homolog of NCBI NO: 25335776 NR Description: hypothetical protein At2g21160 [imported] -
  misc_feature (1)..(257): Homolog of NCBI NO: 18399609 NR Description: putative signal sequence receptor, alpha subunit
  misc_feature (1)..(257): Homolog of NCBI NO: 21555380 NR Description: putative signal sequence receptor, alpha subunit
MNLRVLFLALLLLASPLLQVARCQSDAEDHSSLVDDVVGENTDDAVEEDDHDLDMNLSSFPGVETVCVFPKNSAKLVPAGEETELLVGLKNEGKTRVGVMGIRASVHLPYDHKLLVQNLTMLRLNNASIPTSLQATFPYIFAVSQYLQPGAFDLVGYIIYDVEGKPYQSVFYNGTIEVVESGGLLSGESVFLLTLGIGLLLLLGLWAYSQVQRLTKKTKKVSKVEVGTRSTDASLDEWLEGTTLAKTSSGKTKNKKN

SEQ ID NO: 25512 - protein, 203 aa, Arabidopsis thaliana
  peptide (1)..(203): Ceres Seq. ID no. 12322027
  misc_feature (1)..(203): Homolog of NCBI NO: 12846635 NR Description: unnamed protein product [Mus musculus]
  misc_feature (1)..(203): Homolog of NCBI NO: 4507237 NR Description: signal sequence receptor, alpha; TRAP alpha [Homo
  misc_feature (1)..(203): Homolog of NCBI NO: 34783867 NR Description: Unknown (protein for MGC:64448) [Xenopus laevis]
  misc_feature (1)..(203): Homolog of NCBI NO: 31982666 NR Description: signal sequence receptor, alpha
  misc_feature (1)..(203): Homolog of NCBI NO: 34875232 NR Description: similar to Ac2-238 [Rattus norvegicus]
  misc_feature (71)..(202): Homolog of NCBI NO: 15227250 NR Description: putative TRAP protein; protein id: At2g16595.1
  misc_feature (1)..(203): Homolog of NCBI NO: 547391 NR Description: alpha-subunit; putative
  misc_feature (1)..(203): Homolog of NCBI NO: 25335776 NR Description: hypothetical protein At2g21160 [imported] -
  misc_feature (1)..(203): Homolog of NCBI NO: 18399609 NR Description: putative signal sequence receptor, alpha subunit
  misc_feature (1)..(203): Homolog of NCBI NO: 21555380 NR Description: putative signal sequence receptor, alpha subunit
MNLSSFPGVETVCVFPKNSAKLVPAGEETELLVGLKNEGKTRVGVMGIRASVHLPYDHKLLVQNLTMLRLNNASIPTSLQATFPYIFAVSQYLQPGAFDLVGYIIYDVEGKPYQSVFYNGTIEVVESGGLLSGESVFLLTLGIGLLLLLGLWAYSQVQRLTKKTKKVSKVEVGTRSTDASLDEWLEGTTLAKTSSGKTKNKKN

SEQ ID NO: 25513 - DNA, 1081 bp, Arabidopsis thaliana; identical to SEQ ID NO: 25379
  misc_feature (1)..(1081): Ceres Seq. ID no. 12322213
  misc_feature: MA Experiment ID: 108579 Result: Down-regulated in Transcription
  misc_feature: MA Experiment 108579 PARAMETER Experiment Name: At_4deg_Cold_cDNA_P Parameter: Temperature (deg C) Value: 4 vs. 22
  misc_feature: MA Experiment 108579 PARAMETER Experiment Name: At_4deg_Cold_cDNA_P Parameter: Timepoint (hr) Value: 6
  misc_feature: MA Experiment 108579 PARAMETER Experiment Name: At_4deg_Cold_cDNA_P Parameter: Tissue Value: Aerial
  misc_feature: MA Experiment ID: 20000180 Result: Up-regulated in Transcription
  misc_feature: MA Experiment 20000180 PARAMETER Experiment Name: At_Germinating_Seeds_P Parameter: Age (hr) Value: 24 vs. 0
  misc_feature: MA Experiment 20000180 PARAMETER Experiment Name: At_Germinating_Seeds_P Parameter: Tissue Value: Germinating Seeds
  misc_feature: MA Experiment ID: 20000437 Result: Down-regulated in Transcription
  misc_feature: MA Experiment 20000437 PARAMETER Experiment Name: At_Drought_P Parameter: Age (day) Value: 8
  misc_feature: MA Experiment 20000437 PARAMETER Experiment Name: At_Drought_P Parameter: Organism Value: A. thaliana
  misc_feature: MA Experiment 20000437 PARAMETER Experiment Name: At_Drought_P Parameter: Plant Line Value: WS
  misc_feature: MA Experiment 20000437 PARAMETER Experiment Name: At_Drought_P Parameter: Timepoint (hr) Value: 24
  misc_feature: MA Experiment 20000437 PARAMETER Experiment Name: At_Drought_P Parameter: Tissue Value: Whole Plant
  misc_feature: MA Experiment 20000437 PARAMETER Experiment Name: At_Drought_P Parameter: Treatment Value: Drought vs. No Drought

SEQ ID NO: 25514 - protein, 229 aa, Arabidopsis thaliana; identical to SEQ ID NO: 25380
  peptide (1)..(229): Ceres Seq. ID no. 12322214
  misc_feature (1)..(106): Pfam Name: NAD binding domain of 6-phosphogluconate dehydrogenase Pfam Description: NAD binding domain of 6-phosphogluconate
  misc_feature (1)..(106): Pfam Name: NAD binding domain of 6-phosphogluconate dehydrogenase Pfam Description: NAD binding domain of 6-phosphogluconate
  misc_feature (1)..(218): Homolog of NCBI NO: 16078460 NR Description: similar to 3-hydroxyisobutyrate dehydrogenase
  misc_feature (1)..(225): Homolog of NCBI NO: 15898379 NR Description: Oxidoreductase [Sulfolobus solfataricus]
  misc_feature (1)..(218): Homolog of NCBI NO: 15896585 NR Description: Dehydrogenase related to 3-hydroxyisobutyrate
  misc_feature (1)..(216): Homolog of NCBI NO: 30022129 NR Description: 3-hydroxyisobutyrate dehydrogenase [Bacillus
  misc_feature (1)..(228): Homolog of NCBI NO: 32472744 NR Description: 3-hydroxyisobutyrate dehydrogenase [Pirellula
  misc_feature (1)..(218): Homolog of NCBI NO: 16078460 NR Description: similar to 3-hydroxyisobutyrate dehydrogenase
  misc_feature (1)..(218): Homolog of NCBI NO: 15896585 NR Description: Dehydrogenase related to 3-hydroxyisobutyrate
  misc_feature (1)..(228): Homolog of NCBI NO: 32472744 NR Description: 3-hydroxyisobutyrate dehydrogenase [Pirellula
  misc_feature (1)..(229): Homolog of NCBI NO: 18409781 NR Description: putative dehydrogenase
  misc_feature (1)..(229): Homolog of NCBI NO: 25283629 NR Description: probable dehydrogenase F23N20.17
  misc_feature (1)..(229): Homolog of NCBI NO: 30698779 NR Description: dehydrogenase -related [Arabidopsis thaliana]
  misc_feature (1)..(226): Homolog of NCBI NO: 34909392 NR Description: putative dehydrogenase [Oryza sativa (japonica
  misc_feature (1)..(229): Homolog of NCBI NO: 15233455 NR Description: putative protein
  misc_feature (1)..(216): Homolog of NCBI NO: 30022129 NR Description: 3-hydroxyisobutyrate dehydrogenase [Bacillus
  misc_feature (1)..(225): Homolog of NCBI NO: 15898379 NR Description: Oxidoreductase [Sulfolobus solfataricus]
  misc_feature (1)..(229): Homolog of NCBI NO: 15233455 NR Description: putative protein
  misc_feature (1)..(226): Homolog of NCBI NO: 34909392 NR Description: putative dehydrogenase [Oryza sativa (japonica
  misc_feature (1)..(229): Homolog of NCBI NO: 30698779 NR Description: dehydrogenase -related [Arabidopsis thaliana]
  misc_feature (1)..(229): Homolog of NCBI NO: 25283629 NR Description: probable dehydrogenase F23N20.17
  misc_feature (1)..(229): Homolog of NCBI NO: 18409781 NR Description: putative dehydrogenase

SEQ ID NO: 25515 - protein, 192 aa, Arabidopsis thaliana; identical to SEQ ID NO: 25381
  peptide (1)..(192): Ceres Seq. ID no. 12322215
  misc_feature (1)..(69): Pfam Name: NAD binding domain of 6-phosphogluconate dehydrogenase Pfam Description: NAD binding domain of 6-phosphogluconate
  misc_feature (1)..(69): Pfam Name: NAD binding domain of 6-phosphogluconate dehydrogenase Pfam Description: NAD binding domain of 6-phosphogluconate
  misc_feature (1)..(181): Homolog of NCBI NO: 16078460 NR Description: similar to 3-hydroxyisobutyrate dehydrogenase
  misc_feature (1)..(188): Homolog of NCBI NO: 15898379 NR Description: Oxidoreductase [Sulfolobus solfataricus]
  misc_feature (1)..(181): Homolog of NCBI NO: 15896585 NR Description: Dehydrogenase related to 3-hydroxyisobutyrate
  misc_feature (1)..(179): Homolog of NCBI NO: 30022129 NR Description: 3-hydroxyisobutyrate dehydrogenase [Bacillus
  misc_feature (1)..(191): Homolog of NCBI NO: 32472744 NR Description: 3-hydroxyisobutyrate dehydrogenase [Pirellula
  misc_feature (1)..(181): Homolog of NCBI NO: 16078460 NR Description: similar to 3-hydroxyisobutyrate dehydrogenase
  misc_feature (1)..(181): Homolog of NCBI NO: 15896585 NR Description: Dehydrogenase related to 3-hydroxyisobutyrate
  misc_feature (1)..(191): Homolog of NCBI NO: 32472744 NR Description: 3-hydroxyisobutyrate dehydrogenase [Pirellula
  misc_feature (1)..(192): Homolog of NCBI NO: 18409781 NR Description: putative dehydrogenase
  misc_feature (1)..(192): Homolog of NCBI NO: 25283629 NR Description: probable dehydrogenase F23N20.17
  misc_feature (1)..(192): Homolog of NCBI NO: 30698779 NR Description: dehydrogenase -related [Arabidopsis thaliana]
  misc_feature (1)..(189): Homolog of NCBI NO: 34909392 NR Description: putative dehydrogenase [Oryza sativa (japonica
  misc_feature (1)..(192): Homolog of NCBI NO: 15233455 NR Description: putative protein
  misc_feature (1)..(179): Homolog of NCBI NO: 30022129 NR Description: 3-hydroxyisobutyrate dehydrogenase [Bacillus
  misc_feature (1)..(188): Homolog of NCBI NO: 15898379 NR Description: Oxidoreductase [Sulfolobus solfataricus]
  misc_feature (1)..(192): Homolog of NCBI NO: 15233455 NR Description: putative protein
  misc_feature (1)..(189): Homolog of NCBI NO: 34909392 NR Description: putative dehydrogenase [Oryza sativa (japonica
  misc_feature (1)..(192): Homolog of NCBI NO: 30698779 NR Description: dehydrogenase -related [Arabidopsis thaliana]
  misc_feature (1)..(192): Homolog of NCBI NO: 25283629 NR Description: probable dehydrogenase F23N20.17
  misc_feature (1)..(192): Homolog of NCBI NO: 18409781 NR Description: putative dehydrogenase

SEQ ID NO: 25516 - protein, 135 aa, Arabidopsis thaliana; identical to SEQ ID NO: 25382
  peptide (1)..(135): Ceres Seq. ID no. 12322216
  misc_feature (1)..(124): Homolog of NCBI NO: 16078460 NR Description: similar to 3-hydroxyisobutyrate dehydrogenase
  misc_feature (1)..(131): Homolog of NCBI NO: 15898379 NR Description: Oxidoreductase [Sulfolobus solfataricus]
  misc_feature (1)..(124): Homolog of NCBI NO: 15896585 NR Description: Dehydrogenase related to 3-hydroxyisobutyrate
  misc_feature (1)..(122): Homolog of NCBI NO: 30022129 NR Description: 3-hydroxyisobutyrate dehydrogenase [Bacillus
  misc_feature (1)..(134): Homolog of NCBI NO: 32472744 NR Description: 3-hydroxyisobutyrate dehydrogenase [Pirellula
  misc_feature (1)..(135): Homolog of NCBI NO: 15233455 NR Description: putative protein
  misc_feature (1)..(132): Homolog of NCBI NO: 34909392 NR Description: putative dehydrogenase [Oryza sativa (japonica
  misc_feature (1)..(135): Homolog of NCBI NO: 30698779 NR Description: dehydrogenase -related [Arabidopsis thaliana]
  misc_feature (1)..(135): Homolog of NCBI NO: 25283629 NR Description: probable dehydrogenase F23N20.17
  misc_feature (1)..(135): Homolog of NCBI NO: 18409781 NR Description: putative dehydrogenase
  misc_feature (1)..(124): Homolog of NCBI NO: 16078460 NR Description: similar to 3-hydroxyisobutyrate dehydrogenase
  misc_feature (1)..(131): Homolog of NCBI NO: 15898379 NR Description: Oxidoreductase [Sulfolobus solfataricus]
  misc_feature (1)..(124): Homolog of NCBI NO: 15896585 NR Description: Dehydrogenase related to 3-hydroxyisobutyrate
  misc_feature (1)..(122): Homolog of NCBI NO: 30022129 NR Description: 3-hydroxyisobutyrate dehydrogenase [Bacillus
  misc_feature (1)..(134): Homolog of NCBI NO: 32472744 NR Description: 3-hydroxyisobutyrate dehydrogenase [Pirellula
  misc_feature (1)..(135): Homolog of NCBI NO: 15233455 NR Description: putative protein
  misc_feature (1)..(132): Homolog of NCBI NO: 34909392 NR Description: putative dehydrogenase [Oryza sativa (japonica
  misc_feature (1)..(135): Homolog of NCBI NO: 30698779 NR Description: dehydrogenase -related [Arabidopsis thaliana]
  misc_feature (1)..(135): Homolog of NCBI NO: 25283629 NR Description: probable dehydrogenase F23N20.17
  misc_feature (1)..(135): Homolog of NCBI NO: 18409781 NR Description: putative dehydrogenase

SEQ ID NO: 25517 - DNA, 1159 bp, Arabidopsis thaliana
  misc_feature (1)..(1159): Ceres Seq. ID no. 12337951
  misc_feature: MA Experiment ID: 108561 Result: Down-regulated in Transcription
  misc_feature: MA Experiment 108561 PARAMETER Experiment Name: At_100uM_ABA_cDNA_P Parameter: Timepoint (hr) Value: 6
  misc_feature: MA Experiment 108561 PARAMETER Experiment Name: At_100uM_ABA_cDNA_P Parameter: Tissue Value: Aerial
  misc_feature: MA Experiment 108561 PARAMETER Experiment Name: At_100uM_ABA_cDNA_P Parameter: Treatment Value: 100uM ABA vs. No Treatment
  misc_feature: MA Experiment ID: 108573 Result: Down-regulated in Transcription
  misc_feature: MA Experiment 108573 PARAMETER Experiment Name: At_Drought_cDNA_P Parameter: Timepoint (hr) Value: 6
  misc_feature: MA Experiment 108573 PARAMETER Experiment Name: At_Drought_cDNA_P Parameter: Tissue Value: Aerial
  misc_feature: MA Experiment 108573 PARAMETER Experiment Name: At_Drought_cDNA_P Parameter: Treatment Value: Drought vs. No Drought
  misc_feature: MA Experiment ID: 108585 Result: Up-regulated in Transcription
  misc_feature: MA Experiment 108585 PARAMETER Experiment Name: At_5mM_NaNP_cDNA_P Parameter: Timepoint (hr) Value: 6
  misc_feature: MA Experiment 108585 PARAMETER Experiment Name: At_5mM_NaNP_cDNA_P Parameter: Tissue Value: Aerial
  misc_feature: MA Experiment 108585 PARAMETER Experiment Name: At_5mM_NaNP_cDNA_P Parameter: Treatment Value: null
  misc_feature: MA Experiment ID: 108595 Result: Down-regulated in Transcription
  misc_feature: MA Experiment 108595 PARAMETER Experiment Name: At_Ler-pi_Ovule_cDNA_P Parameter: Plant Line Value: null
  misc_feature: MA Experiment ID: 20000184 Result: Up-regulated in Transcription
  misc_feature: MA Experiment 20000184 PARAMETER Experiment Name: At_Shoots__P Parameter: Age (day) Value: 7
  misc_feature: MA Experiment 20000184 PARAMETER Experiment Name: At_Shoots__P Parameter: Tissue Value: Shoots vs. Whole Plant
  misc_feature: MA Experiment ID: 20000234 Result: Up-regulated in Transcription
  misc_feature: MA Experiment 20000234 PARAMETER Experiment Name: At_Siliques_P Parameter: Age (day) Value: 21
  misc_feature: MA Experiment 20000234 PARAMETER Experiment Name: At_Siliques_P Parameter: Organism Value: A. thaliana
  misc_feature: MA Experiment 20000234 PARAMETER Experiment Name: At_Siliques_P Parameter: Plant Line Value: WS
  misc_feature: MA Experiment 20000234 PARAMETER Experiment Name: At_Siliques_P Parameter: Tissue Value: Less Than 5mm Siliques vs. Whole Plant
  misc_feature: MA Experiment ID: 20000264 Result: Up-regulated in Transcription
  misc_feature: MA Experiment 20000264 PARAMETER Experiment Name: At_Open_Flower_P Parameter: Age (day) Value: 21
  misc_feature: MA Experiment 20000264 PARAMETER Experiment Name: At_Open_Flower_P Parameter: Plant Line Value: WS
  misc_feature: MA Experiment 20000264 PARAMETER Experiment Name: At_Open_Flower_P Parameter: Tissue Value: Open Flower vs. Whole Plant
  misc_feature: MA Experiment ID: 20000286 Result: Up-regulated in Transcription
  misc_feature: MA Experiment 20000286 PARAMETER Experiment Name: At_Open_Flower_P Parameter: Age (day) Value: 21
  misc_feature: MA Experiment 20000286 PARAMETER Experiment Name: At_Open_Flower_P Parameter: Plant Line Value: WS
  misc_feature: MA Experiment 20000286 PARAMETER Experiment Name: At_Open_Flower_P Parameter: Tissue Value: Half Open vs. Whole Plant
  misc_feature: MA Experiment ID: 20000437 Result: Down-regulated in Transcription
  misc_feature: MA Experiment 20000437 PARAMETER Experiment Name: At_Drought_P Parameter: Age (day) Value: 8
  misc_feature: MA Experiment 20000437 PARAMETER Experiment Name: At_Drought_P Parameter: Organism Value: A. thaliana
  misc_feature: MA Experiment 20000437 PARAMETER Experiment Name: At_Drought_P Parameter: Plant Line Value: WS
  misc_feature: MA Experiment 20000437 PARAMETER Experiment Name: At_Drought_P Parameter: Timepoint (hr) Value: 24
  misc_feature: MA Experiment 20000437 PARAMETER Experiment Name: At_Drought_P Parameter: Tissue Value: Whole Plant
  misc_feature: MA Experiment 20000437 PARAMETER Experiment Name: At_Drought_P Parameter: Treatment Value: Drought vs. No Drought
  misc_feature: MA Experiment ID: 20000445 Result: Down-regulated in Transcription
  misc_feature: MA Experiment 20000445 PARAMETER Experiment Name: At_100uM_NAA__P Parameter: Age (day) Value: 14
  misc_feature: MA Experiment 20000445 PARAMETER Experiment Name: At_100uM_NAA__P Parameter: Organism Value: A. thaliana
  misc_feature: MA Experiment 20000445 PARAMETER Experiment Name: At_100uM_NAA__P Parameter: Plant Line Value: WS
  misc_feature: MA Experiment 20000445 PARAMETER Experiment Name: At_100uM_NAA__P Parameter: Timepoint (hr) Value: 6
  misc_feature: MA Experiment 20000445 PARAMETER Experiment Name: At_100uM_NAA__P Parameter: Tissue Value: Aerial
  misc_feature: MA Experiment 20000445 PARAMETER Experiment Name: At_100uM_NAA__P Parameter: Treatment Value: 100uM NAA vs. No Treatment
  misc_feature: MA Experiment ID: 20000460 Result: Up-regulated in Transcription
  misc_feature: MA Experiment 20000460 PARAMETER Experiment Name: At_10percent_PEG_P Parameter: Age (day) Value: 12
  misc_feature: MA Experiment 20000460 PARAMETER Experiment Name: At_10percent_PEG_P Parameter: Organism Value: A. thaliana
  misc_feature: MA Experiment 20000460 PARAMETER Experiment Name: At_10percent_PEG_P Parameter: Plant Line Value: WS
  misc_feature: MA Experiment 20000460 PARAMETER Experiment Name: At_10percent_PEG_P Parameter: Timepoint (day) Value: 12
  misc_feature: MA Experiment 20000460 PARAMETER Experiment Name: At_10percent_PEG_P Parameter: Tissue Value: Whole Plant
  misc_feature: MA Experiment 20000460 PARAMETER Experiment Name: At_10percent_PEG_P Parameter: Treatment Value: 10percent PEG vs. No Treatment
  misc_feature: MA Experiment ID: 20000527 Result: Up-regulated in Transcription
  misc_feature: MA Experiment 20000527 PARAMETER Experiment Name: At_10percent_PEG_P Parameter: Age (day) Value: 20
  misc_feature: MA Experiment 20000527 PARAMETER Experiment Name: At_10percent_PEG_P Parameter: Organism Value: A. thaliana
  misc_feature: MA Experiment 20000527 PARAMETER Experiment Name: At_10percent_PEG_P Parameter: Plant Line Value: WS
  misc_feature: MA Experiment 20000527 PARAMETER Experiment Name: At_10percent_PEG_P Parameter: Timepoint (day) Value: 20
  misc_feature: MA Experiment 20000527 PARAMETER Experiment Name: At_10percent_PEG_P Parameter: Tissue Value: Whole Plant
  misc_feature: MA Experiment 20000527 PARAMETER Experiment Name: At_10percent_PEG_P Parameter: Treatment Value: 10percent PEG vs. No Treatment
  misc_feature: MA Experiment ID: 20001248 Result: Down-regulated in Transcription
  misc_feature: MA Experiment 20001248 PARAMETER Experiment Name: At_Far-red-induction_P Parameter: Age (day) Value: 7
  misc_feature: MA Experiment 20001248 PARAMETER Experiment Name: At_Far-red-induction_P Parameter: Light Value: Far-red vs. White
  misc_feature: MA Experiment 20001248 PARAMETER Experiment Name: At_Far-red-induction_P Parameter: Organism Value: A. thaliana
  misc_feature: MA Experiment 20001248 PARAMETER Experiment Name: At_Far-red-induction_P Parameter: Plant Line Value: Columbia
  misc_feature: MA Experiment 20001248 PARAMETER Experiment Name: At_Far-red-induction_P Parameter: Timepoint (hr) Value: 4
  misc_feature: MA Experiment 20001248 PARAMETER Experiment Name: At_Far-red-induction_P Parameter: Tissue Value: Whole Plant
  misc_feature: MA Experiment ID: 20001450 Result: Down-regulated in Transcription
  misc_feature: MA Experiment 20001450 PARAMETER Experiment Name: At_Far-red-induction_P Parameter: Age (day) Value: 7
  misc_feature: MA Experiment 20001450 PARAMETER Experiment Name: At_Far-red-induction_P Parameter: Light Value: Far-red vs. White
  misc_feature: MA Experiment 20001450 PARAMETER Experiment Name: At_Far-red-induction_P Parameter: Organism Value: A. thaliana
  misc_feature: MA Experiment 20001450 PARAMETER Experiment Name: At_Far-red-induction_P Parameter: Plant Line Value: Columbia
  misc_feature: MA Experiment 20001450 PARAMETER Experiment Name: At_Far-red-induction_P Parameter: Timepoint (hr) Value: 8
  misc_feature: MA Experiment 20001450 PARAMETER Experiment Name: At_Far-red-induction_P Parameter: Tissue Value: Whole Plant
  misc_feature: MA Experiment ID: 20001451 Result: Down-regulated in Transcription
  misc_feature: MA Experiment 20001451 PARAMETER Experiment Name: At_Far-red-induction_P Parameter: Age (day) Value: 7
  misc_feature: MA Experiment 20001451 PARAMETER Experiment Name: At_Far-red-induction_P Parameter: Light Value: Far-red vs. White
  misc_feature: MA Experiment 20001451 PARAMETER Experiment Name: At_Far-red-induction_P Parameter: Organism Value: A. thaliana
  misc_feature: MA Experiment 20001451 PARAMETER Experiment Name: At_Far-red-induction_P Parameter: Plant Line Value: Columbia
  misc_feature: MA Experiment 20001451 PARAMETER Experiment Name: At_Far-red-induction_P Parameter: Timepoint (hr) Value: 24
  misc_feature: MA Experiment 20001451 PARAMETER Experiment Name: At_Far-red-induction_P Parameter: Tissue Value: Whole Plant
  misc_feature: MA Experiment ID: 20001554 Result: Down-regulated in Transcription
  misc_feature: MA Experiment 20001554 PARAMETER Experiment Name: At_Drought_Soil_Dry_P Parameter: Age (day) Value: 21
  misc_feature: MA Experiment 20001554 PARAMETER Experiment Name: At_Drought_Soil_Dry_P Parameter: Organism Value: A. thaliana
  misc_feature: MA Experiment 20001554 PARAMETER Experiment Name: At_Drought_Soil_Dry_P Parameter: Plant Line Value: WS
  misc_feature: MA Experiment 20001554 PARAMETER Experiment Name: At_Drought_Soil_Dry_P Parameter: Post Timepoint (hr) Value: None
  misc_feature: MA Experiment 20001554 PARAMETER Experiment Name: At_Drought_Soil_Dry_P Parameter: Post-Treatment Value: None
  misc_feature: MA Experiment 20001554 PARAMETER Experiment Name: At_Drought_Soil_Dry_P Parameter: Timepoint (day) Value: 7
  misc_feature: MA Experiment 20001554 PARAMETER Experiment Name: At_Drought_Soil_Dry_P Parameter: Treatment Value: Drought vs. No Drought
  misc_feature: MA Experiment ID: 20001555 Result: Down-regulated in Transcription
  misc_feature: MA Experiment 20001555 PARAMETER Experiment Name: At_Drought_Soil_Dry_P Parameter: Age (day) Value: 24
  misc_feature: MA Experiment 20001555 PARAMETER Experiment Name: At_Drought_Soil_Dry_P Parameter: Organism Value: A. thaliana
  misc_feature: MA Experiment 20001555 PARAMETER Experiment Name: At_Drought_Soil_Dry_P Parameter: Plant Line Value: WS
  misc_feature: MA Experiment 20001555 PARAMETER Experiment Name: At_Drought_Soil_Dry_P Parameter: Post Timepoint (hr) Value: None
  misc_feature: MA Experiment 20001555 PARAMETER Experiment Name: At_Drought_Soil_Dry_P Parameter: Post-Treatment Value: None
  misc_feature: MA Experiment 20001555 PARAMETER Experiment Name: At_Drought_Soil_Dry_P Parameter: Timepoint (day) Value: 10
  misc_feature: MA Experiment 20001555 PARAMETER Experiment Name: At_Drought_Soil_Dry_P Parameter: Treatment Value: Drought vs. No Drought
  misc_feature: MA Experiment ID: 20001556 Result: Down-regulated in Transcription
  misc_feature: MA Experiment 20001556 PARAMETER Experiment Name: At_Drought_Soil_Dry_P Parameter: Age (day) Value: 26
  misc_feature: MA Experiment 20001556 PARAMETER Experiment Name: At_Drought_Soil_Dry_P Parameter: Organism Value: A. thaliana
  misc_feature: MA Experiment 20001556 PARAMETER Experiment Name: At_Drought_Soil_Dry_P Parameter: Plant Line Value: WS
  misc_feature: MA Experiment 20001556 PARAMETER Experiment Name: At_Drought_Soil_Dry_P Parameter: Post Timepoint (hr) Value: None
  misc_feature: MA Experiment 20001556 PARAMETER Experiment Name: At_Drought_Soil_Dry_P Parameter: Post-Treatment Value: None
  misc_feature: MA Experiment 20001556 PARAMETER Experiment Name: At_Drought_Soil_Dry_P Parameter: Timepoint (day) Value: 12
  misc_feature: MA Experiment 20001556 PARAMETER Experiment Name: At_Drought_Soil_Dry_P Parameter: Treatment Value: Drought vs. No Drought
  misc_feature: MA Experiment ID: 20001557 Result: Down-regulated in Transcription
  misc_feature: MA Experiment 20001557 PARAMETER Experiment Name: At_Drought_Soil_Dry_P Parameter: Age (day) Value: 27
  misc_feature: MA Experiment 20001557 PARAMETER Experiment Name: At_Drought_Soil_Dry_P Parameter: Organism Value: A. thaliana
  misc_feature: MA Experiment 20001557 PARAMETER Experiment Name: At_Drought_Soil_Dry_P Parameter: Plant Line Value: WS
  misc_feature: MA Experiment 20001557 PARAMETER Experiment Name: At_Drought_Soil_Dry_P Parameter: Post Timepoint (hr) Value: 3
  misc_feature: MA Experiment 20001557 PARAMETER Experiment Name: At_Drought_Soil_Dry_P Parameter: Post-Treatment Value: Re-Water vs. No Drought
  misc_feature: MA Experiment 20001557 PARAMETER Experiment Name: At_Drought_Soil_Dry_P Parameter: Timepoint (day) Value: 13
  misc_feature: MA Experiment 20001557 PARAMETER Experiment Name: At_Drought_Soil_Dry_P Parameter: Treatment Value: Drought vs. No Drought
  misc_feature: MA Experiment ID: 20001558 Result: Down-regulated in Transcription
  misc_feature: MA Experiment 20001558 PARAMETER Experiment Name: At_Drought_Soil_Dry_P Parameter: Age (day) Value: 27
  misc_feature: MA Experiment 20001558 PARAMETER Experiment Name: At_Drought_Soil_Dry_P Parameter: Organism Value: A. thaliana
  misc_feature: MA Experiment 20001558 PARAMETER Experiment Name: At_Drought_Soil_Dry_P Parameter: Plant Line Value: WS
  misc_feature: MA Experiment 20001558 PARAMETER Experiment Name: At_Drought_Soil_Dry_P Parameter: Post Timepoint (hr) Value: 6
  misc_feature: MA Experiment 20001558 PARAMETER Experiment Name: At_Drought_Soil_Dry_P Parameter: Post-Treatment Value: Re-Water vs. No Drought
  misc_feature: MA Experiment 20001558 PARAMETER Experiment Name: At_Drought_Soil_Dry_P Parameter: Timepoint (day) Value: 13
  misc_feature: MA Experiment 20001558 PARAMETER Experiment Name: At_Drought_Soil_Dry_P Parameter: Treatment Value: Drought vs. No Drought
  misc_feature: MA Experiment ID: 20001559 Result: Down-regulated in Transcription
  misc_feature: MA Experiment 20001559 PARAMETER Experiment Name: At_Drought_Soil_Dry_P Parameter: Age (day) Value: 28
  misc_feature: MA Experiment 20001559 PARAMETER Experiment Name: At_Drought_Soil_Dry_P Parameter: Organism Value: A. thaliana
  misc_feature: MA Experiment 20001559 PARAMETER Experiment Name: At_Drought_Soil_Dry_P Parameter: Plant Line Value: WS
  misc_feature: MA Experiment 20001559 PARAMETER Experiment Name: At_Drought_Soil_Dry_P Parameter: Post Timepoint (hr) Value: 29
  misc_feature: MA Experiment 20001559 PARAMETER Experiment Name: At_Drought_Soil_Dry_P Parameter: Post-Treatment Value: Re-Water vs. No Drought
  misc_feature: MA Experiment 20001559 PARAMETER Experiment Name: At_Drought_Soil_Dry_P Parameter: Timepoint (day) Value: 14
  misc_feature: MA Experiment 20001559 PARAMETER Experiment Name: At_Drought_Soil_Dry_P Parameter: Treatment Value: Drought vs. No Drought
  misc_feature: MA Experiment ID: 20001560 Result: Up-regulated in Transcription
  misc_feature: MA Experiment 20001560 PARAMETER Experiment Name: At_Drought_Soil_Dry_P Parameter: Age (day) Value: 28
  misc_feature: MA Experiment 20001560 PARAMETER Experiment Name: At_Drought_Soil_Dry_P Parameter: Organism Value: A. thaliana
  misc_feature: MA Experiment 20001560 PARAMETER Experiment Name: At_Drought_Soil_Dry_P Parameter: Plant Line Value: WS
  misc_feature: MA Experiment 20001560 PARAMETER Experiment Name: At_Drought_Soil_Dry_P Parameter: Post Timepoint (hr) Value: None
  misc_feature: MA Experiment 20001560 PARAMETER Experiment Name: At_Drought_Soil_Dry_P Parameter: Post-Treatment Value: None
  misc_feature: MA Experiment 20001560 PARAMETER Experiment Name: At_Drought_Soil_Dry_P Parameter: Timepoint (day) Value: 14
  misc_feature: MA Experiment 20001560 PARAMETER Experiment Name: At_Drought_Soil_Dry_P Parameter: Treatment Value: Drought vs. No Drought
aaaatcaaacaatctcttcaatcaaatctcttcttcaatcaaatcttcaaatcccttcaaagatgccttcaatgccagaagagccgctcctaacaccaaccccagacagattctgtatgttcccaattcactacccacagatctgggaaatgtacaaaaaagccgaagcatcattctggaccgccgaagaagtagatctatcacaagacaaccgcgactgggaaaacagtctcaacgacggtgaacgtcacttcatcaaacacgtcctcgctttcttcgctgcatctgacggaatcgtactagagaatctcgcttctcgcttcatgtccgatgttcaagtctcggaggcgcgtgctttctacggtttccagatcgcgattgaaaacatccactcggagatgtatagtctccttctcgatacttatatcaaagataacaaagagagagatcatctctttcgtgccattgaaacaatcccttgcgtcgccaagaaagctcaatgggctatgaaatggatcgacggttctcagactttcgccgaacgaatcatcgctttcgcttgcgtcgaaggtatcttcttctccggaagcttttgttcaatcttctggctgaagaaacggggactcatgcctggattaacattctcaaacgaattgatctctcgtgacgaaggtttacactgcgacttcgcttgtctactctacacgctactcaaaacaaagcttagcgaagaacgcgtgaaatcaatcgtctgcgacgcggtcgaaatcgagagagagtttgtgtgcgacgcgcttccgtgcgcgttggttgggatgaaccgtgatttgatgagtcagtatattgagtttgttgcggataggcttttgggtgcgcttgggtacgggaaggtgtacggtgttactaatccgtttgattggatggaacttatttcgcttcaagggaaaacgaatttcttcgagaaacgtgttggtgattaccaaaaggcttccgttatgtctagcgttaatggtaacggcgcgtttgataaccatgtcttctctctcgacgaagatttttaaagagcgtttgttttgatgctataattacgattctactcttgtattattaccgtgtattatccttggtttttgaattaatgaataattagttgctttcc

SEQ ID NO: 25518 - protein, 352 aa, Arabidopsis thaliana
  peptide (1)..(352): Ceres Seq. ID no. 12337952
  misc_feature (27)..(308): Pfam Name: Ribonucleotide reductase, small chain Pfam Description: Ribonucleotide reductase, small chain
  misc_feature (26)..(352): Homolog of NCBI NO: 34898038 NR Description: putative ribonucleoside-diphosphate reductase
  misc_feature (21)..(352): Homolog of NCBI NO: 1710401 NR Description: RIBONUCLEOSIDE-DIPHOSPHATE REDUCTASE SMALL CHAIN
  misc_feature (21)..(352): Homolog of NCBI NO: 15232077 NR Description: ribonucleotide reductase small subunit, putative
NQTISSIKSLLQSNLQIPSKMPSMPEEPLLTPTPDRFCMFPIHYPQIWEMYKKAEASFWTAEEVDLSQDNRDWENSLNDGERHFIKHVLAFFAASDGIVLENLASRFMSDVQVSEARAFYGFQIAIENIHSEMYSLLLDTYIKDNKERDHLFRAIETIPCVAKKAQWAMKWIDGSQTFAERIIAFACVEGIFFSGSFCSIFWLKKRGLMPGLTFSNELISRDEGLHCDFACLLYTLLKTKLSEERVKSIVCDAVEIEREFVCDALPCALVGMNRDLMSQYIEFVADRLLGALGYGKVYGVTNPFDWMELISLQGKTNFFEKRVGDYQKASVMSSVNGNGAFDNHVFSLDEDF

SEQ ID NO: 25519 - protein, 332 aa, Arabidopsis thaliana
  peptide (1)..(332): Ceres Seq. ID no. 12337953
  misc_feature (7)..(288): Pfam Name: Ribonucleotide reductase, small chain Pfam Description: Ribonucleotide reductase, small chain
  misc_feature (1)..(332): Homolog of NCBI NO: 1710401 NR Description: RIBONUCLEOSIDE-DIPHOSPHATE REDUCTASE SMALL CHAIN
  misc_feature (6)..(332): Homolog of NCBI NO: 34898038 NR Description: putative ribonucleoside-diphosphate reductase
  misc_feature (1)..(332): Homolog of NCBI NO: 15232077 NR Description: ribonucleotide reductase small subunit, putative
MPSMPEEPLLTPTPDRFCMFPIHYPQIWEMYKKAEASFWTAEEVDLSQDNRDWENSLNDGERHFIKHVLAFFAASDGIVLENLASRFMSDVQVSEARAFYGFQIAIENIHSEMYSLLLDTYIKDNKERDHLFRAIETIPCVAKKAQWAMKWIDGSQTFAERIIAFACVEGIFFSGSFCSIFWLKKRGLMPGLTFSNELISRDEGLHCDFACLLYTLLKTKLSEERVKSIVCDAVEIEREFVCDALPCALVGMNRDLMSQYIEFVADRLLGALGYGKVYGVTNPFDWMELISLQGKTNFFEKRVGDYQKASVMSSVNGNGAFDNHVFSLDEDF

SEQ ID NO: 25520 - protein, 329 aa, Arabidopsis thaliana
  peptide (1)..(329): Ceres Seq. ID no. 12337954
  misc_feature (4)..(285): Pfam Name: Ribonucleotide reductase, small chain Pfam Description: Ribonucleotide reductase, small chain
  misc_feature (3)..(329): Homolog of NCBI NO: 34898038 NR Description: putative ribonucleoside-diphosphate reductase
  misc_feature (1)..(329): Homolog of NCBI NO: 1710401 NR Description: RIBONUCLEOSIDE-DIPHOSPHATE REDUCTASE SMALL CHAIN
  misc_feature (1)..(329): Homolog of NCBI NO: 15232077 NR Description: ribonucleotide reductase small subunit, putative
MPEEPLLTPTPDRFCMFPIHYPQIWEMYKKAEASFWTAEEVDLSQDNRDWENSLNDGERHFIKHVLAFFAASDGIVLENLASRFMSDVQVSEARAFYGFQIAIENIHSEMYSLLLDTYIKDNKERDHLFRAIETIPCVAKKAQWAMKWIDGSQTFAERIIAFACVEGIFFSGSFCSIFWLKKRGLMPGLTFSNELISRDEGLHCDFACLLYTLLKTKLSEERVKSIVCDAVEIEREFVCDALPCALVGMNRDLMSQYIEFVADRLLGALGYGKVYGVTNPFDWMELISLQGKTNFFEKRVGDYQKASVMSSVNGNGAFDNHVFSLDEDF

SEQ ID NO: 25521 - DNA, 1167 bp, Arabidopsis thaliana
  misc_feature (1)..(1167): Ceres Seq. ID no. 13495852
  misc_feature: MA Experiment ID: 108462 Result: Down-regulated in Transcription
  misc_feature: MA Experiment 108462 PARAMETER Experiment Name: At_Germinating_Seeds_cDNA_P Parameter: Age (day) Value: 2 vs. 0
  misc_feature: MA Experiment 108462 PARAMETER Experiment Name: At_Germinating_Seeds_cDNA_P Parameter: Tissue Value: Germinating Seeds
  misc_feature: MA Experiment ID: 108463 Result: Down-regulated in Transcription
  misc_feature: MA Experiment 108463 PARAMETER Experiment Name: At_Germinating_Seeds_cDNA_P Parameter: Age (day) Value: 3 vs. 0
  misc_feature: MA Experiment 108463 PARAMETER Experiment Name: At_Germinating_Seeds_cDNA_P Parameter: Tissue Value: Germinating Seeds
  misc_feature: MA Experiment ID: 108464 Result: Down-regulated in Transcription
  misc_feature: MA Experiment 108464 PARAMETER Experiment Name: At_Germinating_Seeds_cDNA_P Parameter: Age (day) Value: 4 vs. 0
  misc_feature: MA Experiment 108464 PARAMETER Experiment Name: At_Germinating_Seeds_cDNA_P Parameter: Tissue Value: Germinating Seeds
  misc_feature: MA Experiment ID: 108573 Result: Up-regulated in Transcription
  misc_feature: MA Experiment 108573 PARAMETER Experiment Name: At_Drought_cDNA_P Parameter: Timepoint (hr) Value: 6
  misc_feature: MA Experiment 108573 PARAMETER Experiment Name: At_Drought_cDNA_P Parameter: Tissue Value: Aerial
  misc_feature: MA Experiment 108573 PARAMETER Experiment Name: At_Drought_cDNA_P Parameter: Treatment Value: Drought vs. No Drought
  misc_feature: MA Experiment ID: 108595 Result: Down-regulated in Transcription
  misc_feature: MA Experiment 108595 PARAMETER Experiment Name: At_Ler-pi_Ovule_cDNA_P Parameter: Plant Line Value: null
  misc_feature: MA Experiment ID: 108668 Result: Up-regulated in Transcription
  misc_feature: MA Experiment 108668 PARAMETER Experiment Name: At_2mM_SA_cDNA_P Parameter: Plant Line Value: WS
  misc_feature: MA Experiment 108668 PARAMETER Experiment Name: At_2mM_SA_cDNA_P Parameter: Timepoint (hr) Value: 6
  misc_feature: MA Experiment 108668 PARAMETER Experiment Name: At_2mM_SA_cDNA_P Parameter: Treatment Value: 2mM SA vs. No Treatment
  misc_feature: MA Experiment ID: 20000182 Result: Up-regulated in Transcription
  misc_feature: MA Experiment 20000182 PARAMETER Experiment Name: At_2mM_SA_P Parameter: Age (day) Value: 14
  misc_feature: MA Experiment 20000182 PARAMETER Experiment Name: At_2mM_SA_P Parameter: Organism Value: A. thaliana
  misc_feature: MA Experiment 20000182 PARAMETER Experiment Name: At_2mM_SA_P Parameter: Plant Line Value: WS
  misc_feature: MA Experiment 20000182 PARAMETER Experiment Name: At_2mM_SA_P Parameter: Timepoint (hr) Value: 6
  misc_feature: MA Experiment 20000182 PARAMETER Experiment Name: At_2mM_SA_P Parameter: Tissue Value: Aerial
  misc_feature: MA Experiment 20000182 PARAMETER Experiment Name: At_2mM_SA_P Parameter: Treatment Value: 2mM SA vs. No Treatment
  misc_feature: MA Experiment ID: 20000184 Result: Down-regulated in Transcription
  misc_feature: MA Experiment 20000184 PARAMETER Experiment Name: At_Shoots__P Parameter: Age (day) Value: 7
  misc_feature: MA Experiment 20000184 PARAMETER Experiment Name: At_Shoots__P Parameter: Tissue Value: Shoots vs. Whole Plant
  misc_feature: MA Experiment ID: 20000227 Result: Down-regulated in Transcription
  misc_feature: MA Experiment 20000227 PARAMETER Experiment Name: At_Root-Tips-vs-Tops_P Parameter: Tissue Value: Root Tips vs. Root Tops
  misc_feature: MA Experiment ID: 20000437 Result: Up-regulated in Transcription
  misc_feature: MA Experiment 20000437 PARAMETER Experiment Name: At_Drought_P Parameter: Age (day) Value: 8
  misc_feature: MA Experiment 20000437 PARAMETER Experiment Name: At_Drought_P Parameter: Organism Value: A. thaliana
  misc_feature: MA Experiment 20000437 PARAMETER Experiment Name: At_Drought_P Parameter: Plant Line Value: WS
  misc_feature: MA Experiment 20000437 PARAMETER Experiment Name: At_Drought_P Parameter: Timepoint (hr) Value: 24
  misc_feature: MA Experiment 20000437 PARAMETER Experiment Name: At_Drought_P Parameter: Tissue Value: Whole Plant
  misc_feature: MA Experiment 20000437 PARAMETER Experiment Name: At_Drought_P Parameter: Treatment Value: Drought vs. No Drought
  misc_feature: MA Experiment ID: 20000438 Result: Down-regulated in Transcription
  misc_feature: MA Experiment 20000438 PARAMETER Experiment Name: At_Shoots__P Parameter: Age (day) Value: 14
  misc_feature: MA Experiment 20000438 PARAMETER Experiment Name: At_Shoots__P Parameter: Tissue Value: Shoots vs. Whole Plant
  misc_feature: MA Experiment ID: 20000794 Result: Up-regulated in Transcription
  misc_feature: MA Experiment 20000794 PARAMETER Experiment Name: At_Petals_P Parameter: Age (day) Value: 23-25 days
  misc_feature: MA Experiment 20000794 PARAMETER Experiment Name: At_Petals_P Parameter: Plant Line Value: WS
  misc_feature: MA Experiment 20000794 PARAMETER Experiment Name: At_Petals_P Parameter: Tissue Value: Petals vs. Whole plant
  misc_feature: MA Experiment ID: 20001557 Result: Up-regulated in Transcription
  misc_feature: MA Experiment 20001557 PARAMETER Experiment Name: At_Drought_Soil_Dry_P Parameter: Age (day) Value: 27
  misc_feature: MA Experiment 20001557 PARAMETER Experiment Name: At_Drought_Soil_Dry_P Parameter: Organism Value: A. thaliana
  misc_feature: MA Experiment 20001557 PARAMETER Experiment Name: At_Drought_Soil_Dry_P Parameter: Plant Line Value: WS
  misc_feature: MA Experiment 20001557 PARAMETER Experiment Name: At_Drought_Soil_Dry_P Parameter: Post Timepoint (hr) Value: 3
  misc_feature: MA Experiment 20001557 PARAMETER Experiment Name: At_Drought_Soil_Dry_P Parameter: Post-Treatment Value: Re-Water vs. No Drought
  misc_feature: MA Experiment 20001557 PARAMETER Experiment Name: At_Drought_Soil_Dry_P Parameter: Timepoint (day) Value: 13
  misc_feature: MA Experiment 20001557 PARAMETER Experiment Name: At_Drought_Soil_Dry_P Parameter: Treatment Value: Drought vs. No Drought
attcatcttttagctcttcagcgaatgttcgtctcgtctatttgctctctctcgacgactgttaattaactccggcgattgatcactccgtcttctttgtaacacagccggagaaaaatcgaaagtttcgtttttttcttctccttcgtagctaattcgcggtcgattttataattcggcagccatgagctcggttttgcagggttttacgaagtcacttgctatgacctttgtatcggagattggtgacaagacgtttttcgctgcagcaattttggctatgcgttatcctaggagacttgtgttggctggttgtttatcggctctgattgttatgactatcctctctgctactcttggatgggctgctcctaatctgatctctcgcaaatggactcatcacataacaacattgttgttctttggttttgggctatggtctttgtgggacggtttcaaagaaggaggagggggttcggaagaattggctgaagtcgaagcagaactggatgctgatttgaaggctaatggtaaatctccaaaagacagtagtaagagagaagatgaaaacaaaaagcagaatagggcgttcctcacgcaatttttctctccaatttttctcaaggctttttcgattaatttctttggagaatggggtgacaagagtcagcttgctacaattggtttagctgcagatgaaaatccatttggggtggtccttggtggagttgtggcacagtttttgtgcaccactgctgctgtaattggaggaaagagcttagcgtctcaaatttccgaaagaatagtggctctttctggtggaatgcttttcatcatttttggcatccaatcgtatcttacttctgttgaggcttaatgctttcttatggtttgtagggagactgatgaagaggaagaacgttactatccatagtttattagacatttaattttgtttattagacatttacacaagtgattacaaaacaaatctgagagtttgattgtctacagtgaaaacattgaaatgtgctgaagcagccatccgacttcaataaagtttttttggtaatcagttttaatcctcttttgttttttggagtcatttggattttgaaatgttttgcaaggatttgactcaatgagatacaaaatgtggttttgttt

SEQ ID NO: 25522 - protein, 230 aa, Arabidopsis thaliana
  peptide (1)..(230): Ceres Seq. ID no. 13495853
  misc_feature (8)..(83): Pfam Name: Uncharacterized protein family UPF0016 Pfam Description: Uncharacterized protein family UPF0016
  misc_feature (168)..(230): Homolog of NCBI NO: 34877387 NR Description: similar to probable transmembrane protein FT27 -
  misc_feature (5)..(172): Homolog of NCBI NO: 34877387 NR Description: similar to probable transmembrane protein FT27 -
  misc_feature (5)..(223): Homolog of NCBI NO: 20385488 NR Description: transmembrane protein HTP-1 [Danio rerio]
  misc_feature (1)..(230): Homolog of NCBI NO: 7684611 NR Description: TPARDL [Mus musculus]
  misc_feature (1)..(230): Homolog of NCBI NO: 6755853 NR Description: TPA regulated locus [Mus musculus]
  misc_feature (5)..(221): Homolog of NCBI NO: 21357589 NR Description: CG4196-PC [Drosophila melanogaster]
  misc_feature (1)..(224): Homolog of NCBI NO: 18421551 NR Description: transmembrane protein FT27/PFT27-related
  misc_feature (1)..(230): Homolog of NCBI NO: 15221462 NR Description: transmembrane protein -related [Arabidopsis
  misc_feature (1)..(230): Homolog of NCBI NO: 21593636 NR Description: transmembrane protein, putative [Arabidopsis
  misc_feature (1)..(230): Homolog of NCBI NO: 15222613 NR Description: transmembrane protein -related [Arabidopsis
MSSVLQGFTKSLAMTFVSEIGDKTFFAAAILAMRYPRRLVLAGCLSALIVMTILSATLGWAAPNLISRKWTHHITTLLFFGFGLWSLWDGFKEGGGGSEELAEVEAELDADLKANGKSPKDSSKREDENKKQNRAFLTQFFSPIFLKAFSINFFGEWGDKSQLATIGLAADENPFGVVLGGVVAQFLCTTAAVIGGKSLASQISERIVALSGGMLFIIFGIQSYLTSVEA

SEQ ID NO: 25523 - protein, 217 aa, Arabidopsis thaliana
  peptide (1)..(217): Ceres Seq. ID no. 13495854
  misc_feature (1)..(70): Pfam Name: Uncharacterized protein family UPF0016 Pfam Description: Uncharacterized protein family UPF0016
  misc_feature (155)..(217): Homolog of NCBI NO: 34877387 NR Description: similar to probable transmembrane protein FT27 -
  misc_feature (1)..(159): Homolog of NCBI NO: 34877387 NR Description: similar to probable transmembrane protein FT27 -
  misc_feature (1)..(210): Homolog of NCBI NO: 20385488 NR Description: transmembrane protein HTP-1 [Danio rerio]
  misc_feature (1)..(217): Homolog of NCBI NO: 7684611 NR Description: TPARDL [Mus musculus]
  misc_feature (1)..(217): Homolog of NCBI NO: 6755853 NR Description: TPA regulated locus [Mus musculus]
  misc_feature (1)..(208): Homolog of NCBI NO: 21357589 NR Description: CG4196-PC [Drosophila melanogaster]
  misc_feature (1)..(211): Homolog of NCBI NO: 18421551 NR Description: transmembrane protein FT27/PFT27-related
  misc_feature (1)..(217): Homolog of NCBI NO: 15221462 NR Description: transmembrane protein -related [Arabidopsis
  misc_feature (1)..(217): Homolog of NCBI NO: 21593636 NR Description: transmembrane protein, putative [Arabidopsis
  misc_feature (1)..(217): Homolog of NCBI NO: 15222613 NR Description: transmembrane protein -related [Arabidopsis
MTFVSEIGDKTFFAAAILAMRYPRRLVLAGCLSALIVMTILSATLGWAAPNLISRKWTHHITTLLFFGFGLWSLWDGFKEGGGGSEELAEVEAELDADLKANGKSPKDSSKREDENKKQNRAFLTQFFSPIFLKAFSINFFGEWGDKSQLATIGLAADENPFGVVLGGVVAQFLCTTAAVIGGKSLASQISERIVALSGGMLFIIFGIQSYLTSVEA

SEQ ID NO: 25524 - protein, 198 aa, Arabidopsis thaliana
  peptide (1)..(198): Ceres Seq. ID no. 13495855
  misc_feature (1)..(51): Pfam Name: Uncharacterized protein family UPF0016 Pfam Description: Uncharacterized protein family UPF0016
  misc_feature (136)..(198): Homolog of NCBI NO: 34877387 NR Description: similar to probable transmembrane protein FT27 -
  misc_feature (1)..(140): Homolog of NCBI NO: 34877387 NR Description: similar to probable transmembrane protein FT27 -
  misc_feature (1)..(191): Homolog of NCBI NO: 20385488 NR Description: transmembrane protein HTP-1 [Danio rerio]
  misc_feature (1)..(198): Homolog of NCBI NO: 7684611 NR Description: TPARDL [Mus musculus]
  misc_feature (1)..(198): Homolog of NCBI NO: 6755853 NR Description: TPA regulated locus [Mus musculus]
  misc_feature (1)..(189): Homolog of NCBI NO: 21357589 NR Description: CG4196-PC [Drosophila melanogaster]
  misc_feature (1)..(192): Homolog of NCBI NO: 18421551 NR Description: transmembrane protein FT27/PFT27-related
  misc_feature (1)..(198): Homolog of NCBI NO: 15221462 NR Description: transmembrane protein -related [Arabidopsis
  misc_feature (1)..(198): Homolog of NCBI NO: 21593636 NR Description: transmembrane protein, putative [Arabidopsis
  misc_feature (1)..(198): Homolog of NCBI NO: 15222613 NR Description: transmembrane protein -related [Arabidopsis
MRYPRRLVLAGCLSALIVMTILSATLGWAAPNLISRKWTHHITTLLFFGFGLWSLWDGFKEGGGGSEELAEVEAELDADLKANGKSPKDSSKREDENKKQNRAFLTQFFSPIFLKAFSINFFGEWGDKSQLATIGLAADENPFGVVLGGVVAQFLCTTAAVIGGKSLASQISERIVALSGGMLFIIFGIQSYLTSVEA

SEQ ID NO: 25525 - DNA, 1411 bp, Arabidopsis thaliana
  misc_feature (1)..(1411): Ceres Seq. ID no. 12324730
  misc_feature: MA Experiment ID: 108434 Result: Down-regulated in Transcription
  misc_feature: MA Experiment 108434 PARAMETER Experiment Name: At_Root_Tips_cDNA_P Parameter: Tissue Value: Root Tips
  misc_feature: MA Experiment ID: 108463 Result: Up-regulated in Transcription
  misc_feature: MA Experiment 108463 PARAMETER Experiment Name: At_Germinating_Seeds_cDNA_P Parameter: Age (day) Value: 3 vs. 0
  misc_feature: MA Experiment 108463 PARAMETER Experiment Name: At_Germinating_Seeds_cDNA_P Parameter: Tissue Value: Germinating Seeds
  misc_feature: MA Experiment ID: 108501 Result: Down-regulated in Transcription
  misc_feature: MA Experiment 108501 PARAMETER Experiment Name: At_ap2_floral_buds_cDNA_P Parameter: Plant Line Value: ap2 (Ler.)
  misc_feature: MA Experiment 108501 PARAMETER Experiment Name: At_ap2_floral_buds_cDNA_P Parameter: Tissue Value: Closed Flower
  misc_feature: MA Experiment ID: 20000070 Result: Up-regulated in Transcription
  misc_feature: MA Experiment 20000070 PARAMETER Experiment Name: At_100uM_ABA_Mutants_cDNA_P Parameter: Plant Line Value: CS24
  misc_feature: MA Experiment 20000070 PARAMETER Experiment Name: At_100uM_ABA_Mutants_cDNA_P Parameter: Timepoint (hr) Value: 6
  misc_feature: MA Experiment 20000070 PARAMETER Experiment Name: At_100uM_ABA_Mutants_cDNA_P Parameter: Tissue Value: Aerial
  misc_feature: MA Experiment 20000070 PARAMETER Experiment Name: At_100uM_ABA_Mutants_cDNA_P Parameter: Treatment Value: 100uM ABA vs. No Treatment
  misc_feature: MA Experiment ID: 20000087 Result: Up-regulated in Transcription
  misc_feature: MA Experiment 20000087 PARAMETER Experiment Name: At_100uM_ABA_Mutants_cDNA_P Parameter: Plant Line Value: WS
  misc_feature: MA Experiment 20000087 PARAMETER Experiment Name: At_100uM_ABA_Mutants_cDNA_P Parameter: Timepoint (hr) Value: 6
  misc_feature: MA Experiment 20000087 PARAMETER Experiment Name: At_100uM_ABA_Mutants_cDNA_P Parameter: Tissue Value: Aerial
  misc_feature: MA Experiment 20000087 PARAMETER Experiment Name: At_100uM_ABA_Mutants_cDNA_P Parameter: Treatment Value: 100uM ABA vs. No Treatment
  misc_feature: MA Experiment ID: 20000117 Result: Up-regulated in Transcription
  misc_feature: MA Experiment 20000117 PARAMETER Experiment Name: At_100uM_ABA_Mutants_cDNA_P Parameter: Plant Line Value: Columbia
  misc_feature: MA Experiment 20000117 PARAMETER Experiment Name: At_100uM_ABA_Mutants_cDNA_P Parameter: Timepoint (hr) Value: 6
  misc_feature: MA Experiment 20000117 PARAMETER Experiment Name: At_100uM_ABA_Mutants_cDNA_P Parameter: Tissue Value: Aerial
  misc_feature: MA Experiment 20000117 PARAMETER Experiment Name: At_100uM_ABA_Mutants_cDNA_P Parameter: Treatment Value: 100uM ABA vs. No Treatment
  misc_feature: MA Experiment ID: 20000180 Result: Up-regulated in Transcription
  misc_feature: MA Experiment 20000180 PARAMETER Experiment Name: At_Germinating_Seeds_P Parameter: Age (hr) Value: 24 vs. 0
  misc_feature: MA Experiment 20000180 PARAMETER Experiment Name: At_Germinating_Seeds_P Parameter: Tissue Value: Germinating Seeds
  misc_feature: MA Experiment ID: 20000184 Result: Up-regulated in Transcription
  misc_feature: MA Experiment 20000184 PARAMETER Experiment Name: At_Shoots__P Parameter: Age (day) Value: 7
  misc_feature: MA Experiment 20000184 PARAMETER Experiment Name: At_Shoots__P Parameter: Tissue Value: Shoots vs. Whole Plant
attttttcagtctctctgcttctcactgttgtgctttctgtcttgtctctgtctttcccattgtcattctctcaccaatgggaatctcctttagcaacaacaacagaagacgagacaacaataatcgtcgccacctccaccactatcctccgccgccgccttactattacctcgaccctcctcctcctcctccgccatttccaccgcattatgactataactactccaattaccatctctctccgcctctaccgccacagccacagatcaactcttgttcttacggccattaccattatcaccctcagcctcctcagtatttcaccactgctcagcccaattggtggggcccaatgatgagaccggcgtactactgtccgcctcagccgcaaacgcaaccgcctaagccatacctggagcaacagaacgcgaaaaaggtgaggaatgatgtcaatgtgcatagagatacagtgaggcttgaagtggacgatctcgttcctggtcaccatctagtttccttcgtcttcgatgctcttttcgacggcagtttcactatcaccttctttgcaaaggaggaaccaaattgcaccattatcccacagtttccagaggtttattcacccacaagattccattttcagaaaggtcctggacagaagtttctgcagccttcagggacaggaactgacctgagcttctttgttcttgatgatctgtctaaacccttagaagaagatgtgtatccgcttgtaatatcagctgagacgataatctctccaaattcaatctcagagcaatcatcagttcataagcaagtcacacaagcggttctcgagaaagataatgatggatctttcaaagtgaaagttgtgaagcagattctttggattgaaggagttcgatatgaactccgtgagttgtatggctcgaccactcaaggtgcagcctcgggcttagatgagagtggttcgggtacagaatgtgttatctgcatgactgaggctaaggacacggctgtgctgccttgcagacatttgtgcatgtgtagcgactgtgctaaagaattgaggcttcagtccaacaaatgtccgatttgtcgacaacccatcgaagagctcttagagatcaaaatgaacagtagtgatgaacaacactagtacaaaaaaggttctttctttacataaaacaccattcttgattctttcttcatttttctctgaaaccctccatatctgaatctgtatttccgctatcattgttgtgcaacttccttcattccgcatatagatttgtttgatctaatgctttgtatttgcaagatataagcatcatcagtacatgtatagataacttcctaacactctcaccaaactacttaatgtttgtaattgaatgcttttgttggtttgcc

SEQ ID NO: 25526 - protein, 384 aa, Arabidopsis thaliana
  peptide (1)..(384): Ceres Seq. ID no. 12324731
  misc_feature (327)..(365): Pfam Name: Zinc finger, C3HC4 type (RING finger) Pfam Description: Zinc finger, C3HC4 type (RING finger)
  misc_feature (50)..(378): Homolog of NCBI NO: 15242675 NR Description: expressed protein
  misc_feature (50)..(378): Homolog of NCBI NO: 21618140 NR Description: putative RING zinc finger protein [Arabidopsis
  misc_feature (50)..(378): Homolog of NCBI NO: 26449588 NR Description: unknown protein [Arabidopsis thaliana]
  misc_feature (100)..(381): Homolog of NCBI NO: 15231808 NR Description: putative protein
  misc_feature (29)..(381): Homolog of NCBI NO: 18398633 NR Description: expressed protein
  misc_feature (48)..(383): Homolog of NCBI NO: 37532246 NR Description: putative hydroxyproline-rich glycoprotein
  misc_feature (26)..(384): Homolog of NCBI NO: 21928149 NR Description: AT5g19080/T16G12_120 [Arabidopsis thaliana]
  misc_feature (26)..(384): Homolog of NCBI NO: 15239642 NR Description: unknown protein; protein id: At5g19080.1
  misc_feature (26)..(384): Homolog of NCBI NO: 18397483 NR Description: putative RING zinc finger protein
  misc_feature (4)..(384): Homolog of NCBI NO: 6862918 NR Description: putative RING zinc finger protein [Arabidopsis
FFSLSASHCCAFCLVSVFPIVILSPMGISFSNNNRRRDNNNRRHLHHYPPPPPYYYLDPPPPPPPFPPHYDYNYSNYHLSPPLPPQPQINSCSYGHYHYHPQPPQYFTTAQPNWWGPMMRPAYYCPPQPQTQPPKPYLEQQNAKKVRNDVNVHRDTVRLEVDDLVPGHHLVSFVFDALFDGSFTITFFAKEEPNCTIIPQFPEVYSPTRFHFQKGPGQKFLQPSGTGTDLSFFVLDDLSKPLEEDVYPLVISAETIISPNSISEQSSVHKQVTQAVLEKDNDGSFKVKVVKQILWIEGVRYELRELYGSTTQGAASGLDESGSGTECVICMTEAKDTAVLPCRHLCMCSDCAKELRLQSNKCPICRQPIEELLEIKMNSSDEQH

SEQ ID NO: 25527 - protein, 359 aa, Arabidopsis thaliana
  peptide (1)..(359): Ceres Seq. ID no. 12324732
  misc_feature (302)..(340): Pfam Name: Zinc finger, C3HC4 type (RING finger) Pfam Description: Zinc finger, C3HC4 type (RING finger)
  misc_feature (25)..(353): Homolog of NCBI NO: 15242675 NR Description: expressed protein
  misc_feature (25)..(353): Homolog of NCBI NO: 21618140 NR Description: putative RING zinc finger protein [Arabidopsis
  misc_feature (25)..(353): Homolog of NCBI NO: 26449588 NR Description: unknown protein [Arabidopsis thaliana]
  misc_feature (75)..(356): Homolog of NCBI NO: 15231808 NR Description: putative protein
  misc_feature (4)..(356): Homolog of NCBI NO: 18398633 NR Description: expressed protein
  misc_feature (23)..(358): Homolog of NCBI NO: 37532246 NR Description: putative hydroxyproline-rich glycoprotein
  misc_feature (1)..(359): Homolog of NCBI NO: 21928149 NR Description: AT5g19080/T16G12_120 [Arabidopsis thaliana]
  misc_feature (1)..(359): Homolog of NCBI NO: 15239642 NR Description: unknown protein; protein id: At5g19080.1
  misc_feature (1)..(359): Homolog of NCBI NO: 18397483 NR Description: putative RING zinc finger protein
  misc_feature (1)..(359): Homolog of NCBI NO: 6862918 NR Description: putative RING zinc finger protein [Arabidopsis
MGISFSNNNRRRDNNNRRHLHHYPPPPPYYYLDPPPPPPPFPPHYDYNYSNYHLSPPLPPQPQINSCSYGHYHYHPQPPQYFTTAQPNWWGPMMRPAYYCPPQPQTQPPKPYLEQQNAKKVRNDVNVHRDTVRLEVDDLVPGHHLVSFVFDALFDGSFTITFFAKEEPNCTIIPQFPEVYSPTRFHFQKGPGQKFLQPSGTGTDLSFFVLDDLSKPLEEDVYPLVISAETIISPNSISEQSSVHKQVTQAVLEKDNDGSFKVKVVKQILWIEGVRYELRELYGSTTQGAASGLDESGSGTECVICMTEAKDTAVLPCRHLCMCSDCAKELRLQSNKCPICRQPIEELLEIKMNSSDEQH

SEQ ID NO: 25528 - protein, 267 aa, Arabidopsis thaliana
  peptide (1)..(267): Ceres Seq. ID no. 12324733
  misc_feature (210)..(248): Pfam Name: Zinc finger, C3HC4 type (RING finger) Pfam Description: Zinc finger, C3HC4 type (RING finger)
  misc_feature (1)..(261): Homolog of NCBI NO: 15242675 NR Description: expressed protein
  misc_feature (1)..(261): Homolog of NCBI NO: 21618140 NR Description: putative RING zinc finger protein [Arabidopsis
  misc_feature (1)..(261): Homolog of NCBI NO: 26449588 NR Description: unknown protein [Arabidopsis thaliana]
  misc_feature (1)..(264): Homolog of NCBI NO: 15231808 NR Description: putative protein
  misc_feature (1)..(264): Homolog of NCBI NO: 18398633 NR Description: expressed protein
  misc_feature (1)..(266): Homolog of NCBI NO: 37532246 NR Description: putative hydroxyproline-rich glycoprotein
  misc_feature (1)..(267): Homolog of NCBI NO: 21928149 NR Description: AT5g19080/T16G12_120 [Arabidopsis thaliana]
  misc_feature (1)..(267): Homolog of NCBI NO: 15239642 NR Description: unknown protein; protein id: At5g19080.1
  misc_feature (1)..(267): Homolog of NCBI NO: 18397483 NR Description: putative RING zinc finger protein
  misc_feature (1)..(267): Homolog of NCBI NO: 6862918 NR Description: putative RING zinc finger protein [Arabidopsis
MMRPAYYCPPQPQTQPPKPYLEQQNAKKVRNDVNVHRDTVRLEVDDLVPGHHLVSFVFDALFDGSFTITFFAKEEPNCTIIPQFPEVYSPTRFHFQKGPGQKFLQPSGTGTDLSFFVLDDLSKPLEEDVYPLVISAETIISPNSISEQSSVHKQVTQAVLEKDNDGSFKVKVVKQILWIEGVRYELRELYGSTTQGAASGLDESGSGTECVICMTEAKDTAVLPCRHLCMCSDCAKELRLQSNKCPICRQPIEELLEIKMNSSDEQH

SEQ ID NO: 25529 - DNA, 1380 bp, Arabidopsis thaliana
  misc_feature (1)..(1380): Ceres Seq. ID no. 13497590
  misc_feature: MA Experiment ID: 20000171 Result: Down-regulated in Transcription
  misc_feature: MA Experiment 20000171 PARAMETER Experiment Name: At_42deg_Heat_P Parameter: Age (day) Value: 14
  misc_feature: MA Experiment 20000171 PARAMETER Experiment Name: At_42deg_Heat_P Parameter: Organism Value: A. thaliana
  misc_feature: MA Experiment 20000171 PARAMETER Experiment Name: At_42deg_Heat_P Parameter: Plant Line Value: WS
  misc_feature: MA Experiment 20000171 PARAMETER Experiment Name: At_42deg_Heat_P Parameter: Temperature (deg C) Value: 42 vs. 22
  misc_feature: MA Experiment 20000171 PARAMETER Experiment Name: At_42deg_Heat_P Parameter: Timepoint (hr) Value: 1
  misc_feature: MA Experiment 20000171 PARAMETER Experiment Name: At_42deg_Heat_P Parameter: Tissue Value: Aerial
  misc_feature: MA Experiment ID: 20000173 Result: Down-regulated in Transcription
  misc_feature: MA Experiment 20000173 PARAMETER Experiment Name: At_42deg_Heat_P Parameter: Age (day) Value: 14
  misc_feature: MA Experiment 20000173 PARAMETER Experiment Name: At_42deg_Heat_P Parameter: Organism Value: A. thaliana
  misc_feature: MA Experiment 20000173 PARAMETER Experiment Name: At_42deg_Heat_P Parameter: Plant Line Value: WS
  misc_feature: MA Experiment 20000173 PARAMETER Experiment Name: At_42deg_Heat_P Parameter: Temperature (deg C) Value: 42 vs. 22
  misc_feature: MA Experiment 20000173 PARAMETER Experiment Name: At_42deg_Heat_P Parameter: Timepoint (hr) Value: 6
  misc_feature: MA Experiment 20000173 PARAMETER Experiment Name: At_42deg_Heat_P Parameter: Tissue Value: Aerial
  misc_feature: MA Experiment ID: 20000224 Result: Down-regulated in Transcription
  misc_feature: MA Experiment ID: 20001248 Result: Down-regulated in Transcription
  misc_feature: MA Experiment 20001248 PARAMETER Experiment Name: At_Far-red-induction_P Parameter: Age (day) Value: 7
  misc_feature: MA Experiment 20001248 PARAMETER Experiment Name: At_Far-red-induction_P Parameter: Light Value: Far-red vs. White
  misc_feature: MA Experiment 20001248 PARAMETER Experiment Name: At_Far-red-induction_P Parameter: Organism Value: A. thaliana
  misc_feature: MA Experiment 20001248 PARAMETER Experiment Name: At_Far-red-induction_P Parameter: Plant Line Value: Columbia
  misc_feature: MA Experiment 20001248 PARAMETER Experiment Name: At_Far-red-induction_P Parameter: Timepoint (hr) Value: 4
  misc_feature: MA Experiment 20001248 PARAMETER Experiment Name: At_Far-red-induction_P Parameter: Tissue Value: Whole Plant
  misc_feature: MA Experiment ID: 20001450 Result: Down-regulated in Transcription
  misc_feature: MA Experiment 20001450 PARAMETER Experiment Name: At_Far-red-induction_P Parameter: Age (day) Value: 7
  misc_feature: MA Experiment 20001450 PARAMETER Experiment Name: At_Far-red-induction_P Parameter: Light Value: Far-red vs. White
  misc_feature: MA Experiment 20001450 PARAMETER Experiment Name: At_Far-red-induction_P Parameter: Organism Value: A. thaliana
  misc_feature: MA Experiment 20001450 PARAMETER Experiment Name: At_Far-red-induction_P Parameter: Plant Line Value: Columbia
  misc_feature: MA Experiment 20001450 PARAMETER Experiment Name: At_Far-red-induction_P Parameter: Timepoint (hr) Value: 8
  misc_feature: MA Experiment 20001450 PARAMETER Experiment Name: At_Far-red-induction_P Parameter: Tissue Value: Whole Plant
  misc_feature: MA Experiment ID: 20001560 Result: Up-regulated in Transcription
  misc_feature: MA Experiment 20001560 PARAMETER Experiment Name: At_Drought_Soil_Dry_P Parameter: Age (day) Value: 28
  misc_feature: MA Experiment 20001560 PARAMETER Experiment Name: At_Drought_Soil_Dry_P Parameter: Organism Value: A. thaliana
  misc_feature: MA Experiment 20001560 PARAMETER Experiment Name: At_Drought_Soil_Dry_P Parameter: Plant Line Value: WS
  misc_feature: MA Experiment 20001560 PARAMETER Experiment Name: At_Drought_Soil_Dry_P Parameter: Post Timepoint (hr) Value: None
  misc_feature: MA Experiment 20001560 PARAMETER Experiment Name: At_Drought_Soil_Dry_P Parameter: Post-Treatment Value: None
  misc_feature: MA Experiment 20001560 PARAMETER Experiment Name: At_Drought_Soil_Dry_P Parameter: Timepoint (day) Value: 14
  misc_feature: MA Experiment 20001560 PARAMETER Experiment Name: At_Drought_Soil_Dry_P Parameter: Treatment Value: Drought vs. No Drought
  misc_feature: MA Experiment ID: 20001905 Result: Down-regulated in Transcription
  misc_feature: MA Experiment 20001905 PARAMETER Experiment Name: At_Drought_Reproduction_P Parameter: Age (day) Value: 40
  misc_feature: MA Experiment 20001905 PARAMETER Experiment Name: At_Drought_Reproduction_P Parameter: Organism Value: A. thaliana
  misc_feature: MA Experiment 20001905 PARAMETER Experiment Name: At_Drought_Reproduction_P Parameter: Plant Line Value: WS
  misc_feature: MA Experiment 20001905 PARAMETER Experiment Name: At_Drought_Reproduction_P Parameter: Timepoint (day) Value: 10
  misc_feature: MA Experiment 20001905 PARAMETER Experiment Name: At_Drought_Reproduction_P Parameter: Tissue Value: Rosettes
  misc_feature: MA Experiment 20001905 PARAMETER Experiment Name: At_Drought_Reproduction_P Parameter: Treatment Value: Drought vs. No Drought
  misc_feature: MA Experiment ID: 20001911 Result: Down-regulated in Transcription
  misc_feature: MA Experiment 20001911 PARAMETER Experiment Name: At_Drought_Reproduction_P Parameter: Age (day) Value: 40
  misc_feature: MA Experiment 20001911 PARAMETER Experiment Name: At_Drought_Reproduction_P Parameter: Organism Value: A. thaliana
  misc_feature: MA Experiment 20001911 PARAMETER Experiment Name: At_Drought_Reproduction_P Parameter: Plant Line Value: WS
  misc_feature: MA Experiment 20001911 PARAMETER Experiment Name: At_Drought_Reproduction_P Parameter: Timepoint (day) Value: 10
  misc_feature: MA Experiment 20001911 PARAMETER Experiment Name: At_Drought_Reproduction_P Parameter: Tissue Value: Flowers
  misc_feature: MA Experiment 20001911 PARAMETER Experiment Name: At_Drought_Reproduction_P Parameter: Treatment Value: Drought vs. No Drought
gacatatatttatcttcttgaaaagcgaatgatgtctataaattgttttcgaacagcgaaggctccgcttcaatcatttgtagcagtaagaacgaattcgagacctagaaattcatcgaaccgtctcgtttctgtattcggacgcaagtcttcttctccttcatttgttactctcagagttgtttcatcgaaggcttacgagaaagagcttgatgctgctaagaaagctgcttcactcgctgctcgtctctgtcagaaagttcaaaaggctttgttgcaatcagatgtgcaatcaaaatctgataaaagtccagtgaccgttgctgattatggttcacaagcagttgttagtttagtcttagaaaaagagctcagttctgaacccttttcattggtggctgaagaggactcaggcgatctacgcaaggatggttctcaggatactctggagcgcatcacaaaactcgtgaacgacactttggctaccgaggaatcgtttaatggctctactttgtctactgatgatctacttagagccattgactgtggaacatctgaaggtggtccaaatggtcgacactgggtcttggatccaattgatggcactaaaggatttctgaggggagatcaatacgcagtagcactaggattgctcgaggaagggaaagtagttttaggtgtgcttgcttgtccaaacttgccgttagcatccatagcaggaaacaacaagaacaaatcttcgtcagacgaaattggatgcctcttctttgctacaattggttcagggacatatatgcagctcctagattcaaaatcttctcctgtaaaagtgcaagtctctagtgttgagaatcctgaagaggcatcgttcttcgagtcattcgaaggagctcactctctacatgacttatccagcaccattgccaataaactcggtgtcaaagctccaccagtccgtattgatagccaagcaaagtatggagctttatcaagaggagatggagctatatacttacggtttcctcataaaggataccgcgaaaagatttgggaccatgtcgctggtgctatagttgttacagaggcgggtggaatagtgacagatgcagcaggaaagccactggatttctcgaaagggaagtatcttgatttggacacaggcattatcgttgctaacgagaagctaatgcctctgcttttgaaagcagttcgtgactccatagctgagcaagagaaagcttcagctctctgatttgtttttttctctcgtacgttctttgtttctctgtaactgttgtttcattttctttcaccgaatttcaccagtgagaatttcttccattttcgaaaaagaaataaaaatgaaattctgttttgggc

SEQ ID NO: 25530 - protein, 416 aa, Arabidopsis thaliana
  peptide (1)..(416): Ceres Seq. ID no. 13497591
  misc_feature (196)..(416): Homolog of NCBI NO: 17017951 NR Description: 3'(2'),5'-bisphosphate nucleotidase [Gossypium
  misc_feature (66)..(410): Homolog of NCBI NO: 15242383 NR Description: 3'(2'),5'-bisphosphate nucleotidase-related
  misc_feature (65)..(412): Homolog of NCBI NO: 8777312 NR Description: 3'(2'),5'-bisphosphate nucleotidase [Arabidopsis
  misc_feature (66)..(410): Homolog of NCBI NO: 34395640 NR Description: Probable SAL4 phosphatase (3'(2'),5'-bisphosphate
  misc_feature (65)..(412): Homolog of NCBI NO: 21618152 NR Description: 3(2),5-bisphosphate nucleotidase [Arabidopsis
  misc_feature (65)..(412): Homolog of NCBI NO: 18424775 NR Description: 3(2),5-bisphosphate nucleotidase [Arabidopsis
  misc_feature (65)..(410): Homolog of NCBI NO: 15237589 NR Description: 3(2),5-bisphosphate nucleotidase (emb|CAB05889.1)
  misc_feature (66)..(415): Homolog of NCBI NO: 3913517 NR Description: 3'(2'),5'-BISPHOSPHATE NUCLEOTIDASE
  misc_feature (60)..(416): Homolog of NCBI NO: 14268820 NR Description: diphosphonucleotide phosphatase 1 [Zea mays]
  misc_feature (65)..(416): Homolog of NCBI NO: 15237567 NR Description: 3(2),5-bisphosphate nucleotidase [Arabidopsis
TYIYLLEKRMMSINCFRTAKAPLQSFVAVRTNSRPRNSSNRLVSVFGRKSSSPSFVTLRVVSSKAYEKELDAAKKAASLAARLCQKVQKALLQSDVQSKSDKSPVTVADYGSQAVVSLVLEKELSSEPFSLVAEEDSGDLRKDGSQDTLERITKLVNDTLATEESFNGSTLSTDDLLRAIDCGTSEGGPNGRHWVLDPIDGTKGFLRGDQYAVALGLLEEGKVVLGVLACPNLPLASIAGNNKNKSSSDEIGCLFFATIGSGTYMQLLDSKSSPVKVQVSSVENPEEASFFESFEGAHSLHDLSSTIANKLGVKAPPVRIDSQAKYGALSRGDGAIYLRFPHKGYREKIWDHVAGAIVVTEAGGIVTDAAGKPLDFSKGKYLDLDTGIIVANEKLMPLLLKAVRDSIAEQEKASAL

SEQ ID NO: 25531 - protein, 407 aa, Arabidopsis thaliana
  peptide (1)..(407): Ceres Seq. ID no. 13497592
  misc_feature (56)..(407): Homolog of NCBI NO: 15237567 NR Description: 3(2),5-bisphosphate nucleotidase [Arabidopsis
  misc_feature (187)..(407): Homolog of NCBI NO: 17017951 NR Description: 3'(2'),5'-bisphosphate nucleotidase [Gossypium
  misc_feature (57)..(401): Homolog of NCBI NO: 15242383 NR Description: 3'(2'),5'-bisphosphate nucleotidase-related
  misc_feature (56)..(403): Homolog of NCBI NO: 8777312 NR Description: 3'(2'),5'-bisphosphate nucleotidase [Arabidopsis
  misc_feature (57)..(401): Homolog of NCBI NO: 34395640 NR Description: Probable SAL4 phosphatase (3'(2'),5'-bisphosphate
  misc_feature (56)..(403): Homolog of NCBI NO: 21618152 NR Description: 3(2),5-bisphosphate nucleotidase [Arabidopsis
  misc_feature (56)..(403): Homolog of NCBI NO: 18424775 NR Description: 3(2),5-bisphosphate nucleotidase [Arabidopsis
  misc_feature (56)..(401): Homolog of NCBI NO: 15237589 NR Description: 3(2),5-bisphosphate nucleotidase (emb|CAB05889.1)
  misc_feature (57)..(406): Homolog of NCBI NO: 3913517 NR Description: 3'(2'),5'-BISPHOSPHATE NUCLEOTIDASE
  misc_feature (51)..(407): Homolog of NCBI NO: 14268820 NR Description: diphosphonucleotide phosphatase 1 [Zea mays]
MMSINCFRTAKAPLQSFVAVRTNSRPRNSSNRLVSVFGRKSSSPSFVTLRVVSSKAYEKELDAAKKAASLAARLCQKVQKALLQSDVQSKSDKSPVTVADYGSQAVVSLVLEKELSSEPFSLVAEEDSGDLRKDGSQDTLERITKLVNDTLATEESFNGSTLSTDDLLRAIDCGTSEGGPNGRHWVLDPIDGTKGFLRGDQYAVALGLLEEGKVVLGVLACPNLPLASIAGNNKNKSSSDEIGCLFFATIGSGTYMQLLDSKSSPVKVQVSSVENPEEASFFESFEGAHSLHDLSSTIANKLGVKAPPVRIDSQAKYGALSRGDGAIYLRFPHKGYREKIWDHVAGAIVVTEAGGIVTDAAGKPLDFSKGKYLDLDTGIIVANEKLMPLLLKAVRDSIAEQEKASAL

SEQ ID NO: 25532 - protein, 406 aa, Arabidopsis thaliana
  peptide (1)..(406): Ceres Seq. ID no. 13497593
  misc_feature (186)..(406): Homolog of NCBI NO: 17017951 NR Description: 3'(2'),5'-bisphosphate nucleotidase [Gossypium
  misc_feature (56)..(400): Homolog of NCBI NO: 15242383 NR Description: 3'(2'),5'-bisphosphate nucleotidase-related
  misc_feature (55)..(402): Homolog of NCBI NO: 8777312 NR Description: 3'(2'),5'-bisphosphate nucleotidase [Arabidopsis
  misc_feature (56)..(400): Homolog of NCBI NO: 34395640 NR Description: Probable SAL4 phosphatase (3'(2'),5'-bisphosphate
  misc_feature (55)..(402): Homolog of NCBI NO: 21618152 NR Description: 3(2),5-bisphosphate nucleotidase [Arabidopsis
  misc_feature (55)..(402): Homolog of NCBI NO: 18424775 NR Description: 3(2),5-bisphosphate nucleotidase [Arabidopsis
  misc_feature (55)..(400): Homolog of NCBI NO: 15237589 NR Description: 3(2),5-bisphosphate nucleotidase (emb|CAB05889.1)
  misc_feature (56)..(405): Homolog of NCBI NO: 3913517 NR Description: 3'(2'),5'-BISPHOSPHATE NUCLEOTIDASE
  misc_feature (50)..(406): Homolog of NCBI NO: 14268820 NR Description: diphosphonucleotide phosphatase 1 [Zea mays]
  misc_feature (55)..(406): Homolog of NCBI NO: 15237567 NR Description: 3(2),5-bisphosphate nucleotidase [Arabidopsis
MSINCFRTAKAPLQSFVAVRTNSRPRNSSNRLVSVFGRKSSSPSFVTLRVVSSKAYEKELDAAKKAASLAARLCQKVQKALLQSDVQSKSDKSPVTVADYGSQAVVSLVLEKELSSEPFSLVAEEDSGDLRKDGSQDTLERITKLVNDTLATEESFNGSTLSTDDLLRAIDCGTSEGGPNGRHWVLDPIDGTKGFLRGDQYAVALGLLEEGKVVLGVLACPNLPLASIAGNNKNKSSSDEIGCLFFATIGSGTYMQLLDSKSSPVKVQVSSVENPEEASFFESFEGAHSLHDLSSTIANKLGVKAPPVRIDSQAKYGALSRGDGAIYLRFPHKGYREKIWDHVAGAIVVTEAGGIVTDAAGKPLDFSKGKYLDLDTGIIVANEKLMPLLLKAVRDSIAEQEKASAL

SEQ ID NO: 25533 - DNA, 1155 bp, Arabidopsis thaliana
  misc_feature (1)..(1155): Ceres Seq. ID no. 12321578
  misc_feature: MA Experiment ID: 20001450 Result: Up-regulated in Transcription
  misc_feature: MA Experiment 20001450 PARAMETER Experiment Name: At_Far-red-induction_P Parameter: Age (day) Value: 7
  misc_feature: MA Experiment 20001450 PARAMETER Experiment Name: At_Far-red-induction_P Parameter: Light Value: Far-red vs. White
  misc_feature: MA Experiment 20001450 PARAMETER Experiment Name: At_Far-red-induction_P Parameter: Organism Value: A. thaliana
  misc_feature: MA Experiment 20001450 PARAMETER Experiment Name: At_Far-red-induction_P Parameter: Plant Line Value: Columbia
  misc_feature: MA Experiment 20001450 PARAMETER Experiment Name: At_Far-red-induction_P Parameter: Timepoint (hr) Value: 8
  misc_feature: MA Experiment 20001450 PARAMETER Experiment Name: At_Far-red-induction_P Parameter: Tissue Value: Whole Plant
agaatcagatcatccatggaaacagcgtcgagagtggaactgattgttaaaggcaacttaccggaggttccttctcagtacattcagccaccggaagctcgacctaatctccattactccggcgatgcagcttcgatcccaaccgtcgatctctcgagctccgattccgcgagagaagccatcggtgacgcttgtcgcgactggggagccttccacgtaatcaaccatggtgttccaatccatctccttgatcggatgaggtctttaggtctctctttcttccaagactctcccatggaagagaagctacgttacgcctgcgactctacctccgccgcatctgaaggttacggtagccgtatgttgcttggtgctaaagatgacgtcgttttggattggagagattactttgatcatcacacgtttcctccctctcgtcgtaacccttctcattggccgattcatccttctgactacagacaagttgttggagaatatggtgatgagatgaagaaactagctcagatgctattagggctaatctcagagagtttgggtcttccttgttcatctatagaagaagctgttggtgaaatctatcagaacattactgtgagctattaccctccttgtcctcagcctgagctcactcttggtcttcagtctcattccgattttggtgccattactctcttgattcaagatgatgttgaaggtcttcagctttacaaggatgctcaatggctcactgttcctcctatctctgatgctattctcattcttattgccgatcaaaccgagatcattaccaatggaagatacaaaagtgctcaacatagagctgtgactaatgcgaatcgggcgcggttatcagtcgctacctttcatgatccctccaagactgcaaggatagcaccagtttctcaactctccccaccgtcttacaaggaagttgtgtatggtcaatatgtttcttcctggtactctaaaggtcctgagggtaaacgaaacctcgatgctcttctctactaagtttatgctaatgagtatgtggacgccaattgccacggctgaaaagtggtttcacaatagtggctgtaaaaactcaaaagacacaaacgataaataataataaactgaatgaatcctagtcgc

SEQ ID NO: 25534 - protein, 343 aa, Arabidopsis thaliana
  peptide (1)..(343): Ceres Seq. ID no. 12321579
  misc_feature (199)..(298): Pfam Name: 2OG-Fe(II) oxygenase superfamily Pfam Description: 2OG-Fe(II) oxygenase superfamily
  misc_feature (7)..(267): Homolog of NCBI NO: 34907994 NR Description: leucoanthocyanidin dioxygenase-like protein
  misc_feature (7)..(340): Homolog of NCBI NO: 15229694 NR Description: putative leucoanthocyanidin dioxygenase; protein
  misc_feature (12)..(342): Homolog of NCBI NO: 21554535 NR Description: putative anthocyanidin synthase [Arabidopsis
  misc_feature (12)..(342): Homolog of NCBI NO: 15224472 NR Description: putative anthocyanidin synthase
  misc_feature (6)..(342): Homolog of NCBI NO: 34898354 NR Description: Similar to leucoanthocyanidin
  misc_feature (86)..(342): Homolog of NCBI NO: 11045078 NR Description: naringenin 3-dioxygenase like protein [Brassica
  misc_feature (99)..(343): Homolog of NCBI NO: 7433202 NR Description: hypothetical protein - Arabidopsis thaliana
  misc_feature (99)..(343): Homolog of NCBI NO: 21593639 NR Description: naringenin 3-dioxygenase like protein
  misc_feature (86)..(343): Homolog of NCBI NO: 18414636 NR Description: naringenin 3-dioxygenase like protein
  misc_feature (6)..(343): Homolog of NCBI NO: 20260150 NR Description: strong similarity to naringenin 3-dioxygenase
RIRSSMETASRVELIVKGNLPEVPSQYIQPPEARPNLHYSGDAASIPTVDLSSSDSAREAIGDACRDWGAFHVINHGVPIHLLDRMRSLGLSFFQDSPMEEKLRYACDSTSAASEGYGSRMLLGAKDDVVLDWRDYFDHHTFPPSRRNPSHWPIHPSDYRQVVGEYGDEMKKLAQMLLGLISESLGLPCSSIEEAVGEIYQNITVSYYPPCPQPELTLGLQSHSDFGAITLLIQDDVEGLQLYKDAQWLTVPPISDAILILIADQTEIITNGRYKSAQHRAVTNANRARLSVATFHDPSKTARIAPVSQLSPPSYKEVVYGQYVSSWYSKGPEGKRNLDALLY

SEQ ID NO: 25535 - protein, 338 aa, Arabidopsis thaliana
  peptide (1)..(338): Ceres Seq. ID no. 12321580
  misc_feature (194)..(293): Pfam Name: 2OG-Fe(II) oxygenase superfamily Pfam Description: 2OG-Fe(II) oxygenase superfamily
  misc_feature (2)..(262): Homolog of NCBI NO: 34907994 NR Description: leucoanthocyanidin dioxygenase-like protein
  misc_feature (2)..(335): Homolog of NCBI NO: 15229694 NR Description: putative leucoanthocyanidin dioxygenase; protein
  misc_feature (7)..(337): Homolog of NCBI NO: 21554535 NR Description: putative anthocyanidin synthase [Arabidopsis
  misc_feature (7)..(337): Homolog of NCBI NO: 15224472 NR Description: putative anthocyanidin synthase
  misc_feature (1)..(337): Homolog of NCBI NO: 34898354 NR Description: Similar to leucoanthocyanidin
  misc_feature (81)..(337): Homolog of NCBI NO: 11045078 NR Description: naringenin 3-dioxygenase like protein [Brassica
  misc_feature (94)..(338): Homolog of NCBI NO: 7433202 NR Description: hypothetical protein - Arabidopsis thaliana
  misc_feature (94)..(338): Homolog of NCBI NO: 21593639 NR Description: naringenin 3-dioxygenase like protein
  misc_feature (81)..(338): Homolog of NCBI NO: 18414636 NR Description: naringenin 3-dioxygenase like protein
  misc_feature (1)..(338): Homolog of NCBI NO: 20260150 NR Description: strong similarity to naringenin 3-dioxygenase
METASRVELIVKGNLPEVPSQYIQPPEARPNLHYSGDAASIPTVDLSSSDSAREAIGDACRDWGAFHVINHGVPIHLLDRMRSLGLSFFQDSPMEEKLRYACDSTSAASEGYGSRMLLGAKDDVVLDWRDYFDHHTFPPSRRNPSHWPIHPSDYRQVVGEYGDEMKKLAQMLLGLISESLGLPCSSIEEAVGEIYQNITVSYYPPCPQPELTLGLQSHSDFGAITLLIQDDVEGLQLYKDAQWLTVPPISDAILILIADQTEIITNGRYKSAQHRAVTNANRARLSVATFHDPSKTARIAPVSQLSPPSYKEVVYGQYVSSWYSKGPEGKRNLDALLY

SEQ ID NO: 25536 - protein, 258 aa, Arabidopsis thaliana
  peptide (1)..(258): Ceres Seq. ID no. 12321581
  misc_feature (114)..(213): Pfam Name: 2OG-Fe(II) oxygenase superfamily Pfam Description: 2OG-Fe(II) oxygenase superfamily
  misc_feature (1)..(182): Homolog of NCBI NO: 34907994 NR Description: leucoanthocyanidin dioxygenase-like protein
  misc_feature (1)..(255): Homolog of NCBI NO: 15229694 NR Description: putative leucoanthocyanidin dioxygenase; protein
  misc_feature (1)..(257): Homolog of NCBI NO: 21554535 NR Description: putative anthocyanidin synthase [Arabidopsis
  misc_feature (1)..(257): Homolog of NCBI NO: 15224472 NR Description: putative anthocyanidin synthase
  misc_feature (1)..(257): Homolog of NCBI NO: 34898354 NR Description: Similar to leucoanthocyanidin
  misc_feature (1)..(257): Homolog of NCBI NO: 11045078 NR Description: naringenin 3-dioxygenase like protein [Brassica
  misc_feature (14)..(258): Homolog of NCBI NO: 7433202 NR Description: hypothetical protein - Arabidopsis thaliana
  misc_feature (14)..(258): Homolog of NCBI NO: 21593639 NR Description: naringenin 3-dioxygenase like protein
  misc_feature (1)..(258): Homolog of NCBI NO: 18414636 NR Description: naringenin 3-dioxygenase like protein
  misc_feature (1)..(258): Homolog of NCBI NO: 20260150 NR Description: strong similarity to naringenin 3-dioxygenase
MRSLGLSFFQDSPMEEKLRYACDSTSAASEGYGSRMLLGAKDDVVLDWRDYFDHHTFPPSRRNPSHWPIHPSDYRQVVGEYGDEMKKLAQMLLGLISESLGLPCSSIEEAVGEIYQNITVSYYPPCPQPELTLGLQSHSDFGAITLLIQDDVEGLQLYKDAQWLTVPPISDAILILIADQTEIITNGRYKSAQHRAVTNANRARLSVATFHDPSKTARIAPVSQLSPPSYKEVVYGQYVSSWYSKGPEGKRNLDALLY

SEQ ID NO: 25537 - DNA, 867 bp, Arabidopsis thaliana
  misc_feature (1)..(867): Ceres Seq. ID no. 12321582
  misc_feature: MA Experiment ID: 108433 Result: Up-regulated in Transcription
  misc_feature: MA Experiment 108433 PARAMETER Experiment Name: At_rhl_Mutant2_cDNA_P Parameter: Age (day) Value: 7
  misc_feature: MA Experiment 108433 PARAMETER Experiment Name: At_rhl_Mutant2_cDNA_P Parameter: Organism Value: A. thaliana
  misc_feature: MA Experiment 108433 PARAMETER Experiment Name: At_rhl_Mutant2_cDNA_P Parameter: Plant Line Value: rhl Mutant vs. wt landsburg
  misc_feature: MA Experiment 108433 PARAMETER Experiment Name: At_rhl_Mutant2_cDNA_P Parameter: Tissue Value: Roots
  misc_feature: MA Experiment ID: 108462 Result: Up-regulated in Transcription
  misc_feature: MA Experiment 108462 PARAMETER Experiment Name: At_Germinating_Seeds_cDNA_P Parameter: Age (day) Value: 2 vs. 0
  misc_feature: MA Experiment 108462 PARAMETER Experiment Name: At_Germinating_Seeds_cDNA_P Parameter: Tissue Value: Germinating Seeds
  misc_feature: MA Experiment ID: 108464 Result: Up-regulated in Transcription
  misc_feature: MA Experiment 108464 PARAMETER Experiment Name: At_Germinating_Seeds_cDNA_P Parameter: Age (day) Value: 4 vs. 0
  misc_feature: MA Experiment 108464 PARAMETER Experiment Name: At_Germinating_Seeds_cDNA_P Parameter: Tissue Value: Germinating Seeds
  misc_feature: MA Experiment ID: 20000072 Result: Up-regulated in Transcription
  misc_feature: MA Experiment 20000072 PARAMETER Experiment Name: At_100uM_ABA_Mutants_cDNA_P Parameter: Plant Line Value: CS8105
  misc_feature: MA Experiment 20000072 PARAMETER Experiment Name: At_100uM_ABA_Mutants_cDNA_P Parameter: Timepoint (hr) Value: 6
  misc_feature: MA Experiment 20000072 PARAMETER Experiment Name: At_100uM_ABA_Mutants_cDNA_P Parameter: Tissue Value: Aerial
  misc_feature: MA Experiment 20000072 PARAMETER Experiment Name: At_100uM_ABA_Mutants_cDNA_P Parameter: Treatment Value: 100uM ABA vs. No Treatment
  misc_feature: MA Experiment ID: 20000090 Result: Up-regulated in Transcription
  misc_feature: MA Experiment ID: 20000314 Result: Down-regulated in Transcription
  misc_feature: MA Experiment 20000314 PARAMETER Experiment Name: At_14day_Shoots-Roots_Sub_P Parameter: Age (day) Value: 14
  misc_feature: MA Experiment 20000314 PARAMETER Experiment Name: At_14day_Shoots-Roots_Sub_P Parameter: Organism Value: A. thaliana
  misc_feature: MA Experiment 20000314 PARAMETER Experiment Name: At_14day_Shoots-Roots_Sub_P Parameter: Plant Line Value: WS
  misc_feature: MA Experiment 20000314 PARAMETER Experiment Name: At_14day_Shoots-Roots_Sub_P Parameter: Tissue Value: Roots vs. Whole Plant
  misc_feature: MA Experiment ID: 20000315 Result: Down-regulated in Transcription
  misc_feature: MA Experiment 20000315 PARAMETER Experiment Name: At_14day_Shoots-Roots_Sub_P Parameter: Age (day) Value: 14
  misc_feature: MA Experiment 20000315 PARAMETER Experiment Name: At_14day_Shoots-Roots_Sub_P Parameter: Organism Value: A. thaliana
  misc_feature: MA Experiment 20000315 PARAMETER Experiment Name: At_14day_Shoots-Roots_Sub_P Parameter: Plant Line Value: WS
  misc_feature: MA Experiment 20000315 PARAMETER Experiment Name: At_14day_Shoots-Roots_Sub_P Parameter: Tissue Value: Shoots vs. Whole Plant
  misc_feature: MA Experiment ID: 20000332 Result: Down-regulated in Transcription
  misc_feature: MA Experiment 20000332 PARAMETER Experiment Name: At_4deg_Cold_Sub_P Parameter: Age (day) Value: 14
  misc_feature: MA Experiment 20000332 PARAMETER Experiment Name: At_4deg_Cold_Sub_P Parameter: Organism Value: A. thaliana
  misc_feature: MA Experiment 20000332 PARAMETER Experiment Name: At_4deg_Cold_Sub_P Parameter: Plant Line Value: WS
  misc_feature: MA Experiment 20000332 PARAMETER Experiment Name: At_4deg_Cold_Sub_P Parameter: Temperature (deg C) Value: 4 vs. 22
  misc_feature: MA Experiment 20000332 PARAMETER Experiment Name: At_4deg_Cold_Sub_P Parameter: Timepoint (hr) Value: 2
  misc_feature: MA Experiment 20000332 PARAMETER Experiment Name: At_4deg_Cold_Sub_P Parameter: Tissue Value: Aerial
  misc_feature: MA Experiment ID: 20000355 Result: Down-regulated in Transcription
  misc_feature: MA Experiment 20000355 PARAMETER Experiment Name: At_Siliques_Sub_P Parameter: Age (day) Value: 21
  misc_feature: MA Experiment 20000355 PARAMETER Experiment Name: At_Siliques_Sub_P Parameter: Organism Value: A. thaliana
  misc_feature: MA Experiment 20000355 PARAMETER Experiment Name: At_Siliques_Sub_P Parameter: Plant Line Value: WS
  misc_feature: MA Experiment 20000355 PARAMETER Experiment Name: At_Siliques_Sub_P Parameter: Tissue Value: Less Than 5mm Siliques vs. Whole Plant
  misc_feature: MA Experiment ID: 20000440 Result: Down-regulated in Transcription
  misc_feature: MA Experiment 20000440 PARAMETER Experiment Name: At_Closed-Flower__Sub_P Parameter: Tissue Value: Closed Flower vs. Whole Plant
atcttcaatttttcatatttcgtttttaatttggttttcttttttcctctctatttcttcggctgagaggcggcgactatggcggaggaacagaagatagcgttagaatcagaatctccggcgaaggttacgactcctgctccagcagatacaccggctccagctccggcagagattccggctccagctccagctccgactccggctgatgtcacgaaagacgttgcagaggagaaaattcaaaacccacctccggagcaaattttcgatgactccaaagcccttactgttgttgagaaacctgtagaagagcctgcaccggcgaaacctgcgtctgcatcgctcgatagagatgttaagctagctgatttgtcaaaggaaaagagattgtctttcgtcagagcgtgggaagaaagcgaaaagagcaaagcagagaacaaagctgagaagaagattgcagatgttcatgcttgggaaaacagcaagaaagcagctgtcgaagcgcaactcaagaaaatcgaggagcaactagagaagaagaaagcagagtatgcagagaggatgaagaataaggttgcagcgattcacaaggaagcagaagagagaagagcaatgattgaagctaagcgtggagaagacgttcttaaagcagaagaaacggctgctaaatacagagccactggaattgttccaaaggcaacttgtggatgtttctaatcttgaatttgcgaatcaaagtttcaagacttcgtaactgtaaagtgtaatcaaatttctctgttctctttaatggcttgtaatgttgtttgtatattgattttgtgtgtgacaatcagagtgaaaaatatgtttcattgttttctttcc

SEQ ID NO: 25538 - protein, 212 aa, Arabidopsis thaliana
  peptide (1)..(212): Ceres Seq. ID no. 12321583
  misc_feature (100)..(209): Pfam Name: Remorin, C-terminal region Pfam Description: Remorin, C-terminal region
  misc_feature (49)..(212): Homolog of NCBI NO: 15229057 NR Description: remorin -like protein; protein id: At3g48940.1
  misc_feature (43)..(211): Homolog of NCBI NO: 4883530 NR Description: remorin 2 [Lycopersicon esculentum]
  misc_feature (9)..(211): Homolog of NCBI NO: 21555669 NR Description: remorin [Arabidopsis thaliana]
  misc_feature (9)..(211): Homolog of NCBI NO: 15237822 NR Description: putative protein
  misc_feature (9)..(212): Homolog of NCBI NO: 4731573 NR Description: remorin 1 [Lycopersicon esculentum]
  misc_feature (34)..(212): Homolog of NCBI NO: 34925093 NR Description: Remorin (pp34)
  misc_feature (1)..(212): Homolog of NCBI NO: 32489830 NR Description: OSJNBb0039L24.13 [Oryza sativa (japonica
  misc_feature (24)..(212): Homolog of NCBI NO: 601843 NR Description: DNA-binding protein
  misc_feature (24)..(212): Homolog of NCBI NO: 15225899 NR Description: remorin
  misc_feature (1)..(212): Homolog of NCBI NO: 15233068 NR Description: putative DNA-binding protein
MAEEQKIALESESPAKVTTPAPADTPAPAPAEIPAPAPAPTPADVTKDVAEEKIQNPPPEQIFDDSKALTVVEKPVEEPAPAKPASASLDRDVKLADLSKEKRLSFVRAWEESEKSKAENKAEKKIADVHAWENSKKAAVEAQLKKIEEQLEKKKAEYAERMKNKVAAIHKEAEERRAMIEAKRGEDVLKAEETAAKYRATGIVPKATCGCF

SEQ ID NO: 25539 - DNA, 1650 bp, Arabidopsis thaliana
  misc_feature (1)..(1650): Ceres Seq. ID no. 13497507
  misc_feature: MA Experiment ID: 108434 Result: Down-regulated in Transcription
  misc_feature: MA Experiment 108434 PARAMETER Experiment Name: At_Root_Tips_cDNA_P Parameter: Tissue Value: Root Tips
  misc_feature: MA Experiment ID: 108435 Result: Down-regulated in Transcription
  misc_feature: MA Experiment 108435 PARAMETER Experiment Name: At_stm_Mutants_cDNA_P Parameter: Plant Line Value: wt Landsburg vs stm
  misc_feature: MA Experiment 108435 PARAMETER Experiment Name: At_stm_Mutants_cDNA_P Parameter: Tissue Value: Shoot Apical Meristem Region
  misc_feature: MA Experiment ID: 108462 Result: Up-regulated in Transcription
  misc_feature: MA Experiment 108462 PARAMETER Experiment Name: At_Germinating_Seeds_cDNA_P Parameter: Age (day) Value: 2 vs. 0
  misc_feature: MA Experiment 108462 PARAMETER Experiment Name: At_Germinating_Seeds_cDNA_P Parameter: Tissue Value: Germinating Seeds
  misc_feature: MA Experiment ID: 108464 Result: Up-regulated in Transcription
  misc_feature: MA Experiment 108464 PARAMETER Experiment Name: At_Germinating_Seeds_cDNA_P Parameter: Age (day) Value: 4 vs. 0
  misc_feature: MA Experiment 108464 PARAMETER Experiment Name: At_Germinating_Seeds_cDNA_P Parameter: Tissue Value: Germinating Seeds
  misc_feature: MA Experiment ID: 108488 Result: Down-regulated in Transcription
  misc_feature: MA Experiment ID: 108573 Result: Up-regulated in Transcription
  misc_feature: MA Experiment 108573 PARAMETER Experiment Name: At_Drought_cDNA_P Parameter: Timepoint (hr) Value: 6
  misc_feature: MA Experiment 108573 PARAMETER Experiment Name: At_Drought_cDNA_P Parameter: Tissue Value: Aerial
  misc_feature: MA Experiment 108573 PARAMETER Experiment Name: At_Drought_cDNA_P Parameter: Treatment Value: Drought vs. No Drought
  misc_feature: MA Experiment ID: 108574 Result: Up-regulated in Transcription
  misc_feature: MA Experiment 108574 PARAMETER Experiment Name: At_Wounding__cDNA_P Parameter: Timepoint (hr) Value: 1
  misc_feature: MA Experiment 108574 PARAMETER Experiment Name: At_Wounding__cDNA_P Parameter: Tissue Value: Aerial
  misc_feature: MA Experiment 108574 PARAMETER Experiment Name: At_Wounding__cDNA_P Parameter: Treatment Value: Wounding vs. No Wounding
  misc_feature: MA Experiment ID: 108576 Result: Up-regulated in Transcription
  misc_feature: MA Experiment 108576 PARAMETER Experiment Name: At_42deg_Heat_cDNA_P Parameter: Temperature (deg C) Value: 42 vs. 22
  misc_feature: MA Experiment 108576 PARAMETER Experiment Name: At_42deg_Heat_cDNA_P Parameter: Timepoint (hr) Value: 1
  misc_feature: MA Experiment 108576 PARAMETER Experiment Name: At_42deg_Heat_cDNA_P Parameter: Tissue Value: Aerial
  misc_feature: MA Experiment ID: 108577 Result: Up-regulated in Transcription
  misc_feature: MA Experiment 108577 PARAMETER Experiment Name: At_42deg_Heat_cDNA_P Parameter: Temperature (deg C) Value: 42 vs. 22
  misc_feature: MA Experiment 108577 PARAMETER Experiment Name: At_42deg_Heat_cDNA_P Parameter: Timepoint (hr) Value: 6
  misc_feature: MA Experiment 108577 PARAMETER Experiment Name: At_42deg_Heat_cDNA_P Parameter: Tissue Value: Aerial
  misc_feature: MA Experiment ID: 108579 Result: Up-regulated in Transcription
  misc_feature: MA Experiment 108579 PARAMETER Experiment Name: At_4deg_Cold_cDNA_P Parameter: Temperature (deg C) Value: 4 vs. 22
  misc_feature: MA Experiment 108579 PARAMETER Experiment Name: At_4deg_Cold_cDNA_P Parameter: Timepoint (hr) Value: 6
  misc_feature: MA Experiment 108579 PARAMETER Experiment Name: At_4deg_Cold_cDNA_P Parameter: Tissue Value: Aerial
  misc_feature: MA Experiment ID: 108595 Result: Up-regulated in Transcription
  misc_feature: MA Experiment 108595 PARAMETER Experiment Name: At_Ler-pi_Ovule_cDNA_P Parameter: Plant Line Value: null
  misc_feature: MA Experiment ID: 108608 Result: Up-regulated in Transcription
  misc_feature: MA Experiment 108608 PARAMETER Experiment Name: At_100uM_ABA_cDNA_P Parameter: Timepoint (hr) Value: 1
  misc_feature: MA Experiment 108608 PARAMETER Experiment Name: At_100uM_ABA_cDNA_P Parameter: Tissue Value: Aerial
  misc_feature: MA Experiment 108608 PARAMETER Experiment Name: At_100uM_ABA_cDNA_P Parameter: Treatment Value: 100uM ABA vs. No Treatment
  misc_feature: MA Experiment ID: 108667 Result: Up-regulated in Transcription
  misc_feature: MA Experiment 108667 PARAMETER Experiment Name: At_2mM_SA_cDNA_P Parameter: Plant Line Value: WS
  misc_feature: MA Experiment 108667 PARAMETER Experiment Name: At_2mM_SA_cDNA_P Parameter: Timepoint (hr) Value: 1
  misc_feature: MA Experiment 108667 PARAMETER Experiment Name: At_2mM_SA_cDNA_P Parameter: Treatment Value: 2mM SA vs. No Treatment
  misc_feature: MA Experiment ID: 20000069 Result: Up-regulated in Transcription
  misc_feature: MA Experiment 20000069 PARAMETER Experiment Name: At_100uM_ABA_Mutants_cDNA_P Parameter: Plant Line Value: CS23
  misc_feature: MA Experiment 20000069 PARAMETER Experiment Name: At_100uM_ABA_Mutants_cDNA_P Parameter: Timepoint (hr) Value: 6
  misc_feature: MA Experiment 20000069 PARAMETER Experiment Name: At_100uM_ABA_Mutants_cDNA_P Parameter: Tissue Value: Aerial
  misc_feature: MA Experiment 20000069 PARAMETER Experiment Name: At_100uM_ABA_Mutants_cDNA_P Parameter: Treatment Value: 100uM ABA vs. No Treatment
  misc_feature: MA Experiment ID: 20000070 Result: Up-regulated in Transcription
  misc_feature: MA Experiment 20000070 PARAMETER Experiment Name: At_100uM_ABA_Mutants_cDNA_P Parameter: Plant Line Value: CS24
  misc_feature: MA Experiment 20000070 PARAMETER Experiment Name: At_100uM_ABA_Mutants_cDNA_P Parameter: Timepoint (hr) Value: 6
  misc_feature: MA Experiment 20000070 PARAMETER Experiment Name: At_100uM_ABA_Mutants_cDNA_P Parameter: Tissue Value: Aerial
  misc_feature: MA Experiment 20000070 PARAMETER Experiment Name: At_100uM_ABA_Mutants_cDNA_P Parameter: Treatment Value: 100uM ABA vs. No Treatment
  misc_feature: MA Experiment ID: 20000071 Result: Up-regulated in Transcription
  misc_feature: MA Experiment 20000071 PARAMETER Experiment Name: At_100uM_ABA_Mutants_cDNA_P Parameter: Plant Line Value: CS8104
  misc_feature: MA Experiment 20000071 PARAMETER Experiment Name: At_100uM_ABA_Mutants_cDNA_P Parameter: Timepoint (hr) Value: 6
  misc_feature: MA Experiment 20000071 PARAMETER Experiment Name: At_100uM_ABA_Mutants_cDNA_P Parameter: Tissue Value: Aerial
  misc_feature: MA Experiment 20000071 PARAMETER Experiment Name: At_100uM_ABA_Mutants_cDNA_P Parameter: Treatment Value: 100uM ABA vs. No Treatment
  misc_feature: MA Experiment ID: 20000072 Result: Up-regulated in Transcription
  misc_feature: MA Experiment 20000072 PARAMETER Experiment Name: At_100uM_ABA_Mutants_cDNA_P Parameter: Plant Line Value: CS8105
  misc_feature: MA Experiment 20000072 PARAMETER Experiment Name: At_100uM_ABA_Mutants_cDNA_P Parameter: Timepoint (hr) Value: 6
  misc_feature: MA Experiment 20000072 PARAMETER Experiment Name: At_100uM_ABA_Mutants_cDNA_P Parameter: Tissue Value: Aerial
  misc_feature: MA Experiment 20000072 PARAMETER Experiment Name: At_100uM_ABA_Mutants_cDNA_P Parameter: Treatment Value: 100uM ABA vs. No Treatment
  misc_feature: MA Experiment ID: 20000087 Result: Up-regulated in Transcription
  misc_feature: MA Experiment 20000087 PARAMETER Experiment Name: At_100uM_ABA_Mutants_cDNA_P Parameter: Plant Line Value: WS
  misc_feature: MA Experiment 20000087 PARAMETER Experiment Name: At_100uM_ABA_Mutants_cDNA_P Parameter: Timepoint (hr) Value: 6
  misc_feature: MA Experiment 20000087 PARAMETER Experiment Name: At_100uM_ABA_Mutants_cDNA_P Parameter: Tissue Value: Aerial
  misc_feature: MA Experiment 20000087 PARAMETER Experiment Name: At_100uM_ABA_Mutants_cDNA_P Parameter: Treatment Value: 100uM ABA vs. No Treatment
  misc_feature: MA Experiment ID: 20000088 Result: Up-regulated in Transcription
  misc_feature: MA Experiment 20000088 PARAMETER Experiment Name: At_100uM_ABA_Mutants_cDNA_P Parameter: Plant Line Value: Landsberg
  misc_feature: MA Experiment 20000088 PARAMETER Experiment Name: At_100uM_ABA_Mutants_cDNA_P Parameter: Timepoint (hr) Value: 6
  misc_feature: MA Experiment 20000088 PARAMETER Experiment Name: At_100uM_ABA_Mutants_cDNA_P Parameter: Tissue Value: Aerial
  misc_feature: MA Experiment 20000088 PARAMETER Experiment Name: At_100uM_ABA_Mutants_cDNA_P Parameter: Treatment Value: 100uM ABA vs. No Treatment
  misc_feature: MA Experiment ID: 20000089 Result: Up-regulated in Transcription
  misc_feature: MA Experiment ID: 20000090 Result: Up-regulated in Transcription
  misc_feature: MA Experiment ID: 20000111 Result: Up-regulated in Transcription
  misc_feature: MA Experiment 20000111 PARAMETER Experiment Name: At_42deg_Heat_cDNA_P Parameter: Temperature (deg C) Value: 42 vs. 22
  misc_feature: MA Experiment 20000111 PARAMETER Experiment Name: At_42deg_Heat_cDNA_P Parameter: Timepoint (hr) Value: 6
  misc_feature: MA Experiment 20000111 PARAMETER Experiment Name: At_42deg_Heat_cDNA_P Parameter: Tissue Value: Aerial
  misc_feature: MA Experiment ID: 20000112 Result: Up-regulated in Transcription
  misc_feature: MA Experiment 20000112 PARAMETER Experiment Name: At_42deg_Heat_cDNA_P Parameter: Temperature (deg C) Value: 42 vs. 22
  misc_feature: MA Experiment 20000112 PARAMETER Experiment Name: At_42deg_Heat_cDNA_P Parameter: Timepoint (hr) Value: 2
  misc_feature: MA Experiment 20000112 PARAMETER Experiment Name: At_42deg_Heat_cDNA_P Parameter: Tissue Value: Aerial
  misc_feature: MA Experiment ID: 20000113 Result: Up-regulated in Transcription
  misc_feature: MA Experiment 20000113 PARAMETER Experiment Name: At_42deg_Heat_cDNA_P Parameter: Temperature (deg C) Value: 42 vs. 22
  misc_feature: MA Experiment 20000113 PARAMETER Experiment Name: At_42deg_Heat_cDNA_P Parameter: Timepoint (hr) Value: 8
  misc_feature: MA Experiment 20000113 PARAMETER Experiment Name: At_42deg_Heat_cDNA_P Parameter: Tissue Value: Aerial
  misc_feature: MA Experiment ID: 20000117 Result: Up-regulated in Transcription
  misc_feature: MA Experiment 20000117 PARAMETER Experiment Name: At_100uM_ABA_Mutants_cDNA_P Parameter: Plant Line Value: Columbia
  misc_feature: MA Experiment 20000117 PARAMETER Experiment Name: At_100uM_ABA_Mutants_cDNA_P Parameter: Timepoint (hr) Value: 6
  misc_feature: MA Experiment 20000117 PARAMETER Experiment Name: At_100uM_ABA_Mutants_cDNA_P Parameter: Tissue Value: Aerial
  misc_feature: MA Experiment 20000117 PARAMETER Experiment Name: At_100uM_ABA_Mutants_cDNA_P Parameter: Treatment Value: 100uM ABA vs. No Treatment
  misc_feature: MA Experiment ID: 20000144 Result: Up-regulated in Transcription
  misc_feature: MA Experiment 20000144 PARAMETER Experiment Name: At_42deg_Heat_cDNA_P Parameter: Temperature (deg C) Value: 42 vs. 22
  misc_feature: MA Experiment 20000144 PARAMETER Experiment Name: At_42deg_Heat_cDNA_P Parameter: Timepoint (hr) Value: 1
  misc_feature: MA Experiment 20000144 PARAMETER Experiment Name: At_42deg_Heat_cDNA_P Parameter: Tissue Value: Aerial
  misc_feature: MA Experiment ID: 20000166 Result: Up-regulated in Transcription
  misc_feature: MA Experiment 20000166 PARAMETER Experiment Name: At_100uM_ABA_P Parameter: Age (day) Value: 14
  misc_feature: MA Experiment 20000166 PARAMETER Experiment Name: At_100uM_ABA_P Parameter: Organism Value: A. thaliana
  misc_feature: MA Experiment 20000166 PARAMETER Experiment Name: At_100uM_ABA_P Parameter: Plant Line Value: WS
  misc_feature: MA Experiment 20000166 PARAMETER Experiment Name: At_100uM_ABA_P Parameter: Timepoint (hr) Value: 1
  misc_feature: MA Experiment 20000166 PARAMETER Experiment Name: At_100uM_ABA_P Parameter: Tissue Value: Aerial
  misc_feature: MA Experiment 20000166 PARAMETER Experiment Name: At_100uM_ABA_P Parameter: Treatment Value: 100uM ABA vs. No Treatment
  misc_feature: MA Experiment ID: 20000171 Result: Up-regulated in Transcription
  misc_feature: MA Experiment 20000171 PARAMETER Experiment Name: At_42deg_Heat_P Parameter: Age (day) Value: 14
  misc_feature: MA Experiment 20000171 PARAMETER Experiment Name: At_42deg_Heat_P Parameter: Organism Value: A. thaliana
  misc_feature: MA Experiment 20000171 PARAMETER Experiment Name: At_42deg_Heat_P Parameter: Plant Line Value: WS
  misc_feature: MA Experiment 20000171 PARAMETER Experiment Name: At_42deg_Heat_P Parameter: Temperature (deg C) Value: 42 vs. 22
  misc_feature: MA Experiment 20000171 PARAMETER Experiment Name: At_42deg_Heat_P Parameter: Timepoint (hr) Value: 1
  misc_feature: MA Experiment 20000171 PARAMETER Experiment Name: At_42deg_Heat_P Parameter: Tissue Value: Aerial
  misc_feature: MA Experiment ID: 20000173 Result: Up-regulated in Transcription
  misc_feature: MA Experiment 20000173 PARAMETER Experiment Name: At_42deg_Heat_P Parameter: Age (day) Value: 14
  misc_feature: MA Experiment 20000173 PARAMETER Experiment Name: At_42deg_Heat_P Parameter: Organism Value: A. thaliana
  misc_feature: MA Experiment 20000173 PARAMETER Experiment Name: At_42deg_Heat_P Parameter: Plant Line Value: WS
  misc_feature: MA Experiment 20000173 PARAMETER Experiment Name: At_42deg_Heat_P Parameter: Temperature (deg C) Value: 42 vs. 22
  misc_feature: MA Experiment 20000173 PARAMETER Experiment Name: At_42deg_Heat_P Parameter: Timepoint (hr) Value: 6
  misc_feature: MA Experiment 20000173 PARAMETER Experiment Name: At_42deg_Heat_P Parameter: Tissue Value: Aerial
  misc_feature: MA Experiment ID: 20000182 Result: Up-regulated in Transcription
  misc_feature: MA Experiment 20000182 PARAMETER Experiment Name: At_2mM_SA_P Parameter: Age (day) Value: 14
  misc_feature: MA Experiment 20000182 PARAMETER Experiment Name: At_2mM_SA_P Parameter: Organism Value: A. thaliana
  misc_feature: MA Experiment 20000182 PARAMETER Experiment Name: At_2mM_SA_P Parameter: Plant Line Value: WS
  misc_feature: MA Experiment 20000182 PARAMETER Experiment Name: At_2mM_SA_P Parameter: Timepoint (hr) Value: 6
  misc_feature: MA Experiment 20000182 PARAMETER Experiment Name: At_2mM_SA_P Parameter: Tissue Value: Aerial
  misc_feature: MA Experiment 20000182 PARAMETER Experiment Name: At_2mM_SA_P Parameter: Treatment Value: 2mM SA vs. No Treatment
  misc_feature: MA Experiment ID: 20000184 Result: Down-regulated in Transcription
  misc_feature: MA Experiment 20000184 PARAMETER Experiment Name: At_Shoots__P Parameter: Age (day) Value: 7
  misc_feature: MA Experiment 20000184 PARAMETER Experiment Name: At_Shoots__P Parameter: Tissue Value: Shoots vs. Whole Plant
  misc_feature: MA Experiment ID: 20000185 Result: Down-regulated in Transcription
  misc_feature: MA Experiment 20000185 PARAMETER Experiment Name: At_Roots__P Parameter: Age (day) Value: 7 vs. 21
  misc_feature: MA Experiment 20000185 PARAMETER Experiment Name: At_Roots__P Parameter: Organism Value: A. thaliana
  misc_feature: MA Experiment 20000185 PARAMETER Experiment Name: At_Roots__P Parameter: Tissue Value: Roots vs. Whole Plant
  misc_feature: MA Experiment ID: 20000214 Result: Up-regulated in Transcription
  misc_feature: MA Experiment 20000214 PARAMETER Experiment Name: At_4deg_Cold_P Parameter: Timepoint (hr) Value: 6
  misc_feature: MA Experiment ID: 20000224 Result: Down-regulated in Transcription
  misc_feature: MA Experiment ID: 20000234 Result: Down-regulated in Transcription
  misc_feature: MA Experiment 20000234 PARAMETER Experiment Name: At_Siliques_P Parameter: Age (day) Value: 21
  misc_feature: MA Experiment 20000234 PARAMETER Experiment Name: At_Siliques_P Parameter: Organism Value: A. thaliana
  misc_feature: MA Experiment 20000234 PARAMETER Experiment Name: At_Siliques_P Parameter: Plant Line Value: WS
  misc_feature: MA Experiment 20000234 PARAMETER Experiment Name: At_Siliques_P Parameter: Tissue Value: Less Than 5mm Siliques vs. Whole Plant
  misc_feature: MA Experiment ID: 20000265 Result: Down-regulated in Transcription
  misc_feature: MA Experiment 20000265 PARAMETER Experiment Name: At_Open_Flower_P Parameter: Age (day) Value: 21
  misc_feature: MA Experiment 20000265 PARAMETER Experiment Name: At_Open_Flower_P Parameter: Plant Line Value: WS
  misc_feature: MA Experiment 20000265 PARAMETER Experiment Name: At_Open_Flower_P Parameter: Tissue Value: Closed Flower vs. Whole Plant
  misc_feature: MA Experiment ID: 20000267 Result: Up-regulated in Transcription
  misc_feature: MA Experiment 20000267 PARAMETER Experiment Name: At_Drought_P Parameter: Age (day) Value: 7
  misc_feature: MA Experiment 20000267 PARAMETER Experiment Name: At_Drought_P Parameter: Organism Value: A. thaliana
  misc_feature: MA Experiment 20000267 PARAMETER Experiment Name: At_Drought_P Parameter: Plant Line Value: WS
  misc_feature: MA Experiment 20000267 PARAMETER Experiment Name: At_Drought_P Parameter: Timepoint (hr) Value: 6
  misc_feature: MA Experiment 20000267 PARAMETER Experiment Name: At_Drought_P Parameter: Tissue Value: Whole Plant
  misc_feature: MA Experiment 20000267 PARAMETER Experiment Name: At_Drought_P Parameter: Treatment Value: Drought vs. No Drought
  misc_feature: MA Experiment ID: 20000268 Result: Up-regulated in Transcription
  misc_feature: MA Experiment 20000268 PARAMETER Experiment Name: At_100mM_NaCl__P Parameter: Age (day) Value: 14
  misc_feature: MA Experiment 20000268 PARAMETER Experiment Name: At_100mM_NaCl__P Parameter: Organism Value: A. thaliana
  misc_feature: MA Experiment 20000268 PARAMETER Experiment Name: At_100mM_NaCl__P Parameter: Plant Line Value: WS
  misc_feature: MA Experiment 20000268 PARAMETER Experiment Name: At_100mM_NaCl__P Parameter: Timepoint (hr) Value: 6
  misc_feature: MA Experiment 20000268 PARAMETER Experiment Name: At_100mM_NaCl__P Parameter: Tissue Value: Whole Plant
  misc_feature: MA Experiment 20000268 PARAMETER Experiment Name: At_100mM_NaCl__P Parameter: Treatment Value: 100mM NaCl vs. No Treatment
  misc_feature: MA Experiment ID: 20000286 Result: Down-regulated in Transcription
  misc_feature: MA Experiment 20000286 PARAMETER Experiment Name: At_Open_Flower_P Parameter: Age (day) Value: 21
  misc_feature: MA Experiment 20000286 PARAMETER Experiment Name: At_Open_Flower_P Parameter: Plant Line Value: WS
  misc_feature: MA Experiment 20000286 PARAMETER Experiment Name: At_Open_Flower_P Parameter: Tissue Value: Half Open vs. Whole Plant
  misc_feature: MA Experiment ID: 20000436 Result: Up-regulated in Transcription
  misc_feature: MA Experiment 20000436 PARAMETER Experiment Name: At_Drought_P Parameter: Age (day) Value: 7
  misc_feature: MA Experiment 20000436 PARAMETER Experiment Name: At_Drought_P Parameter: Organism Value: A. thaliana
  misc_feature: MA Experiment 20000436 PARAMETER Experiment Name: At_Drought_P Parameter: Plant Line Value: WS
  misc_feature: MA Experiment 20000436 PARAMETER Experiment Name: At_Drought_P Parameter: Timepoint (hr) Value: 12
  misc_feature: MA Experiment 20000436 PARAMETER Experiment Name: At_Drought_P Parameter: Tissue Value: Whole Plant
  misc_feature: MA Experiment 20000436 PARAMETER Experiment Name: At_Drought_P Parameter: Treatment Value: Drought vs. No Drought
  misc_feature: MA Experiment ID: 20000437 Result: Up-regulated in Transcription
  misc_feature: MA Experiment 20000437 PARAMETER Experiment Name: At_Drought_P Parameter: Age (day) Value: 8
  misc_feature: MA Experiment 20000437 PARAMETER Experiment Name: At_Drought_P Parameter: Organism Value: A. thaliana
  misc_feature: MA Experiment 20000437 PARAMETER Experiment Name: At_Drought_P Parameter: Plant Line Value: WS
  misc_feature: MA Experiment 20000437 PARAMETER Experiment Name: At_Drought_P Parameter: Timepoint (hr) Value: 24
  misc_feature: MA Experiment 20000437 PARAMETER Experiment Name: At_Drought_P Parameter: Tissue Value: Whole Plant
  misc_feature: MA Experiment 20000437 PARAMETER Experiment Name: At_Drought_P Parameter: Treatment Value: Drought vs. No Drought
  misc_feature: MA Experiment ID: 20000438 Result: Down-regulated in Transcription
  misc_feature: MA Experiment 20000438 PARAMETER Experiment Name: At_Shoots__P Parameter: Age (day) Value: 14
  misc_feature: MA Experiment 20000438 PARAMETER Experiment Name: At_Shoots__P Parameter: Tissue Value: Shoots vs. Whole Plant
  misc_feature: MA Experiment ID: 20000439 Result: Down-regulated in Transcription
  misc_feature: MA Experiment 20000439 PARAMETER Experiment Name: At_Roots__P Parameter: Age (day) Value: 14 vs. 21
  misc_feature: MA Experiment 20000439 PARAMETER Experiment Name: At_Roots__P Parameter: Organism Value: A. thaliana
  misc_feature: MA Experiment 20000439 PARAMETER Experiment Name: At_Roots__P Parameter: Tissue Value: Roots vs. Whole Plant
  misc_feature: MA Experiment ID: 20000495 Result: Down-regulated in Transcription
  misc_feature: MA Experiment 20000495 PARAMETER Experiment Name: At_Guard_Cells_P Parameter: Harvest Date Value: 8/2/2002
  misc_feature: MA Experiment 20000495 PARAMETER Experiment Name: At_Guard_Cells_P Parameter: Organism Value: A. thaliana
  misc_feature: MA Experiment 20000495 PARAMETER Experiment Name: At_Guard_Cells_P Parameter: Tissue Value: Guard Cells vs. Leaves
  misc_feature: MA Experiment ID: 20001247 Result: Down-regulated in Transcription
  misc_feature: MA Experiment 20001247 PARAMETER Experiment Name: At_Far-red-induction_P Parameter: Age (day) Value: 7
  misc_feature: MA Experiment 20001247 PARAMETER Experiment Name: At_Far-red-induction_P Parameter: Light Value: Far-red vs. White
  misc_feature: MA Experiment 20001247 PARAMETER Experiment Name: At_Far-red-induction_P Parameter: Organism Value: A. thaliana
  misc_feature: MA Experiment 20001247 PARAMETER Experiment Name: At_Far-red-induction_P Parameter: Plant Line Value: Columbia
  misc_feature: MA Experiment 20001247 PARAMETER Experiment Name: At_Far-red-induction_P Parameter: Timepoint (hr) Value: 1
  misc_feature: MA Experiment 20001247 PARAMETER Experiment Name: At_Far-red-induction_P Parameter: Tissue Value: Whole Plant
  misc_feature: MA Experiment ID: 20001248 Result: Up-regulated in Transcription
  misc_feature: MA Experiment 20001248 PARAMETER Experiment Name: At_Far-red-induction_P Parameter: Age (day) Value: 7
  misc_feature: MA Experiment 20001248 PARAMETER Experiment Name: At_Far-red-induction_P Parameter: Light Value: Far-red vs. White
  misc_feature: MA Experiment 20001248 PARAMETER Experiment Name: At_Far-red-induction_P Parameter: Organism Value: A. thaliana
  misc_feature: MA Experiment 20001248 PARAMETER Experiment Name: At_Far-red-induction_P Parameter: Plant Line Value: Columbia
  misc_feature: MA Experiment 20001248 PARAMETER Experiment Name: At_Far-red-induction_P Parameter: Timepoint (hr) Value: 4
  misc_feature: MA Experiment 20001248 PARAMETER Experiment Name: At_Far-red-induction_P Parameter: Tissue Value: Whole Plant
  misc_feature: MA Experiment ID: 20001451 Result: Down-regulated in Transcription
  misc_feature: MA Experiment 20001451 PARAMETER Experiment Name: At_Far-red-induction_P Parameter: Age (day) Value: 7
  misc_feature: MA Experiment 20001451 PARAMETER Experiment Name: At_Far-red-induction_P Parameter: Light Value: Far-red vs. White
  misc_feature: MA Experiment 20001451 PARAMETER Experiment Name: At_Far-red-induction_P Parameter: Organism Value: A. thaliana
  misc_feature: MA Experiment 20001451 PARAMETER Experiment Name: At_Far-red-induction_P Parameter: Plant Line Value: Columbia
  misc_feature: MA Experiment 20001451 PARAMETER Experiment Name: At_Far-red-induction_P Parameter: Timepoint (hr) Value: 24
  misc_feature: MA Experiment 20001451 PARAMETER Experiment Name: At_Far-red-induction_P Parameter: Tissue Value: Whole Plant
  misc_feature: MA Experiment ID: 20001554 Result: Up-regulated in Transcription
  misc_feature: MA Experiment 20001554 PARAMETER Experiment Name: At_Drought_Soil_Dry_P Parameter: Age (day) Value: 21
  misc_feature: MA Experiment 20001554 PARAMETER Experiment Name: At_Drought_Soil_Dry_P Parameter: Organism Value: A. thaliana
  misc_feature: MA Experiment 20001554 PARAMETER Experiment Name: At_Drought_Soil_Dry_P Parameter: Plant Line Value: WS
  misc_feature: MA Experiment 20001554 PARAMETER Experiment Name: At_Drought_Soil_Dry_P Parameter: Post Timepoint (hr) Value: None
  misc_feature: MA Experiment 20001554 PARAMETER Experiment Name: At_Drought_Soil_Dry_P Parameter: Post-Treatment Value: None
  misc_feature: MA Experiment 20001554 PARAMETER Experiment Name: At_Drought_Soil_Dry_P Parameter: Timepoint (day) Value: 7
  misc_feature: MA Experiment 20001554 PARAMETER Experiment Name: At_Drought_Soil_Dry_P Parameter: Treatment Value: Drought vs. No Drought
  misc_feature: MA Experiment ID: 20001558 Result: Down-regulated in Transcription
  misc_feature: MA Experiment 20001558 PARAMETER Experiment Name: At_Drought_Soil_Dry_P Parameter: Age (day) Value: 27
  misc_feature: MA Experiment 20001558 PARAMETER Experiment Name: At_Drought_Soil_Dry_P Parameter: Organism Value: A. thaliana
  misc_feature: MA Experiment 20001558 PARAMETER Experiment Name: At_Drought_Soil_Dry_P Parameter: Plant Line Value: WS
  misc_feature: MA Experiment 20001558 PARAMETER Experiment Name: At_Drought_Soil_Dry_P Parameter: Post Timepoint (hr) Value: 6
  misc_feature: MA Experiment 20001558 PARAMETER Experiment Name: At_Drought_Soil_Dry_P Parameter: Post-Treatment Value: Re-Water vs. No Drought
  misc_feature: MA Experiment 20001558 PARAMETER Experiment Name: At_Drought_Soil_Dry_P Parameter: Timepoint (day) Value: 13
  misc_feature: MA Experiment 20001558 PARAMETER Experiment Name: At_Drought_Soil_Dry_P Parameter: Treatment Value: Drought vs. No Drought
  misc_feature: MA Experiment ID: 20001560 Result: Down-regulated in Transcription
  misc_feature: MA Experiment 20001560 PARAMETER Experiment Name: At_Drought_Soil_Dry_P Parameter: Age (day) Value: 28
  misc_feature: MA Experiment 20001560 PARAMETER Experiment Name: At_Drought_Soil_Dry_P Parameter: Organism Value: A. thaliana
  misc_feature: MA Experiment 20001560 PARAMETER Experiment Name: At_Drought_Soil_Dry_P Parameter: Plant Line Value: WS
  misc_feature: MA Experiment 20001560 PARAMETER Experiment Name: At_Drought_Soil_Dry_P Parameter: Post Timepoint (hr) Value: None
  misc_feature: MA Experiment 20001560 PARAMETER Experiment Name: At_Drought_Soil_Dry_P Parameter: Post-Treatment Value: None
  misc_feature: MA Experiment 20001560 PARAMETER Experiment Name: At_Drought_Soil_Dry_P Parameter: Timepoint (day) Value: 14
  misc_feature: MA Experiment 20001560 PARAMETER Experiment Name: At_Drought_Soil_Dry_P Parameter: Treatment Value: Drought vs. No Drought
  misc_feature: MA Experiment ID: 20001761 Result: Down-regulated in Transcription
  misc_feature: MA Experiment 20001761 PARAMETER Experiment Name: At_50mM_NH4NO3_L-to-H_P Parameter: Timepoint (hr) Value: 4
  misc_feature: MA Experiment 20001761 PARAMETER Experiment Name: At_50mM_NH4NO3_L-to-H_P Parameter: Tissue Value: Siliques
  misc_feature: MA Experiment 20001761 PARAMETER Experiment Name: At_50mM_NH4NO3_L-to-H_P Parameter: Treatment Value: 50mM NH4NO3 vs 100mM Mannitol
aaccaagtcaatcattcttcattgatcttctccgatttgaaatcgccggcgaaaatggaatcctccggcgacaagcaaacttcttctctttaccctactgttgacacatccaatcccgaagctcctataaaccctagctcatcatcttctactaacaatctctatccttctctcgatatgaatgatctcgctcgtaatctcttccctgaacaaccagagacgagttctattccggtttcagctcctcccgctgcgacggaggaagtaattttgaaaatctccggcgcgattcttcatttaatcgacaaatcttacagcgtcgagctcgcttgcggtgatcttgagatcatccgtattgttcaaggagagaatgttgtcgctgttctcgctagtgtctccgatgagattcaatggccgttgactaaggatgagaactctgtcaaggtcgatgagtctcattacttcttcacgcttcgtcctaccaaagagatctcacatgattcaagcgacgaagaagacggagatggagggaaaaacactaacgagatgttgaactacggacttacaattgcttctaaaggtcaagagcatttactggtggagcttgagaagatcttggaggattatagtagtttctctgtgcaggaggtgtcagaggaagcgaaggaagcaggtgaaaaggttttggatgtgacggtggcgagagagacgtctccggtggagcttactggggaaaggaaagagattgtggagaggcaatgttctgcttattggactactttggctccgaatgtggaggattatagcgggaaggcggcgaagctgattgcaactggctcaggacatttgataaaagggattctttggtgtggagatgtgactatggataggcttatttggggaaatggtttcatgaaaaggaggttgtcaaaggctgagaaggagagtgaagttcaccctgacaccttgaaaagaatcagaagagtgaagaggatgaccaaaatgacagagagtgtagcaaacagcatactgtctggagtccttaaagtttctggattcttcacaagttcagtggcaaacaccaaagtaggaaagaaattcttcagccttcttcctggagaagtcatccttgcatctcttgacggattcaataaggtctgtgacgctgttgaagtagctgggaggaatgtaatgtcaacctcttccactgttacaaccgaactcgttgatcacaagtatggtggtaaagcggctgaggcgacaaacgaagggctcgatgcagcaggatatgcgcttggcacagcctgggttgctttcaaaataagaaaggctattaacccgaagagtgtactcaagccttcgacgcttgcaaaaaccgccattagatctgcagcttcacaaaaaaaagcctagtaaggctgcctgatgaagcaaaacagactcattggtcctgtttgtttgtatcgtcttgttgtcttttgataaataagttaaactaaaaagaggtgtggattagtagttgttgtgaagtgtttatgtttctctatgagaatcatgtaatgtctctgatttgattcggaatatgtgctgtatgtgtaagtggtcaaatcaagattccttgaaattagttttcatgtttttttaacgtgc

SEQ ID NO: 25540 - protein, 470 aa, Arabidopsis thaliana
  peptide (1)..(470): Ceres Seq. ID no. 13497508
  misc_feature (258)..(462): Homolog of NCBI NO: 26450712 NR Description: unknown protein [Arabidopsis thaliana]
  misc_feature (255)..(470): Homolog of NCBI NO: 3551958 NR Description: senescence-associated protein 12 [Hemerocallis
  misc_feature (35)..(191): Homolog of NCBI NO: 18855022 NR Description: putative senescence-associated protein [Oryza
  misc_feature (251)..(470): Homolog of NCBI NO: 18855022 NR Description: putative senescence-associated protein [Oryza
  misc_feature (24)..(459): Homolog of NCBI NO: 15230434 NR Description: expressed protein [Arabidopsis thaliana]
  misc_feature (30)..(459): Homolog of NCBI NO: 7486396 NR Description: hypothetical protein F4B14.250 - Arabidopsis
  misc_feature (30)..(469): Homolog of NCBI NO: 18419759 NR Description: hypothetical protein [Arabidopsis thaliana]
  misc_feature (34)..(469): Homolog of NCBI NO: 15320412 NR Description: ERD7 protein [Arabidopsis thaliana]
  misc_feature (19)..(470): Homolog of NCBI NO: 21593641 NR Description: putative senescence-associated protein 12
  misc_feature (19)..(470): Homolog of NCBI NO: 15227905 NR Description: senescence-associated protein 12 -related
NQVNHSSLIFSDLKSPAKMESSGDKQTSSLYPTVDTSNPEAPINPSSSSSTNNLYPSLDMNDLARNLFPEQPETSSIPVSAPPAATEEVILKISGAILHLIDKSYSVELACGDLEIIRIVQGENVVAVLASVSDEIQWPLTKDENSVKVDESHYFFTLRPTKEISHDSSDEEDGDGGKNTNEMLNYGLTIASKGQEHLLVELEKILEDYSSFSVQEVSEEAKEAGEKVLDVTVARETSPVELTGERKEIVERQCSAYWTTLAPNVEDYSGKAAKLIATGSGHLIKGILWCGDVTMDRLIWGNGFMKRRLSKAEKESEVHPDTLKRIRRVKRMTKMTESVANSILSGVLKVSGFFTSSVANTKVGKKFFSLLPGEVILASLDGFNKVCDAVEVAGRNVMSTSSTVTTELVDHKYGGKAAEATNEGLDAAGYALGTAWVAFKIRKAINPKSVLKPSTLAKTAIRSAASQKKA

SEQ ID NO: 25541 - protein, 452 aa, Arabidopsis thaliana
  peptide (1)..(452): Ceres Seq. ID no. 13497509
  misc_feature (240)..(444): Homolog of NCBI NO: 26450712 NR Description: unknown protein [Arabidopsis thaliana]
  misc_feature (237)..(452): Homolog of NCBI NO: 3551958 NR Description: senescence-associated protein 12 [Hemerocallis
  misc_feature (17)..(173): Homolog of NCBI NO: 18855022 NR Description: putative senescence-associated protein [Oryza
  misc_feature (233)..(452): Homolog of NCBI NO: 18855022 NR Description: putative senescence-associated protein [Oryza
  misc_feature (6)..(441): Homolog of NCBI NO: 15230434 NR Description: expressed protein [Arabidopsis thaliana]
  misc_feature (12)..(441): Homolog of NCBI NO: 7486396 NR Description: hypothetical protein F4B14.250 - Arabidopsis
  misc_feature (12)..(451): Homolog of NCBI NO: 18419759 NR Description: hypothetical protein [Arabidopsis thaliana]
  misc_feature (16)..(451): Homolog of NCBI NO: 15320412 NR Description: ERD7 protein [Arabidopsis thaliana]
  misc_feature (1)..(452): Homolog of NCBI NO: 21593641 NR Description: putative senescence-associated protein 12
  misc_feature (1)..(452): Homolog of NCBI NO: 15227905 NR Description: senescence-associated protein 12 -related
MESSGDKQTSSLYPTVDTSNPEAPINPSSSSSTNNLYPSLDMNDLARNLFPEQPETSSIPVSAPPAATEEVILKISGAILHLIDKSYSVELACGDLEIIRIVQGENVVAVLASVSDEIQWPLTKDENSVKVDESHYFFTLRPTKEISHDSSDEEDGDGGKNTNEMLNYGLTIASKGQEHLLVELEKILEDYSSFSVQEVSEEAKEAGEKVLDVTVARETSPVELTGERKEIVERQCSAYWTTLAPNVEDYSGKAAKLIATGSGHLIKGILWCGDVTMDRLIWGNGFMKRRLSKAEKESEVHPDTLKRIRRVKRMTKMTESVANSILSGVLKVSGFFTSSVANTKVGKKFFSLLPGEVILASLDGFNKVCDAVEVAGRNVMSTSSTVTTELVDHKYGGKAAEATNEGLDAAGYALGTAWVAFKIRKAINPKSVLKPSTLAKTAIRSAASQKKA

SEQ ID NO: 25542 - protein, 411 aa, Arabidopsis thaliana
  peptide (1)..(411): Ceres Seq. ID no. 13497510
  misc_feature (1)..(410): Homolog of NCBI NO: 18419759 NR Description: hypothetical protein [Arabidopsis thaliana]
  misc_feature (1)..(410): Homolog of NCBI NO: 15320412 NR Description: ERD7 protein [Arabidopsis thaliana]
  misc_feature (1)..(411): Homolog of NCBI NO: 21593641 NR Description: putative senescence-associated protein 12
  misc_feature (1)..(411): Homolog of NCBI NO: 15227905 NR Description: senescence-associated protein 12 -related
  misc_feature (199)..(403): Homolog of NCBI NO: 26450712 NR Description: unknown protein [Arabidopsis thaliana]
  misc_feature (196)..(411): Homolog of NCBI NO: 3551958 NR Description: senescence-associated protein 12 [Hemerocallis
  misc_feature (1)..(132): Homolog of NCBI NO: 18855022 NR Description: putative senescence-associated protein [Oryza
  misc_feature (192)..(411): Homolog of NCBI NO: 18855022 NR Description: putative senescence-associated protein [Oryza
  misc_feature (1)..(400): Homolog of NCBI NO: 15230434 NR Description: expressed protein [Arabidopsis thaliana]
  misc_feature (1)..(400): Homolog of NCBI NO: 7486396 NR Description: hypothetical protein F4B14.250 - Arabidopsis
MNDLARNLFPEQPETSSIPVSAPPAATEEVILKISGAILHLIDKSYSVELACGDLEIIRIVQGENVVAVLASVSDEIQWPLTKDENSVKVDESHYFFTLRPTKEISHDSSDEEDGDGGKNTNEMLNYGLTIASKGQEHLLVELEKILEDYSSFSVQEVSEEAKEAGEKVLDVTVARETSPVELTGERKEIVERQCSAYWTTLAPNVEDYSGKAAKLIATGSGHLIKGILWCGDVTMDRLIWGNGFMKRRLSKAEKESEVHPDTLKRIRRVKRMTKMTESVANSILSGVLKVSGFFTSSVANTKVGKKFFSLLPGEVILASLDGFNKVCDAVEVAGRNVMSTSSTVTTELVDHKYGGKAAEATNEGLDAAGYALGTAWVAFKIRKAINPKSVLKPSTLAKTAIRSAASQKKA

SEQ ID NO: 25543 - DNA, 1216 bp, Arabidopsis thaliana
  misc_feature (1)..(1216): Ceres Seq. ID no. 12422586
  misc_feature: MA Experiment ID: 108464 Result: Down-regulated in Transcription
  misc_feature: MA Experiment 108464 PARAMETER Experiment Name: At_Germinating_Seeds_cDNA_P Parameter: Age (day) Value: 4 vs. 0
  misc_feature: MA Experiment 108464 PARAMETER Experiment Name: At_Germinating_Seeds_cDNA_P Parameter: Tissue Value: Germinating Seeds
  misc_feature: MA Experiment ID: 108569 Result: Down-regulated in Transcription
  misc_feature: MA Experiment 108569 PARAMETER Experiment Name: At_0.001%_MeJA__cDNA_P Parameter: Timepoint (hr) Value: 6
  misc_feature: MA Experiment 108569 PARAMETER Experiment Name: At_0.001%_MeJA__cDNA_P Parameter: Tissue Value: Aerial
  misc_feature: MA Experiment 108569 PARAMETER Experiment Name: At_0.001%_MeJA__cDNA_P Parameter: Treatment Value: 0.001% MeJA vs. No Treatment
  misc_feature: MA Experiment ID: 108595 Result: Up-regulated in Transcription
  misc_feature: MA Experiment 108595 PARAMETER Experiment Name: At_Ler-pi_Ovule_cDNA_P Parameter: Plant Line Value: null
  misc_feature: MA Experiment ID: 20000111 Result: Up-regulated in Transcription
  misc_feature: MA Experiment 20000111 PARAMETER Experiment Name: At_42deg_Heat_cDNA_P Parameter: Temperature (deg C) Value: 42 vs. 22
  misc_feature: MA Experiment 20000111 PARAMETER Experiment Name: At_42deg_Heat_cDNA_P Parameter: Timepoint (hr) Value: 6
  misc_feature: MA Experiment 20000111 PARAMETER Experiment Name: At_42deg_Heat_cDNA_P Parameter: Tissue Value: Aerial
gagataacgttcttctccaaaattgcttgaggaagtggttttgttgtgtctctctgggtttgaaatatgagcggagatagacttgaatttgaaaaccctatagaggatgcggtttcgaggctcagattctcccctcaatcaaacaatctcctcgttgcttcttgggattcttatctgagattgtataatgtggagagctcttcgctaagtctagaattaaactctcaagctgctcttcttgattgttgtttcgagaatgaatcaacttcatatgcctctggttctgatggattcatccgaaggtatgatttaaacgctggaacgtttgatacaattggaagacatgatgacattgcaacatccattgtctactcttatgaaaaaggtgaagttatctctactgggtttgatgagaagatcaaattctgggatacaagacaaagagaaagtcttgtgttttcgactgatgctggtggagcagtgggatgtgtcactgtatctggaaacaacttagttgtttgtgtgaacgcatcgatgcatatatacgatttacgtaacttagatgaagcttttcaatcgtatgcatcccaagtggaggtgccaatcagatgtatcacctctgtaccttattccagaggatatgcagttgggtcagtagacggacgagtagctgtggatttccccaatacatcatgctccagtgagattaaatacagtttccgatgccatcccaagagtaggaatggaagacttgatggtgtatgcataaatgcaatcgaattcagtccatgtggatcagggacttttgtaacaggtgacaatgaagggtacgtgatctcatggaatgctaaaagcagaagaagactcaatgagttgccaaggtactcaaatagcatagcgtctttagcatttgaccacactggagaactcttagccattgcatcaagccacacttaccaagatgctaaagagaaggaagaagctcctcaagtgttcatacacaggctttgaaagattcgtaagcttcttgaatctcagtgtctacttgtatctatctagttattttttttgtgtgtttttggtagcacgttttagcttgatctcagaactgactcgtgtcaaccaacatgtaatgattgtatctctcacgtctctttatactacttgttctctaaactttgttttgactttttagtcaactatatgctttgacttt

SEQ ID NO: 25544 - protein, 314 aa, Arabidopsis thaliana
  peptide (1)..(314): Ceres Seq. ID no. 12422587
  misc_feature (222)..(260): Pfam Name: WD domain, G-beta repeat Pfam Description: WD domain, G-beta repeat
  misc_feature (1)..(312): Homolog of NCBI NO: 17137584 NR Description: CG7581-PA [Drosophila melanogaster]
  misc_feature (1)..(314): Homolog of NCBI NO: 3986296 NR Description: mitotic checkpoint [Xenopus laevis]
  misc_feature (13)..(314): Homolog of NCBI NO: 37362190 NR Description: BUB3 budding uninhibited by benzimidazoles 3-like
  misc_feature (1)..(314): Homolog of NCBI NO: 4757880 NR Description: BUB3 budding uninhibited by benzimidazoles 3
  misc_feature (7)..(311): Homolog of NCBI NO: 28564814 NR Description: putative mitotic checkpoint protein
  misc_feature (7)..(314): Homolog of NCBI NO: 15222841 NR Description: mitotic checkpoint protein, putative; protein id:
  misc_feature (7)..(314): Homolog of NCBI NO: 18402300 NR Description: mitotic checkpoint protein, putative
  misc_feature (1)..(314): Homolog of NCBI NO: 12597795 NR Description: mitotic checkpoint protein, putative [Arabidopsis
  misc_feature (1)..(314): Homolog of NCBI NO: 18409261 NR Description: mitotic checkpoint protein, putative
  misc_feature (1)..(314): Homolog of NCBI NO: 21593642 NR Description: mitotic checkpoint protein, putative [Arabidopsis
MSGDRLEFENPIEDAVSRLRFSPQSNNLLVASWDSYLRLYNVESSSLSLELNSQAALLDCCFENESTSYASGSDGFIRRYDLNAGTFDTIGRHDDIATSIVYSYEKGEVISTGFDEKIKFWDTRQRESLVFSTDAGGAVGCVTVSGNNLVVCVNASMHIYDLRNLDEAFQSYASQVEVPIRCITSVPYSRGYAVGSVDGRVAVDFPNTSCSSEIKYSFRCHPKSRNGRLDGVCINAIEFSPCGSGTFVTGDNEGYVISWNAKSRRRLNELPRYSNSIASLAFDHTGELLAIASSHTYQDAKEKEEAPQVFIHRL

SEQ ID NO: 25545 - protein, 158 aa, Arabidopsis thaliana
  peptide (1)..(158): Ceres Seq. ID no. 12422588
  misc_feature (66)..(104): Pfam Name: WD domain, G-beta repeat Pfam Description: WD domain, G-beta repeat
  misc_feature (1)..(156): Homolog of NCBI NO: 17137584 NR Description: CG7581-PA [Drosophila melanogaster]
  misc_feature (1)..(158): Homolog of NCBI NO: 3986296 NR Description: mitotic checkpoint [Xenopus laevis]
  misc_feature (1)..(158): Homolog of NCBI NO: 37362190 NR Description: BUB3 budding uninhibited by benzimidazoles 3-like
  misc_feature (1)..(158): Homolog of NCBI NO: 4757880 NR Description: BUB3 budding uninhibited by benzimidazoles 3
  misc_feature (1)..(155): Homolog of NCBI NO: 28564814 NR Description: putative mitotic checkpoint protein
  misc_feature (1)..(158): Homolog of NCBI NO: 15222841 NR Description: mitotic checkpoint protein, putative; protein id:
  misc_feature (1)..(158): Homolog of NCBI NO: 18402300 NR Description: mitotic checkpoint protein, putative
  misc_feature (1)..(158): Homolog of NCBI NO: 12597795 NR Description: mitotic checkpoint protein, putative [Arabidopsis
  misc_feature (1)..(158): Homolog of NCBI NO: 18409261 NR Description: mitotic checkpoint protein, putative
  misc_feature (1)..(158): Homolog of NCBI NO: 21593642 NR Description: mitotic checkpoint protein, putative [Arabidopsis
MHIYDLRNLDEAFQSYASQVEVPIRCITSVPYSRGYAVGSVDGRVAVDFPNTSCSSEIKYSFRCHPKSRNGRLDGVCINAIEFSPCGSGTFVTGDNEGYVISWNAKSRRRLNELPRYSNSIASLAFDHTGELLAIASSHTYQDAKEKEEAPQVFIHRL

SEQ ID NO: 25546 - DNA, 1609 bp, Arabidopsis thaliana
  misc_feature (1)..(1609): Ceres Seq. ID no. 12578699
  misc_feature: MA Experiment ID: 20000180 Result: Up-regulated in Transcription
  misc_feature: MA Experiment 20000180 PARAMETER Experiment Name: At_Germinating_Seeds_P Parameter: Age (hr) Value: 24 vs. 0
  misc_feature: MA Experiment 20000180 PARAMETER Experiment Name: At_Germinating_Seeds_P Parameter: Tissue Value: Germinating Seeds
  misc_feature: MA Experiment ID: 20000185 Result: Down-regulated in Transcription
  misc_feature: MA Experiment 20000185 PARAMETER Experiment Name: At_Roots__P Parameter: Age (day) Value: 7 vs. 21
  misc_feature: MA Experiment 20000185 PARAMETER Experiment Name: At_Roots__P Parameter: Organism Value: A. thaliana
  misc_feature: MA Experiment 20000185 PARAMETER Experiment Name: At_Roots__P Parameter: Tissue Value: Roots vs. Whole Plant
  misc_feature: MA Experiment ID: 20000227 Result: Down-regulated in Transcription
  misc_feature: MA Experiment 20000227 PARAMETER Experiment Name: At_Root-Tips-vs-Tops_P Parameter: Tissue Value: Root Tips vs. Root Tops
  misc_feature: MA Experiment ID: 20000438 Result: Up-regulated in Transcription
  misc_feature: MA Experiment 20000438 PARAMETER Experiment Name: At_Shoots__P Parameter: Age (day) Value: 14
  misc_feature: MA Experiment 20000438 PARAMETER Experiment Name: At_Shoots__P Parameter: Tissue Value: Shoots vs. Whole Plant
  misc_feature: MA Experiment ID: 20000439 Result: Down-regulated in Transcription
  misc_feature: MA Experiment 20000439 PARAMETER Experiment Name: At_Roots__P Parameter: Age (day) Value: 14 vs. 21
  misc_feature: MA Experiment 20000439 PARAMETER Experiment Name: At_Roots__P Parameter: Organism Value: A. thaliana
  misc_feature: MA Experiment 20000439 PARAMETER Experiment Name: At_Roots__P Parameter: Tissue Value: Roots vs. Whole Plant
  misc_feature: MA Experiment ID: 20001248 Result: Down-regulated in Transcription
  misc_feature: MA Experiment 20001248 PARAMETER Experiment Name: At_Far-red-induction_P Parameter: Age (day) Value: 7
  misc_feature: MA Experiment 20001248 PARAMETER Experiment Name: At_Far-red-induction_P Parameter: Light Value: Far-red vs. White
  misc_feature: MA Experiment 20001248 PARAMETER Experiment Name: At_Far-red-induction_P Parameter: Organism Value: A. thaliana
  misc_feature: MA Experiment 20001248 PARAMETER Experiment Name: At_Far-red-induction_P Parameter: Plant Line Value: Columbia
  misc_feature: MA Experiment 20001248 PARAMETER Experiment Name: At_Far-red-induction_P Parameter: Timepoint (hr) Value: 4
  misc_feature: MA Experiment 20001248 PARAMETER Experiment Name: At_Far-red-induction_P Parameter: Tissue Value: Whole Plant
  misc_feature: MA Experiment ID: 20001450 Result: Down-regulated in Transcription
  misc_feature: MA Experiment 20001450 PARAMETER Experiment Name: At_Far-red-induction_P Parameter: Age (day) Value: 7
  misc_feature: MA Experiment 20001450 PARAMETER Experiment Name: At_Far-red-induction_P Parameter: Light Value: Far-red vs. White
  misc_feature: MA Experiment 20001450 PARAMETER Experiment Name: At_Far-red-induction_P Parameter: Organism Value: A. thaliana
  misc_feature: MA Experiment 20001450 PARAMETER Experiment Name: At_Far-red-induction_P Parameter: Plant Line Value: Columbia
  misc_feature: MA Experiment 20001450 PARAMETER Experiment Name: At_Far-red-induction_P Parameter: Timepoint (hr) Value: 8
  misc_feature: MA Experiment 20001450 PARAMETER Experiment Name: At_Far-red-induction_P Parameter: Tissue Value: Whole Plant
ccatagttccagttctgaaatctcactttcacagtttgtgtctgtgcgataatggccatggcagagctctcaacccccaaaacgacgtcgccttttctcaactcttcgtctcggcttcgtctctcttcaaaattgcacctttcaaaccactttcgccatcttcttcttccacctctccacacaacaactcccaactccaaaatctcttgctccgtttctcaaaatagccaagctcctgttgctgtgcaagaaaatggattggtgaagacgaagaaagagtgttatggagtgttctgcctcacctatgatcttaaagctgaagaagagacaagatcatggaagaagttaattaatattgcagtttcaggtgctgcaggaatgatttctaaccatcttctcttcaaacttgcttcaggggaagtatttggtccagatcaacccattgcattgaaactgctaggatcagagagatcaattcaagctcttgaaggtgttgcaatggaactggaggattcattgttcccattgttgagagaagttgatataggaacagatccaaatgaagtgttccaagatgtggagtgggctattctgattggagcaaaacctcgaggccctggaatggaacgtgctgacttgttggacatcaatggccaaatctttgctgagcagggcaaagctctgaacaaagctgcctctcctaacgtcaaggttcttgtagtgggaaacccttgcaacaccaatgccttgatttgtcttaaaaatgctcccaacattcctgcaaagaacttccatgccctcacgaggttagacgaaaatcgtgccaaatgccagcttgctcttaaagccggtgttttctatgacaaagtgtctaatatgaccatatggggaaatcactccacgactcaggtgccagacttcttaaatgccagaattaatggcctgcctgtgaaggaggttattacagatcacaaatggttagaagagggattcactgagagtgtgcagaagagaggtgggttattaattcagaaatggggtcgatcttctgctgcttctactgctgtttccattgttgatgctataaagtctcttgtaactcctactcctgagggtgattggttttcgactggggtgtacacggatggaaatccttatggtattgaagagggccttgtcttcagtatgccatgccggtcgaagggagatggagattatgaacttgtcaaggatgtagaaattgatgactaccttcgccaacgaatcgccaagtcggaagcggaactgttggctgagaagagatgtgttgcacacctcactggagagggcattgcctactgtgatcttggtccggtagatactatgcttcctggggaagtttgatttttgcaggacgttgaacatctcaagtaagcattctcttccgggttgttagctgtacagagcacagccacattacttatgatgattgttcagaataagaaaatgaaactcttatttcttatttacatgcatctgtatgtgatttttcttgagcaatgctccaaaagtcatatacagtagtatttgtaaacacttgaaacgtttctatgctttattccagtttcag

SEQ ID NO: 25547 - protein, 443 aa, Arabidopsis thaliana
  peptide (1)..(443): Ceres Seq. ID no. 12578700
  misc_feature (251)..(423): Pfam Name: lactate/malate dehydrogenase, alpha/beta Pfam Description: lactate/malate dehydrogenase, alpha/beta
  misc_feature (52)..(443): Homolog of NCBI NO: 7546191 NR Description: Chain A, Chloroplast Nadp-Dependent Malate
  misc_feature (45)..(443): Homolog of NCBI NO: 726334 NR Description: NADP-malate dehydrogenase
  misc_feature (7)..(443): Homolog of NCBI NO: 1170895 NR Description: Malate dehydrogenase [NADP], chloroplast
  misc_feature (1)..(443): Homolog of NCBI NO: 462578 NR Description: Malate dehydrogenase [NADP], chloroplast
  misc_feature (1)..(443): Homolog of NCBI NO: 462579 NR Description: Malate dehydrogenase [NADP], chloroplast
  misc_feature (1)..(443): Homolog of NCBI NO: 11133370 NR Description: Malate dehydrogenase [NADP], chloroplast
  misc_feature (3)..(443): Homolog of NCBI NO: 21554349 NR Description: NADP-dependent malate dehydrogenase [Arabidopsis
  misc_feature (1)..(443): Homolog of NCBI NO: 30697051 NR Description: malate dehydrogenase
  misc_feature (1)..(443): Homolog of NCBI NO: 18377751 NR Description: putative NADP-dependent malate dehydrogenase
  misc_feature (1)..(443): Homolog of NCBI NO: 30697049 NR Description: malate dehydrogenase
MAMAELSTPKTTSPFLNSSSRLRLSSKLHLSNHFRHLLLPPLHTTTPNSKISCSVSQNSQAPVAVQENGLVKTKKECYGVFCLTYDLKAEEETRSWKKLINIAVSGAAGMISNHLLFKLASGEVFGPDQPIALKLLGSERSIQALEGVAMELEDSLFPLLREVDIGTDPNEVFQDVEWAILIGAKPRGPGMERADLLDINGQIFAEQGKALNKAASPNVKVLVVGNPCNTNALICLKNAPNIPAKNFHALTRLDENRAKCQLALKAGVFYDKVSNMTIWGNHSTTQVPDFLNARINGLPVKEVITDHKWLEEGFTESVQKRGGLLIQKWGRSSAASTAVSIVDAIKSLVTPTPEGDWFSTGVYTDGNPYGIEEGLVFSMPCRSKGDGDYELVKDVEIDDYLRQRIAKSEAELLAEKRCVAHLTGEGIAYCDLGPVDTMLPGEV

SEQ ID NO: 25548 - protein, 441 aa, Arabidopsis thaliana
  peptide (1)..(441): Ceres Seq. ID no. 12578701
  misc_feature (249)..(421): Pfam Name: lactate/malate dehydrogenase, alpha/beta Pfam Description: lactate/malate dehydrogenase, alpha/beta
  misc_feature (50)..(441): Homolog of NCBI NO: 7546191 NR Description: Chain A, Chloroplast Nadp-Dependent Malate
  misc_feature (43)..(441): Homolog of NCBI NO: 726334 NR Description: NADP-malate dehydrogenase
  misc_feature (5)..(441): Homolog of NCBI NO: 1170895 NR Description: Malate dehydrogenase [NADP], chloroplast
  misc_feature (1)..(441): Homolog of NCBI NO: 462578 NR Description: Malate dehydrogenase [NADP], chloroplast
  misc_feature (1)..(441): Homolog of NCBI NO: 462579 NR Description: Malate dehydrogenase [NADP], chloroplast
  misc_feature (1)..(441): Homolog of NCBI NO: 11133370 NR Description: Malate dehydrogenase [NADP], chloroplast
  misc_feature (1)..(441): Homolog of NCBI NO: 21554349 NR Description: NADP-dependent malate dehydrogenase [Arabidopsis
  misc_feature (1)..(441): Homolog of NCBI NO: 30697051 NR Description: malate dehydrogenase
  misc_feature (1)..(441): Homolog of NCBI NO: 18377751 NR Description: putative NADP-dependent malate dehydrogenase
  misc_feature (1)..(441): Homolog of NCBI NO: 30697049 NR Description: malate dehydrogenase
MAELSTPKTTSPFLNSSSRLRLSSKLHLSNHFRHLLLPPLHTTTPNSKISCSVSQNSQAPVAVQENGLVKTKKECYGVFCLTYDLKAEEETRSWKKLINIAVSGAAGMISNHLLFKLASGEVFGPDQPIALKLLGSERSIQALEGVAMELEDSLFPLLREVDIGTDPNEVFQDVEWAILIGAKPRGPGMERADLLDINGQIFAEQGKALNKAASPNVKVLVVGNPCNTNALICLKNAPNIPAKNFHALTRLDENRAKCQLALKAGVFYDKVSNMTIWGNHSTTQVPDFLNARINGLPVKEVITDHKWLEEGFTESVQKRGGLLIQKWGRSSAASTAVSIVDAIKSLVTPTPEGDWFSTGVYTDGNPYGIEEGLVFSMPCRSKGDGDYELVKDVEIDDYLRQRIAKSEAELLAEKRCVAHLTGEGIAYCDLGPVDTMLPGEV

SEQ ID NO: 25549 - protein, 334 aa, Arabidopsis thaliana
  peptide (1)..(334): Ceres Seq. ID no. 12578702
  misc_feature (142)..(314): Pfam Name: lactate/malate dehydrogenase, alpha/beta Pfam Description: lactate/malate dehydrogenase, alpha/beta
  misc_feature (1)..(334): Homolog of NCBI NO: 7546191 NR Description: Chain A, Chloroplast Nadp-Dependent Malate
  misc_feature (1)..(334): Homolog of NCBI NO: 726334 NR Description: NADP-malate dehydrogenase
  misc_feature (1)..(334): Homolog of NCBI NO: 1170895 NR Description: Malate dehydrogenase [NADP], chloroplast
  misc_feature (1)..(334): Homolog of NCBI NO: 462578 NR Description: Malate dehydrogenase [NADP], chloroplast
  misc_feature (1)..(334): Homolog of NCBI NO: 462579 NR Description: Malate dehydrogenase [NADP], chloroplast
  misc_feature (1)..(334): Homolog of NCBI NO: 11133370 NR Description: Malate dehydrogenase [NADP], chloroplast
  misc_feature (1)..(334): Homolog of NCBI NO: 21554349 NR Description: NADP-dependent malate dehydrogenase [Arabidopsis
  misc_feature (1)..(334): Homolog of NCBI NO: 30697051 NR Description: malate dehydrogenase
  misc_feature (1)..(334): Homolog of NCBI NO: 18377751 NR Description: putative NADP-dependent malate dehydrogenase
  misc_feature (1)..(334): Homolog of NCBI NO: 30697049 NR Description: malate dehydrogenase
MISNHLLFKLASGEVFGPDQPIALKLLGSERSIQALEGVAMELEDSLFPLLREVDIGTDPNEVFQDVEWAILIGAKPRGPGMERADLLDINGQIFAEQGKALNKAASPNVKVLVVGNPCNTNALICLKNAPNIPAKNFHALTRLDENRAKCQLALKAGVFYDKVSNMTIWGNHSTTQVPDFLNARINGLPVKEVITDHKWLEEGFTESVQKRGGLLIQKWGRSSAASTAVSIVDAIKSLVTPTPEGDWFSTGVYTDGNPYGIEEGLVFSMPCRSKGDGDYELVKDVEIDDYLRQRIAKSEAELLAEKRCVAHLTGEGIAYCDLGPVDTMLPGEV

SEQ ID NO: 25550 - DNA, 1350 bp, Arabidopsis thaliana
  misc_feature (1)..(1350): Ceres Seq. ID no. 13486964
  misc_feature: MA Experiment ID: 108434 Result: Up-regulated in Transcription
  misc_feature: MA Experiment 108434 PARAMETER Experiment Name: At_Root_Tips_cDNA_P Parameter: Tissue Value: Root Tips
  misc_feature: MA Experiment ID: 108577 Result: Down-regulated in Transcription
  misc_feature: MA Experiment 108577 PARAMETER Experiment Name: At_42deg_Heat_cDNA_P Parameter: Temperature (deg C) Value: 42 vs. 22
  misc_feature: MA Experiment 108577 PARAMETER Experiment Name: At_42deg_Heat_cDNA_P Parameter: Timepoint (hr) Value: 6
  misc_feature: MA Experiment 108577 PARAMETER Experiment Name: At_42deg_Heat_cDNA_P Parameter: Tissue Value: Aerial
  misc_feature: MA Experiment ID: 108595 Result: Down-regulated in Transcription
  misc_feature: MA Experiment 108595 PARAMETER Experiment Name: At_Ler-pi_Ovule_cDNA_P Parameter: Plant Line Value: null
  misc_feature: MA Experiment ID: 20000113 Result: Down-regulated in Transcription
  misc_feature: MA Experiment 20000113 PARAMETER Experiment Name: At_42deg_Heat_cDNA_P Parameter: Temperature (deg C) Value: 42 vs. 22
  misc_feature: MA Experiment 20000113 PARAMETER Experiment Name: At_42deg_Heat_cDNA_P Parameter: Timepoint (hr) Value: 8
  misc_feature: MA Experiment 20000113 PARAMETER Experiment Name: At_42deg_Heat_cDNA_P Parameter: Tissue Value: Aerial
  misc_feature: MA Experiment ID: 20000144 Result: Down-regulated in Transcription
  misc_feature: MA Experiment 20000144 PARAMETER Experiment Name: At_42deg_Heat_cDNA_P Parameter: Temperature (deg C) Value: 42 vs. 22
  misc_feature: MA Experiment 20000144 PARAMETER Experiment Name: At_42deg_Heat_cDNA_P Parameter: Timepoint (hr) Value: 1
  misc_feature: MA Experiment 20000144 PARAMETER Experiment Name: At_42deg_Heat_cDNA_P Parameter: Tissue Value: Aerial
  misc_feature: MA Experiment ID: 20000185 Result: Up-regulated in Transcription
  misc_feature: MA Experiment 20000185 PARAMETER Experiment Name: At_Roots__P Parameter: Age (day) Value: 7 vs. 21
  misc_feature: MA Experiment 20000185 PARAMETER Experiment Name: At_Roots__P Parameter: Organism Value: A. thaliana
  misc_feature: MA Experiment 20000185 PARAMETER Experiment Name: At_Roots__P Parameter: Tissue Value: Roots vs. Whole Plant
  misc_feature: MA Experiment ID: 20000437 Result: Down-regulated in Transcription
  misc_feature: MA Experiment 20000437 PARAMETER Experiment Name: At_Drought_P Parameter: Age (day) Value: 8
  misc_feature: MA Experiment 20000437 PARAMETER Experiment Name: At_Drought_P Parameter: Organism Value: A. thaliana
  misc_feature: MA Experiment 20000437 PARAMETER Experiment Name: At_Drought_P Parameter: Plant Line Value: WS
  misc_feature: MA Experiment 20000437 PARAMETER Experiment Name: At_Drought_P Parameter: Timepoint (hr) Value: 24
  misc_feature: MA Experiment 20000437 PARAMETER Experiment Name: At_Drought_P Parameter: Tissue Value: Whole Plant
  misc_feature: MA Experiment 20000437 PARAMETER Experiment Name: At_Drought_P Parameter: Treatment Value: Drought vs. No Drought
  misc_feature: MA Experiment ID: 20001911 Result: Down-regulated in Transcription
  misc_feature: MA Experiment 20001911 PARAMETER Experiment Name: At_Drought_Reproduction_P Parameter: Age (day) Value: 40
  misc_feature: MA Experiment 20001911 PARAMETER Experiment Name: At_Drought_Reproduction_P Parameter: Organism Value: A. thaliana
  misc_feature: MA Experiment 20001911 PARAMETER Experiment Name: At_Drought_Reproduction_P Parameter: Plant Line Value: WS
  misc_feature: MA Experiment 20001911 PARAMETER Experiment Name: At_Drought_Reproduction_P Parameter: Timepoint (day) Value: 10
  misc_feature: MA Experiment 20001911 PARAMETER Experiment Name: At_Drought_Reproduction_P Parameter: Tissue Value: Flowers
  misc_feature: MA Experiment 20001911 PARAMETER Experiment Name: At_Drought_Reproduction_P Parameter: Treatment Value: Drought vs. No Drought
aaaaaaaaaaaataaaaaagaagagacaaaggggagagagagaaaagaagagcgaacaaattccttctttttcccctctttctctctctctcccactctctcatcttcttcttcttatgattttcaacttattacaacaacaacaacaacaaaataatcttgcaaagtttcagtctcaggtggttcacagttaatgctacttgcaatgatgaatccatcccaatttcgataacctctactgaggcatccaaatgttgaacggaaaagaagagcctaagcagaagaaaggttggtcagagtcgctgctagaatttcggtcagggtttggggaaaagatgaaagttgtgtcgaagaaacgttggaaatctcttggtcctcttcatctgaaaagcaaatcagttgcacggttttgcttcttttcgaagttgaagtcaaacaaccatggtccaggccgtgcaccagtgtatctcaatgtttatgacttgactcctattaacggatatatctattgggcaggccttggtatatttcactctggtgtagaagttcatggagtagagtatgcttttggtgcccatgattatgcaacgagtggtgtttttgaggttgaaccaaggcaatgcccgggcttcaagttcaagaaatcgatattcattggaaccacgaatttaaacccaacacaagtgagagagtttatggaagacatggcttgcagttactacgggaatatgtatcacttgattgttaagaactgcaaccatttctgccaggacgtttgctacaagcttaccgggaaaaagatcccaaaatgggtgaatcggcttgcacaaataggttctgtgtgcagctgcatacttcccgagtccctcaagataacagcggtctgccacgatccagacgggcaaatcccggaggaagaaaacgaaaagagaagtcttagaagctcattcagctgtttatcatccatctccatgagacaaaaacagctttcaacatcatcattgttcctacaatcacctctcagaggctgcttacctccttggcaactcaaacgctcaaaatctaacagcagctccttgaaagaaaggtagacattccaacaaaaaccattgcggtctctcattcgtttcgttagcaacacaaaccacgatttatccttcttctatctttgtaatggagttcgaaaacagatttcccgcgccatcgcttttcatttgattttaacaggctttcataagccattcttcatcttctttctgtttgtattgcttccaaatttgaatcttttctcattttcaaaatcatgtattgcatcaacgctgtttatatctaaactagctctcttagttc

SEQ ID NO: 25551 - protein, 279 aa, Arabidopsis thaliana
  peptide (1)..(279): Ceres Seq. ID no. 13486965
  misc_feature (69)..(192): Pfam Name: Eukaryotic protein of unknown function (DUF862) Pfam Description: Eukaryotic protein of unknown function (DUF862)
  misc_feature (92)..(234): Homolog of NCBI NO: 7488100 NR Description: probable EREBP-4 - Arabidopsis thaliana
  misc_feature (67)..(256): Homolog of NCBI NO: 25354458 NR Description: hypothetical protein F23A5.4 [imported] -
  misc_feature (70)..(234): Homolog of NCBI NO: 30684058 NR Description: expressed protein [Arabidopsis thaliana]
  misc_feature (64)..(234): Homolog of NCBI NO: 15238059 NR Description: expressed protein [Arabidopsis thaliana]
  misc_feature (67)..(256): Homolog of NCBI NO: 18412886 NR Description: expressed protein [Arabidopsis thaliana]
  misc_feature (54)..(279): Homolog of NCBI NO: 18400749 NR Description: expressed protein [Arabidopsis thaliana]
  misc_feature (66)..(263): Homolog of NCBI NO: 18420889 NR Description: expressed protein [Arabidopsis thaliana]
  misc_feature (29)..(279): Homolog of NCBI NO: 21593644 NR Description: unknown [Arabidopsis thaliana]
  misc_feature (1)..(279): Homolog of NCBI NO: 9802596 NR Description: T2E6.19 [Arabidopsis thaliana]
  misc_feature (1)..(279): Homolog of NCBI NO: 18401869 NR Description: expressed protein [Arabidopsis thaliana]
MLNGKEEPKQKKGWSESLLEFRSGFGEKMKVVSKKRWKSLGPLHLKSKSVARFCFFSKLKSNNHGPGRAPVYLNVYDLTPINGYIYWAGLGIFHSGVEVHGVEYAFGAHDYATSGVFEVEPRQCPGFKFKKSIFIGTTNLNPTQVREFMEDMACSYYGNMYHLIVKNCNHFCQDVCYKLTGKKIPKWVNRLAQIGSVCSCILPESLKITAVCHDPDGQIPEEENEKRSLRSSFSCLSSISMRQKQLSTSSLFLQSPLRGCLPPWQLKRSKSNSSSLKER

SEQ ID NO: 25552 - protein, 251 aa, Arabidopsis thaliana
  peptide (1)..(251): Ceres Seq. ID no. 13486966
  misc_feature (41)..(164): Pfam Name: Eukaryotic protein of unknown function (DUF862) Pfam Description: Eukaryotic protein of unknown function (DUF862)
  misc_feature (64)..(206): Homolog of NCBI NO: 7488100 NR Description: probable EREBP-4 - Arabidopsis thaliana
  misc_feature (39)..(228): Homolog of NCBI NO: 25354458 NR Description: hypothetical protein F23A5.4 [imported] -
  misc_feature (42)..(206): Homolog of NCBI NO: 30684058 NR Description: expressed protein [Arabidopsis thaliana]
  misc_feature (36)..(206): Homolog of NCBI NO: 15238059 NR Description: expressed protein [Arabidopsis thaliana]
  misc_feature (39)..(228): Homolog of NCBI NO: 18412886 NR Description: expressed protein [Arabidopsis thaliana]
  misc_feature (26)..(251): Homolog of NCBI NO: 18400749 NR Description: expressed protein [Arabidopsis thaliana]
  misc_feature (38)..(235): Homolog of NCBI NO: 18420889 NR Description: expressed protein [Arabidopsis thaliana]
  misc_feature (1)..(251): Homolog of NCBI NO: 21593644 NR Description: unknown [Arabidopsis thaliana]
  misc_feature (1)..(251): Homolog of NCBI NO: 9802596 NR Description: T2E6.19 [Arabidopsis thaliana]
  misc_feature (1)..(251): Homolog of NCBI NO: 18401869 NR Description: expressed protein [Arabidopsis thaliana]
MKVVSKKRWKSLGPLHLKSKSVARFCFFSKLKSNNHGPGRAPVYLNVYDLTPINGYIYWAGLGIFHSGVEVHGVEYAFGAHDYATSGVFEVEPRQCPGFKFKKSIFIGTTNLNPTQVREFMEDMACSYYGNMYHLIVKNCNHFCQDVCYKLTGKKIPKWVNRLAQIGSVCSCILPESLKITAVCHDPDGQIPEEENEKRSLRSSFSCLSSISMRQKQLSTSSLFLQSPLRGCLPPWQLKRSKSNSSSLKER

SEQ ID NO: 25553 - DNA, 1245 bp, Arabidopsis thaliana
  misc_feature (1)..(1245): Ceres Seq. ID no. 12656004
  misc_feature: MA Experiment ID: 108474 Result: Down-regulated in Transcription
  misc_feature: MA Experiment 108474 PARAMETER Experiment Name: At_Drought_Flowers_cDNA_P Parameter: Timepoint (hr) Value: null
  misc_feature: MA Experiment 108474 PARAMETER Experiment Name: At_Drought_Flowers_cDNA_P Parameter: Treatment Value: Drought vs. No Drought
  misc_feature: MA Experiment ID: 108573 Result: Up-regulated in Transcription
  misc_feature: MA Experiment 108573 PARAMETER Experiment Name: At_Drought_cDNA_P Parameter: Timepoint (hr) Value: 6
  misc_feature: MA Experiment 108573 PARAMETER Experiment Name: At_Drought_cDNA_P Parameter: Tissue Value: Aerial
  misc_feature: MA Experiment 108573 PARAMETER Experiment Name: At_Drought_cDNA_P Parameter: Treatment Value: Drought vs. No Drought
  misc_feature: MA Experiment ID: 108579 Result: Down-regulated in Transcription
  misc_feature: MA Experiment 108579 PARAMETER Experiment Name: At_4deg_Cold_cDNA_P Parameter: Temperature (deg C) Value: 4 vs. 22
  misc_feature: MA Experiment 108579 PARAMETER Experiment Name: At_4deg_Cold_cDNA_P Parameter: Timepoint (hr) Value: 6
  misc_feature: MA Experiment 108579 PARAMETER Experiment Name: At_4deg_Cold_cDNA_P Parameter: Tissue Value: Aerial
  misc_feature: MA Experiment ID: 20000090 Result: Up-regulated in Transcription
  misc_feature: MA Experiment ID: 20000171 Result: Up-regulated in Transcription
  misc_feature: MA Experiment 20000171 PARAMETER Experiment Name: At_42deg_Heat_P Parameter: Age (day) Value: 14
  misc_feature: MA Experiment 20000171 PARAMETER Experiment Name: At_42deg_Heat_P Parameter: Organism Value: A. thaliana
  misc_feature: MA Experiment 20000171 PARAMETER Experiment Name: At_42deg_Heat_P Parameter: Plant Line Value: WS
  misc_feature: MA Experiment 20000171 PARAMETER Experiment Name: At_42deg_Heat_P Parameter: Temperature (deg C) Value: 42 vs. 22
  misc_feature: MA Experiment 20000171 PARAMETER Experiment Name: At_42deg_Heat_P Parameter: Timepoint (hr) Value: 1
  misc_feature: MA Experiment 20000171 PARAMETER Experiment Name: At_42deg_Heat_P Parameter: Tissue Value: Aerial
atcatagtgatcaaaagtacgtaaaatcggaaatgacgaacgcagaagcagtaacggtgaccaacaagcaaatcatattcccagactatgttactggatttccaaaagaatctgatcttaaaataaccacaactaccattgatctaaggcttccggagggatccacctcagtactggtgaagaatctttacttgtcttgcgatccttacatgcgcatttgcatgggaaagcccgatcccttgtcttcttcccttgttccaccttacaagaccggcgtgccaatcattgggcttggagtgtctaaagtgattgattcaggacatccagattacaaaaagggagacttactttggggactagttggatgggaggagtacagtgttattactttaactacttactcacacttcaaaatcgaacataccgatgttccattatcttactacactggacttcttggtatgcctggtatgactgcttatgctggattttacgaagtttgttcacctaaaaaaggagagactgtcttcgtgtcagctgcatccggcgcggttggtcagctcgtgggacaatttgcaaagttgatgggttgttatgtcgttggtagtgctggcagtaaagaaaaggtttatctactcaagacaaagtttgggtttgatgatgctttcaattacaaggaagagaaggactttagtgctgccctaaagaggtattttccggaagggatcgacatatattttgagaacgttggaggcaaaatgttagatgccgtactcataaacatgaagttgcatggtcgtgtcgcagtatgtggaatgatctcacagtataatttagtggatccagaaggcgtacacaacttacccaccattctttacaagaggatacaacttcaagggtttggtgtttgtgatttctacgacaaatatcctaagtttttggattttgtgcttccttacattagagaagggaagataacatacgttgaggatatagcggaaggattcgagagtggaccttctgctcttttaggactcttcgaaggtaagaacgtcgggaaacaactatttgtggttgctcgtgagtgagacgttgaaggtttcatattatatggtgttgttctttgaaaagtagattatgattctttgtttttagttttgttcggacaagtcatttccttgacacatgggaataataatcgcatttgtttttaacttaaaattgagacgtttcaacctttttggg

SEQ ID NO: 25554 - protein, 361 aa, Arabidopsis thaliana
  peptide (1)..(361): Ceres Seq. ID no. 12656005
  misc_feature (139)..(358): Pfam Name: Zinc-binding dehydrogenase Pfam Description: Zinc-binding dehydrogenase
  misc_feature (17)..(361): Homolog of NCBI NO: 15237888 NR Description: quinone oxidoreductase -like protein; protein id:
  misc_feature (11)..(361): Homolog of NCBI NO: 15228456 NR Description: putative NADP-dependent oxidoreductase; protein
  misc_feature (20)..(361): Homolog of NCBI NO: 1362014 NR Description: probable NADPH2:quinone reductase (EC 1.6.5.5) P2
  misc_feature (17)..(361): Homolog of NCBI NO: 22326861 NR Description: quinone oxidoreductase - like protein
  misc_feature (17)..(361): Homolog of NCBI NO: 17529140 NR Description: putative quinone oxidoreductase [Arabidopsis
  misc_feature (20)..(361): Homolog of NCBI NO: 15237890 NR Description: quinone oxidoreductase - like protein
  misc_feature (17)..(361): Homolog of NCBI NO: 21539447 NR Description: quinone oxidoreductase-like protein [Arabidopsis
  misc_feature (20)..(361): Homolog of NCBI NO: 21554121 NR Description: quinone oxidoreductase-like protein [Arabidopsis
  misc_feature (11)..(361): Homolog of NCBI NO: 21593645 NR Description: allyl alcohol dehydrogenase, putative
  misc_feature (11)..(361): Homolog of NCBI NO: 15222685 NR Description: allyl alcohol dehydrogenase, putative
HSDQKYVKSEMTNAEAVTVTNKQIIFPDYVTGFPKESDLKITTTTIDLRLPEGSTSVLVKNLYLSCDPYMRICMGKPDPLSSSLVPPYKTGVPIIGLGVSKVIDSGHPDYKKGDLLWGLVGWEEYSVITLTTYSHFKIEHTDVPLSYYTGLLGMPGMTAYAGFYEVCSPKKGETVFVSAASGAVGQLVGQFAKLMGCYVVGSAGSKEKVYLLKTKFGFDDAFNYKEEKDFSAALKRYFPEGIDIYFENVGGKMLDAVLINMKLHGRVAVCGMISQYNLVDPEGVHNLPTILYKRIQLQGFGVCDFYDKYPKFLDFVLPYIREGKITYVEDIAEGFESGPSALLGLFEGKNVGKQLFVVARE

SEQ ID NO: 25555 - protein, 351 aa, Arabidopsis thaliana
  peptide (1)..(351): Ceres Seq. ID no. 12656006
  misc_feature (129)..(348): Pfam Name: Zinc-binding dehydrogenase Pfam Description: Zinc-binding dehydrogenase
  misc_feature (10)..(351): Homolog of NCBI NO: 1362014 NR Description: probable NADPH2:quinone reductase (EC 1.6.5.5) P2
  misc_feature (10)..(351): Homolog of NCBI NO: 21554121 NR Description: quinone oxidoreductase-like protein [Arabidopsis
  misc_feature (7)..(351): Homolog of NCBI NO: 22326861 NR Description: quinone oxidoreductase - like protein
  misc_feature (7)..(351): Homolog of NCBI NO: 21539447 NR Description: quinone oxidoreductase-like protein [Arabidopsis
  misc_feature (7)..(351): Homolog of NCBI NO: 17529140 NR Description: putative quinone oxidoreductase [Arabidopsis
  misc_feature (10)..(351): Homolog of NCBI NO: 15237890 NR Description: quinone oxidoreductase - like protein
  misc_feature (7)..(351): Homolog of NCBI NO: 15237888 NR Description: quinone oxidoreductase -like protein; protein id:
  misc_feature (1)..(351): Homolog of NCBI NO: 15228456 NR Description: putative NADP-dependent oxidoreductase; protein
  misc_feature (1)..(351): Homolog of NCBI NO: 21593645 NR Description: allyl alcohol dehydrogenase, putative
  misc_feature (1)..(351): Homolog of NCBI NO: 15222685 NR Description: allyl alcohol dehydrogenase, putative
MTNAEAVTVTNKQIIFPDYVTGFPKESDLKITTTTIDLRLPEGSTSVLVKNLYLSCDPYMRICMGKPDPLSSSLVPPYKTGVPIIGLGVSKVIDSGHPDYKKGDLLWGLVGWEEYSVITLTTYSHFKIEHTDVPLSYYTGLLGMPGMTAYAGFYEVCSPKKGETVFVSAASGAVGQLVGQFAKLMGCYVVGSAGSKEKVYLLKTKFGFDDAFNYKEEKDFSAALKRYFPEGIDIYFENVGGKMLDAVLINMKLHGRVAVCGMISQYNLVDPEGVHNLPTILYKRIQLQGFGVCDFYDKYPKFLDFVLPYIREGKITYVEDIAEGFESGPSALLGLFEGKNVGKQLFVVARE

SEQ ID NO: 25556 - protein, 292 aa, Arabidopsis thaliana
  peptide (1)..(292): Ceres Seq. ID no. 12656007
  misc_feature (70)..(289): Pfam Name: Zinc-binding dehydrogenase Pfam Description: Zinc-binding dehydrogenase
  misc_feature (1)..(292): Homolog of NCBI NO: 1362014 NR Description: probable NADPH2:quinone reductase (EC 1.6.5.5) P2
  misc_feature (1)..(292): Homolog of NCBI NO: 21554121 NR Description: quinone oxidoreductase-like protein [Arabidopsis
  misc_feature (1)..(292): Homolog of NCBI NO: 22326861 NR Description: quinone oxidoreductase - like protein
  misc_feature (1)..(292): Homolog of NCBI NO: 21539447 NR Description: quinone oxidoreductase-like protein [Arabidopsis
  misc_feature (1)..(292): Homolog of NCBI NO: 17529140 NR Description: putative quinone oxidoreductase [Arabidopsis
  misc_feature (1)..(292): Homolog of NCBI NO: 15237890 NR Description: quinone oxidoreductase - like protein
  misc_feature (1)..(292): Homolog of NCBI NO: 15237888 NR Description: quinone oxidoreductase -like protein; protein id:
  misc_feature (1)..(292): Homolog of NCBI NO: 15228456 NR Description: putative NADP-dependent oxidoreductase; protein
  misc_feature (1)..(292): Homolog of NCBI NO: 21593645 NR Description: allyl alcohol dehydrogenase, putative
  misc_feature (1)..(292): Homolog of NCBI NO: 15222685 NR Description: allyl alcohol dehydrogenase, putative
MRICMGKPDPLSSSLVPPYKTGVPIIGLGVSKVIDSGHPDYKKGDLLWGLVGWEEYSVITLTTYSHFKIEHTDVPLSYYTGLLGMPGMTAYAGFYEVCSPKKGETVFVSAASGAVGQLVGQFAKLMGCYVVGSAGSKEKVYLLKTKFGFDDAFNYKEEKDFSAALKRYFPEGIDIYFENVGGKMLDAVLINMKLHGRVAVCGMISQYNLVDPEGVHNLPTILYKRIQLQGFGVCDFYDKYPKFLDFVLPYIREGKITYVEDIAEGFESGPSALLGLFEGKNVGKQLFVVARE

SEQ ID NO: 25557 - DNA, 1668 bp, Arabidopsis thaliana
  misc_feature (1)..(1668): Ceres Seq. ID no. 12357789
  misc_feature: MA Experiment ID: 108573 Result: Up-regulated in Transcription
  misc_feature: MA Experiment 108573 PARAMETER Experiment Name: At_Drought_cDNA_P Parameter: Timepoint (hr) Value: 6
  misc_feature: MA Experiment 108573 PARAMETER Experiment Name: At_Drought_cDNA_P Parameter: Tissue Value: Aerial
  misc_feature: MA Experiment 108573 PARAMETER Experiment Name: At_Drought_cDNA_P Parameter: Treatment Value: Drought vs. No Drought
  misc_feature: MA Experiment ID: 108595 Result: Down-regulated in Transcription
  misc_feature: MA Experiment 108595 PARAMETER Experiment Name: At_Ler-pi_Ovule_cDNA_P Parameter: Plant Line Value: null
  misc_feature: MA Experiment ID: 20000184 Result: Down-regulated in Transcription
  misc_feature: MA Experiment 20000184 PARAMETER Experiment Name: At_Shoots__P Parameter: Age (day) Value: 7
  misc_feature: MA Experiment 20000184 PARAMETER Experiment Name: At_Shoots__P Parameter: Tissue Value: Shoots vs. Whole Plant
gttgattttagtatttgccgaagttggaactttaagatcaaagaagaaaatggagagatccatttcctttaatcctcgaggcgataacgagctccctgatgatcggagcagcgatgtcggatatgctgctaatgatcggaggcttgcttattctcgctcgtttcagcaatctcacggtccacgaacgccggcggtaacggaagcggctaagccttttctcgataggacggtctcgagcatcgatatgccgccggatatttactccgttgatggaaatgatgtgtttttcggggaagggaaagatgtagacatggcaaaagtgtctgttttggaaatggtttgggaggtttttggagtagtgacaagtggaaatcggcagatgaagagactgtttctgctaattgcgcttaatgtgttgtattctacaacagagctctctattggtatcttcactggtcgtgtaggtttggtctctgatgcattccatttgacatttggttgtggtctcttgacattttctttatttgcaatggcaacttcaaggaagaagcctgatcatgcttactcatacgggtacaaaagacttgaagttttatctgctttcactaatgctacagctgttccttatgttcatgtcattctccttagctgtggaagctcttcatgcatttatacaagatgaatcagagcataagcattatttgattgtatcagcggtaacaaatctgctggtgaacctactaggtgtttggtttttccggaattatgctcgtgtcaatattgcctttgttggtggctttggtattcatttgtagaaattggccacccttgtcagttttcgctttaaagccaaagaagtaagggtgtttggttaagatagaatcagtacgaggattagttgaaagagagagtcagcataattgtaaactgatctgtcaaacgactattcgttgcttcttgaaattatctgtcccttctttacatatctaaaaaccacatgttatcttgaatttttttcttatattcataatatgcaatatgctgcagcctacagaaaagcagaagatatgaattatcactccgtttgcttgcacgtcatatcagattccatccgcagtgcaggtttgatactggcatcttggctcctctcgctcggggttgaaaatgcagaggtcctatgtttaggattggtatcggtcacagtgtttatgcttgttatgccactcttcaaagccactggtggtgtcttgcttcagatggcacccccaaacattccttcttctgctttaagcaaatgcttgcgacagattacttctcgagaagatgtaacggaggttttacaggcacgtttctgggaggttgtgcctggtcacactgttggctcactcagactccaggtgaagagcggaatagatgaaagaccattactgcaatatgtatatgatgtataccatgatttgggtgtacaagacttgaccctgcaaactgattacacctaagctgcatctgcctcttctttgtttttaaatgctgatttgaagatttttggatgtatactagagatcatggttctttaggaatataaatattgtgaattttcaagttgtgactttgtgatattgttttgtttgtttttcatttatgtgaattttcaaccacacaaagacc

SEQ ID NO: 25558 - protein, 226 aa, Arabidopsis thaliana
  peptide (1)..(226): Ceres Seq. ID no. 12357790
  misc_feature (130)..(214): Pfam Name: Cation efflux family Pfam Description: Cation efflux family
  misc_feature (87)..(203): Homolog of NCBI NO: 26352918 NR Description: unnamed protein product [Mus musculus]
  misc_feature (87)..(203): Homolog of NCBI NO: 10434017 NR Description: unnamed protein product [Homo sapiens]
  misc_feature (87)..(203): Homolog of NCBI NO: 34853639 NR Description: similar to zinc transporter 5 [Rattus norvegicus]
  misc_feature (87)..(203): Homolog of NCBI NO: 37537241 NR Description: Slc30a5 protein [Mus musculus]
  misc_feature (124)..(216): Homolog of NCBI NO: 31209583 NR Description: ENSANGP00000017072 [Anopheles gambiae]
  misc_feature (128)..(203): Homolog of NCBI NO: 13182751 NR Description: putative disease resistance protein [Homo sapiens]
  misc_feature (100)..(225): Homolog of NCBI NO: 39645387 NR Description: Unknown (protein for MGC:76189) [Silurana
  misc_feature (100)..(218): Homolog of NCBI NO: 28278399 NR Description: Similar to RIKEN cDNA 1810059J10 gene [Danio
  misc_feature (17)..(214): Homolog of NCBI NO: 9294107 NR Description: contains similarity to cation
  misc_feature (17)..(214): Homolog of NCBI NO: 15229954 NR Description: unknown protein; protein id: At3g12100.1
LILVFAEVGTLRSKKKMERSISFNPRGDNELPDDRSSDVGYAANDRRLAYSRSFQQSHGPRTPAVTEAAKPFLDRTVSSIDMPPDIYSVDGNDVFFGEGKDVDMAKVSVLEMVWEVFGVVTSGNRQMKRLFLLIALNVLYSTTELSIGIFTGRVGLVSDAFHLTFGCGLLTFSLFAMATSRKKPDHAYSYGYKRLEVLSAFTNATAVPYVHVILLSCGSSSCIYTR

SEQ ID NO: 25559 - protein, 210 aa, Arabidopsis thaliana
  peptide (1)..(210): Ceres Seq. ID no. 12357791
  misc_feature (114)..(198): Pfam Name: Cation efflux family Pfam Description: Cation efflux family
  misc_feature (71)..(187): Homolog of NCBI NO: 26352918 NR Description: unnamed protein product [Mus musculus]
  misc_feature (71)..(187): Homolog of NCBI NO: 10434017 NR Description: unnamed protein product [Homo sapiens]
  misc_feature (71)..(187): Homolog of NCBI NO: 34853639 NR Description: similar to zinc transporter 5 [Rattus norvegicus]
  misc_feature (71)..(187): Homolog of NCBI NO: 37537241 NR Description: Slc30a5 protein [Mus musculus]
  misc_feature (108)..(200): Homolog of NCBI NO: 31209583 NR Description: ENSANGP00000017072 [Anopheles gambiae]
  misc_feature (112)..(187): Homolog of NCBI NO: 13182751 NR Description: putative disease resistance protein [Homo sapiens]
  misc_feature (84)..(209): Homolog of NCBI NO: 39645387 NR Description: Unknown (protein for MGC:76189) [Silurana
  misc_feature (84)..(202): Homolog of NCBI NO: 28278399 NR Description: Similar to RIKEN cDNA 1810059J10 gene [Danio
  misc_feature (1)..(198): Homolog of NCBI NO: 9294107 NR Description: contains similarity to cation
  misc_feature (1)..(198): Homolog of NCBI NO: 15229954 NR Description: unknown protein; protein id: At3g12100.1
MERSISFNPRGDNELPDDRSSDVGYAANDRRLAYSRSFQQSHGPRTPAVTEAAKPFLDRTVSSIDMPPDIYSVDGNDVFFGEGKDVDMAKVSVLEMVWEVFGVVTSGNRQMKRLFLLIALNVLYSTTELSIGIFTGRVGLVSDAFHLTFGCGLLTFSLFAMATSRKKPDHAYSYGYKRLEVLSAFTNATAVPYVHVILLSCGSSSCIYTR

SEQ ID NO: 25560 - protein, 155 aa, Arabidopsis thaliana
  peptide (1)..(155): Ceres Seq. ID no. 12357792
  misc_feature (6)..(155): Pfam Name: Cation efflux family Pfam Description: Cation efflux family
  misc_feature (14)..(153): Homolog of NCBI NO: 26352918 NR Description: unnamed protein product [Mus musculus]
  misc_feature (14)..(153): Homolog of NCBI NO: 10434017 NR Description: unnamed protein product [Homo sapiens]
  misc_feature (14)..(153): Homolog of NCBI NO: 34853639 NR Description: similar to zinc transporter 5 [Rattus norvegicus]
  misc_feature (14)..(153): Homolog of NCBI NO: 37537241 NR Description: Slc30a5 protein [Mus musculus]
  misc_feature (18)..(155): Homolog of NCBI NO: 31209583 NR Description: ENSANGP00000017072 [Anopheles gambiae]
  misc_feature (14)..(153): Homolog of NCBI NO: 13182751 NR Description: putative disease resistance protein [Homo sapiens]
  misc_feature (18)..(153): Homolog of NCBI NO: 39645387 NR Description: Unknown (protein for MGC:76189) [Silurana
  misc_feature (18)..(153): Homolog of NCBI NO: 28278399 NR Description: Similar to RIKEN cDNA 1810059J10 gene [Danio
  misc_feature (6)..(155): Homolog of NCBI NO: 9294107 NR Description: contains similarity to cation
  misc_feature (6)..(155): Homolog of NCBI NO: 15229954 NR Description: unknown protein; protein id: At3g12100.1
MQYAAAYRKAEDMNYHSVCLHVISDSIRSAGLILASWLLSLGVENAEVLCLGLVSVTVFMLVMPLFKATGGVLLQMAPPNIPSSALSKCLRQITSREDVTEVLQARFWEVVPGHTVGSLRLQVKSGIDERPLLQYVYDVYHDLGVQDLTLQTDYT

SEQ ID NO: 25561 - DNA, 3341 bp, Arabidopsis thaliana
  misc_feature (1)..(3341): Ceres Seq. ID no. 12602487
  misc_feature: MA Experiment ID: 108434 Result: Down-regulated in Transcription
  misc_feature: MA Experiment 108434 PARAMETER Experiment Name: At_Root_Tips_cDNA_P Parameter: Tissue Value: Root Tips
  misc_feature: MA Experiment ID: 108595 Result: Up-regulated in Transcription
  misc_feature: MA Experiment 108595 PARAMETER Experiment Name: At_Ler-pi_Ovule_cDNA_P Parameter: Plant Line Value: null
  misc_feature: MA Experiment ID: 20000180 Result: Up-regulated in Transcription
  misc_feature: MA Experiment 20000180 PARAMETER Experiment Name: At_Germinating_Seeds_P Parameter: Age (hr) Value: 24 vs. 0
  misc_feature: MA Experiment 20000180 PARAMETER Experiment Name: At_Germinating_Seeds_P Parameter: Tissue Value: Germinating Seeds
  misc_feature: MA Experiment ID: 20000185 Result: Down-regulated in Transcription
  misc_feature: MA Experiment 20000185 PARAMETER Experiment Name: At_Roots__P Parameter: Age (day) Value: 7 vs. 21
  misc_feature: MA Experiment 20000185 PARAMETER Experiment Name: At_Roots__P Parameter: Organism Value: A. thaliana
  misc_feature: MA Experiment 20000185 PARAMETER Experiment Name: At_Roots__P Parameter: Tissue Value: Roots vs. Whole Plant
  misc_feature: MA Experiment ID: 20000234 Result: Up-regulated in Transcription
  misc_feature: MA Experiment 20000234 PARAMETER Experiment Name: At_Siliques_P Parameter: Age (day) Value: 21
  misc_feature: MA Experiment 20000234 PARAMETER Experiment Name: At_Siliques_P Parameter: Organism Value: A. thaliana
  misc_feature: MA Experiment 20000234 PARAMETER Experiment Name: At_Siliques_P Parameter: Plant Line Value: WS
  misc_feature: MA Experiment 20000234 PARAMETER Experiment Name: At_Siliques_P Parameter: Tissue Value: Less Than 5mm Siliques vs. Whole Plant
  misc_feature: MA Experiment ID: 20000235 Result: Up-regulated in Transcription
  misc_feature: MA Experiment 20000235 PARAMETER Experiment Name: At_Siliques_P Parameter: Age (day) Value: 21
  misc_feature: MA Experiment 20000235 PARAMETER Experiment Name: At_Siliques_P Parameter: Organism Value: A. thaliana
  misc_feature: MA Experiment 20000235 PARAMETER Experiment Name: At_Siliques_P Parameter: Plant Line Value: WS
  misc_feature: MA Experiment 20000235 PARAMETER Experiment Name: At_Siliques_P Parameter: Tissue Value: 5-10mm Siliques vs. Whole Plant
  misc_feature: MA Experiment ID: 20000264 Result: Up-regulated in Transcription
  misc_feature: MA Experiment 20000264 PARAMETER Experiment Name: At_Open_Flower_P Parameter: Age (day) Value: 21
  misc_feature: MA Experiment 20000264 PARAMETER Experiment Name: At_Open_Flower_P Parameter: Plant Line Value: WS
  misc_feature: MA Experiment 20000264 PARAMETER Experiment Name: At_Open_Flower_P Parameter: Tissue Value: Open Flower vs. Whole Plant
  misc_feature: MA Experiment ID: 20000265 Result: Up-regulated in Transcription
  misc_feature: MA Experiment 20000265 PARAMETER Experiment Name: At_Open_Flower_P Parameter: Age (day) Value: 21
  misc_feature: MA Experiment 20000265 PARAMETER Experiment Name: At_Open_Flower_P Parameter: Plant Line Value: WS
  misc_feature: MA Experiment 20000265 PARAMETER Experiment Name: At_Open_Flower_P Parameter: Tissue Value: Closed Flower vs. Whole Plant
  misc_feature: MA Experiment ID: 20000286 Result: Up-regulated in Transcription
  misc_feature: MA Experiment 20000286 PARAMETER Experiment Name: At_Open_Flower_P Parameter: Age (day) Value: 21
  misc_feature: MA Experiment 20000286 PARAMETER Experiment Name: At_Open_Flower_P Parameter: Plant Line Value: WS
  misc_feature: MA Experiment 20000286 PARAMETER Experiment Name: At_Open_Flower_P Parameter: Tissue Value: Half Open vs. Whole Plant
  misc_feature: MA Experiment ID: 20000439 Result: Down-regulated in Transcription
  misc_feature: MA Experiment 20000439 PARAMETER Experiment Name: At_Roots__P Parameter: Age (day) Value: 14 vs. 21
  misc_feature: MA Experiment 20000439 PARAMETER Experiment Name: At_Roots__P Parameter: Organism Value: A. thaliana
  misc_feature: MA Experiment 20000439 PARAMETER Experiment Name: At_Roots__P Parameter: Tissue Value: Roots vs. Whole Plant
  misc_feature: MA Experiment ID: 20000495 Result: Up-regulated in Transcription
  misc_feature: MA Experiment 20000495 PARAMETER Experiment Name: At_Guard_Cells_P Parameter: Harvest Date Value: 8/2/2002
  misc_feature: MA Experiment 20000495 PARAMETER Experiment Name: At_Guard_Cells_P Parameter: Organism Value: A. thaliana
  misc_feature: MA Experiment 20000495 PARAMETER Experiment Name: At_Guard_Cells_P Parameter: Tissue Value: Guard Cells vs. Leaves
  misc_feature: MA Experiment ID: 20000496 Result: Up-regulated in Transcription
  misc_feature: MA Experiment 20000496 PARAMETER Experiment Name: At_Guard_Cells_P Parameter: Harvest Date Value: 7/19/2002
  misc_feature: MA Experiment 20000496 PARAMETER Experiment Name: At_Guard_Cells_P Parameter: Organism Value: Canola
  misc_feature: MA Experiment 20000496 PARAMETER Experiment Name: At_Guard_Cells_P Parameter: Tissue Value: Guard Cells vs. Leaves
  misc_feature: MA Experiment ID: 20000527 Result: Up-regulated in Transcription
  misc_feature: MA Experiment 20000527 PARAMETER Experiment Name: At_10percent_PEG_P Parameter: Age (day) Value: 20
  misc_feature: MA Experiment 20000527 PARAMETER Experiment Name: At_10percent_PEG_P Parameter: Organism Value: A. thaliana
  misc_feature: MA Experiment 20000527 PARAMETER Experiment Name: At_10percent_PEG_P Parameter: Plant Line Value: WS
  misc_feature: MA Experiment 20000527 PARAMETER Experiment Name: At_10percent_PEG_P Parameter: Timepoint (day) Value: 20
  misc_feature: MA Experiment 20000527 PARAMETER Experiment Name: At_10percent_PEG_P Parameter: Tissue Value: Whole Plant
  misc_feature: MA Experiment 20000527 PARAMETER Experiment Name: At_10percent_PEG_P Parameter: Treatment Value: 10percent PEG vs. No Treatment
  misc_feature: MA Experiment ID: 20000794 Result: Up-regulated in Transcription
  misc_feature: MA Experiment 20000794 PARAMETER Experiment Name: At_Petals_P Parameter: Age (day) Value: 23-25 days
  misc_feature: MA Experiment 20000794 PARAMETER Experiment Name: At_Petals_P Parameter: Plant Line Value: WS
  misc_feature: MA Experiment 20000794 PARAMETER Experiment Name: At_Petals_P Parameter: Tissue Value: Petals vs. Whole plant
  misc_feature: MA Experiment ID: 20001556 Result: Up-regulated in Transcription
  misc_feature: MA Experiment 20001556 PARAMETER Experiment Name: At_Drought_Soil_Dry_P Parameter: Age (day) Value: 26
  misc_feature: MA Experiment 20001556 PARAMETER Experiment Name: At_Drought_Soil_Dry_P Parameter: Organism Value: A. thaliana
  misc_feature: MA Experiment 20001556 PARAMETER Experiment Name: At_Drought_Soil_Dry_P Parameter: Plant Line Value: WS
  misc_feature: MA Experiment 20001556 PARAMETER Experiment Name: At_Drought_Soil_Dry_P Parameter: Post Timepoint (hr) Value: None
  misc_feature: MA Experiment 20001556 PARAMETER Experiment Name: At_Drought_Soil_Dry_P Parameter: Post-Treatment Value: None
  misc_feature: MA Experiment 20001556 PARAMETER Experiment Name: At_Drought_Soil_Dry_P Parameter: Timepoint (day) Value: 12
  misc_feature: MA Experiment 20001556 PARAMETER Experiment Name: At_Drought_Soil_Dry_P Parameter: Treatment Value: Drought vs. No Drought
  misc_feature: MA Experiment ID: 20001911 Result: Down-regulated in Transcription
  misc_feature: MA Experiment 20001911 PARAMETER Experiment Name: At_Drought_Reproduction_P Parameter: Age (day) Value: 40
  misc_feature: MA Experiment 20001911 PARAMETER Experiment Name: At_Drought_Reproduction_P Parameter: Organism Value: A. thaliana
  misc_feature: MA Experiment 20001911 PARAMETER Experiment Name: At_Drought_Reproduction_P Parameter: Plant Line Value: WS
  misc_feature: MA Experiment 20001911 PARAMETER Experiment Name: At_Drought_Reproduction_P Parameter: Timepoint (day) Value: 10
  misc_feature: MA Experiment 20001911 PARAMETER Experiment Name: At_Drought_Reproduction_P Parameter: Tissue Value: Flowers
  misc_feature: MA Experiment 20001911 PARAMETER Experiment Name: At_Drought_Reproduction_P Parameter: Treatment Value: Drought vs. No Drought
gtcaaatatttctgcacggaagcttcgaaaagaggtcatcaatggagtcttcactcttttctccatcttcctcttcttactcttctctcttcactgcaaaacctacgcgtcttttatcaccaaaacccaaattcacattctccatcagatcctccattgagaaacccaaacccaaactcgagaccaattcatcgaaatcccaatcatgggtcagtcccgattggctcacaacactcactcgtaccctttcctcaggaaaaaacgacgagtcaggtataccaatcgcgaacgcgaagctcgacgatgtcgctgatctcctcggaggtgctctcttcttacctctctacaaatggatgaatgagtacggacccatttaccgtctcgctgctggtcctcgtaatttcgtaattgtgagcgacccagcgatagctaaacatgttttgaggaattatccaaagtacgctaaaggcttagtcgctgaagtctctgaatttctatttggttcgggtttcgctatcgctgaaggacctctttggacagcgaggcgtagagcggtggttccatcgcttcacaggaggtatttgtctgtgattgtggagagagtattctgcaaatgtgcagagaggcttgttgagaagttgcagccttatgcagaagacggaagtgctgtgaatatggaagcgaagttctctcagatgacacttgatgtcattgggttgtctctttttaactacaatttcgattctttgactactgatagtcctgtcattgaagctgtttacactgctcttaaagaagctgagcttcgttctactgatcttctgccatattggaagatcgatgcattgtgtaagatagtcccgagacaggtgaaagctgaaaaggctgtaactttgataagggaaactgttgaagaccttattgctaagtgtaaagaaattgtcgaaagagaaggcgaaagaatcaatgatgaggagtatgtaaatgatgctgacccaagtatcctgcgtttcttgcttgcaagcagagaagaggtatcaagtgtgcagttacgggatgatcttctctcaatgctcgtagcgggtcatgaaaccactggatctgtcctcacttggacactttatctcctaagtaagaactcatctgcattaaggaaagcacaagaagaagtagacagagtgttagaaggaagaaacccggctttcgaggatataaaggagttgaagtacatcactcgttgtataaacgagtcaatgcgtctctatcctcatcctcctgtcttgataagaagagctcaagttcctgacattcttcctgggaactataaggtcaataccggacaagacattatgatttcagtctataacatccatcgttcttccgaggtatgggaaaaagctgaggaatttctgcctgaacgattcgacatagatggcgcaatccctaacgaaacaaacactgatttcaaattcatcccattcagtggagggcctagaaaatgtgtaggcgatcagtttgcattgatggaggcaattgtggcactcgcggtgtttcttcagcggttaaacgttgagctggttcctgatcagaccattagcatgaccacaggagcaaccatacacaccaccaatggattgtatatgaaggtgagccaaaggtaaaaaccagaatttatgttttcatgataattgattggtgtgaatggacttgtttcatagtactcttgagaaataaccacaaaaaaatgaattatggaaaatagttgtaccatcggaaatgtgaattttgaacagtgagatgctagtaccattaaagtttggtaattgtgttatcatttcaaatcaaactttcatacagcttgtgtttgttctccatttttcagtaattacgaaaatcaaaattttatttttttttgaatttctaaataatagactaaggtctaaaaccatcccattccatatggaccacacgtaacattaaccttaaaaaccatataaaaccatataaaaccaatactagtgggttctatagcgatgtgtagtttcactttcacgtacgaggaagattaaaaaaaatggagaacgaaagctcagagagtagaaacagagctcgtcttgccattatggagcttgctaacatgattagcgttcccatgtctctcaatgccgccgtgcgactaggcattgccgacgccatttggaacggcggagccaattctcctctctctgccgccgagatcctccctcgcctccacctaccatctcacactaccattggtggcgaccccgagaatcttcagcgtatacttcggatgctcaccagctacggtgtcttctccgaacaccttgttggatccattgagaggaaatactctcttacggacgtcggaaaaactcttgtaaccgactccggcggcctctcttacgctgcctacgtcctccaacatcaccaggaggcgttgatgcgagcatggccactagttcacacggcagtggtggagccggagacagagccgtacgtgaaagcaaacggcgaggcggcatacgctcagtatgggaaaagtgaggagatgaatggtctaatgcaaaaggcaatgtctggcgtatctgtaccgttcatgaaagctatattagacggctacgatgggtttaaatcagtggatattttggttgacgtaggaggtagtgcaggggattgtctgcgtatgatccttcaacaatttcctaacgtccgtgaagggattaatttcgatttacctgaagttgttgccaaagcccccaatattcctggagtgactcacgtgggtggggatatgttccaatcagttcctagcgctgacgctatcttcatgaagtgggtgttaacgacatggacggatgaagaatgcaagcagataatgaagaattgctacaacgcgttaccagttggaggaaagctgattgcgtgtgagccggtcttgcctaaggaaaccgatgaaagtcaccggactcgtgccttgttagaaggtgacatctttgtcatgaccatctatagaaccaaaggtaagcatagaaccgaagaagagtttatagagcttggtctctccgcgggattccctacttttcgacctttctacattgattacttctacaccatcttagagtttcagaagtaatattcaagcatttttcttctcatatttctaaaagcttcaaaataatgaatcaaaagacctctttgttaattgagttgagatatctagtgaagacattaatattttcatcaagatgtaataatctaaagtctatattctaagtgcatccttaaaaggcattttccatatatataagtttcatctttcg

SEQ ID NO: 25562 - protein, 552 aa, Arabidopsis thaliana
  peptide (1)..(552): Ceres Seq. ID no. 12602488
  misc_feature (88)..(552): Homolog of NCBI NO: 25282642 NR Description: probable cytochrome P450 [imported] - Arabidopsis
  misc_feature (88)..(552): Homolog of NCBI NO: 18398119 NR Description: cytochrome P450, putative
  misc_feature (14)..(283): Homolog of NCBI NO: 15231755 NR Description: cytochrome p450 family; protein id: At3g53130.1
  misc_feature (177)..(552): Homolog of NCBI NO: 15231755 NR Description: cytochrome p450 family; protein id: At3g53130.1
  misc_feature (68)..(549): Homolog of NCBI NO: 37536604 NR Description: putative cytochrome P450 monooxygenase
  misc_feature (14)..(552): Homolog of NCBI NO: 40218379 NR Description: chloroplast carotenoid epsilon-ring hydroxylase
  misc_feature (1)..(552): Homolog of NCBI NO: 20258842 NR Description: putative cytochrome P450 [Arabidopsis thaliana]
QIFLHGSFEKRSSMESSLFSPSSSSYSSLFTAKPTRLLSPKPKFTFSIRSSIEKPKPKLETNSSKSQSWVSPDWLTTLTRTLSSGKNDESGIPIANAKLDDVADLLGGALFLPLYKWMNEYGPIYRLAAGPRNFVIVSDPAIAKHVLRNYPKYAKGLVAEVSEFLFGSGFAIAEGPLWTARRRAVVPSLHRRYLSVIVERVFCKCAERLVEKLQPYAEDGSAVNMEAKFSQMTLDVIGLSLFNYNFDSLTTDSPVIEAVYTALKEAELRSTDLLPYWKIDALCKIVPRQVKAEKAVTLIRETVEDLIAKCKEIVEREGERINDEEYVNDADPSILRFLLASREEVSSVQLRDDLLSMLVAGHETTGSVLTWTLYLLSKNSSALRKAQEEVDRVLEGRNPAFEDIKELKYITRCINESMRLYPHPPVLIRRAQVPDILPGNYKVNTGQDIMISVYNIHRSSEVWEKAEEFLPERFDIDGAIPNETNTDFKFIPFSGGPRKCVGDQFALMEAIVALAVFLQRLNVELVPDQTISMTTGATIHTTNGLYMKVSQR

SEQ ID NO: 25563 - protein, 539 aa, Arabidopsis thaliana
  peptide (1)..(539): Ceres Seq. ID no. 12602489
  misc_feature (75)..(539): Homolog of NCBI NO: 25282642 NR Description: probable cytochrome P450 [imported] - Arabidopsis
  misc_feature (75)..(539): Homolog of NCBI NO: 18398119 NR Description: cytochrome P450, putative
  misc_feature (1)..(270): Homolog of NCBI NO: 15231755 NR Description: cytochrome p450 family; protein id: At3g53130.1
  misc_feature (164)..(539): Homolog of NCBI NO: 15231755 NR Description: cytochrome p450 family; protein id: At3g53130.1
  misc_feature (55)..(536): Homolog of NCBI NO: 37536604 NR Description: putative cytochrome P450 monooxygenase
  misc_feature (1)..(539): Homolog of NCBI NO: 40218379 NR Description: chloroplast carotenoid epsilon-ring hydroxylase
  misc_feature (1)..(539): Homolog of NCBI NO: 20258842 NR Description: putative cytochrome P450 [Arabidopsis thaliana]
MESSLFSPSSSSYSSLFTAKPTRLLSPKPKFTFSIRSSIEKPKPKLETNSSKSQSWVSPDWLTTLTRTLSSGKNDESGIPIANAKLDDVADLLGGALFLPLYKWMNEYGPIYRLAAGPRNFVIVSDPAIAKHVLRNYPKYAKGLVAEVSEFLFGSGFAIAEGPLWTARRRAVVPSLHRRYLSVIVERVFCKCAERLVEKLQPYAEDGSAVNMEAKFSQMTLDVIGLSLFNYNFDSLTTDSPVIEAVYTALKEAELRSTDLLPYWKIDALCKIVPRQVKAEKAVTLIRETVEDLIAKCKEIVEREGERINDEEYVNDADPSILRFLLASREEVSSVQLRDDLLSMLVAGHETTGSVLTWTLYLLSKNSSALRKAQEEVDRVLEGRNPAFEDIKELKYITRCINESMRLYPHPPVLIRRAQVPDILPGNYKVNTGQDIMISVYNIHRSSEVWEKAEEFLPERFDIDGAIPNETNTDFKFIPFSGGPRKCVGDQFALMEAIVALAVFLQRLNVELVPDQTISMTTGATIHTTNGLYMKVSQR

SEQ ID NO: 25564 - protein, 435 aa, Arabidopsis thaliana
  peptide (1)..(435): Ceres Seq. ID no. 12602490
  misc_feature (1)..(435): Homolog of NCBI NO: 25282642 NR Description: probable cytochrome P450 [imported] - Arabidopsis
  misc_feature (1)..(435): Homolog of NCBI NO: 18398119 NR Description: cytochrome P450, putative
  misc_feature (1)..(166): Homolog of NCBI NO: 15231755 NR Description: cytochrome p450 family; protein id: At3g53130.1
  misc_feature (60)..(435): Homolog of NCBI NO: 15231755 NR Description: cytochrome p450 family; protein id: At3g53130.1
  misc_feature (1)..(432): Homolog of NCBI NO: 37536604 NR Description: putative cytochrome P450 monooxygenase
  misc_feature (1)..(435): Homolog of NCBI NO: 40218379 NR Description: chloroplast carotenoid epsilon-ring hydroxylase
  misc_feature (1)..(435): Homolog of NCBI NO: 20258842 NR Description: putative cytochrome P450 [Arabidopsis thaliana]
MNEYGPIYRLAAGPRNFVIVSDPAIAKHVLRNYPKYAKGLVAEVSEFLFGSGFAIAEGPLWTARRRAVVPSLHRRYLSVIVERVFCKCAERLVEKLQPYAEDGSAVNMEAKFSQMTLDVIGLSLFNYNFDSLTTDSPVIEAVYTALKEAELRSTDLLPYWKIDALCKIVPRQVKAEKAVTLIRETVEDLIAKCKEIVEREGERINDEEYVNDADPSILRFLLASREEVSSVQLRDDLLSMLVAGHETTGSVLTWTLYLLSKNSSALRKAQEEVDRVLEGRNPAFEDIKELKYITRCINESMRLYPHPPVLIRRAQVPDILPGNYKVNTGQDIMISVYNIHRSSEVWEKAEEFLPERFDIDGAIPNETNTDFKFIPFSGGPRKCVGDQFALMEAIVALAVFLQRLNVELVPDQTISMTTGATIHTTNGLYMKVSQR

SEQ ID NO: 25565 - DNA, 1317 bp, Arabidopsis thaliana
  misc_feature (1)..(1317): Ceres Seq. ID no. 12322014
  misc_feature: MA Experiment ID: 108435 Result: Down-regulated in Transcription
  misc_feature: MA Experiment 108435 PARAMETER Experiment Name: At_stm_Mutants_cDNA_P Parameter: Plant Line Value: wt Landsburg vs stm
  misc_feature: MA Experiment 108435 PARAMETER Experiment Name: At_stm_Mutants_cDNA_P Parameter: Tissue Value: Shoot Apical Meristem Region
  misc_feature: MA Experiment ID: 108462 Result: Up-regulated in Transcription
  misc_feature: MA Experiment 108462 PARAMETER Experiment Name: At_Germinating_Seeds_cDNA_P Parameter: Age (day) Value: 2 vs. 0
  misc_feature: MA Experiment 108462 PARAMETER Experiment Name: At_Germinating_Seeds_cDNA_P Parameter: Tissue Value: Germinating Seeds
  misc_feature: MA Experiment ID: 108463 Result: Up-regulated in Transcription
  misc_feature: MA Experiment 108463 PARAMETER Experiment Name: At_Germinating_Seeds_cDNA_P Parameter: Age (day) Value: 3 vs. 0
  misc_feature: MA Experiment 108463 PARAMETER Experiment Name: At_Germinating_Seeds_cDNA_P Parameter: Tissue Value: Germinating Seeds
  misc_feature: MA Experiment ID: 108464 Result: Up-regulated in Transcription
  misc_feature: MA Experiment 108464 PARAMETER Experiment Name: At_Germinating_Seeds_cDNA_P Parameter: Age (day) Value: 4 vs. 0
  misc_feature: MA Experiment 108464 PARAMETER Experiment Name: At_Germinating_Seeds_cDNA_P Parameter: Tissue Value: Germinating Seeds
  misc_feature: MA Experiment ID: 108501 Result: Down-regulated in Transcription
  misc_feature: MA Experiment 108501 PARAMETER Experiment Name: At_ap2_floral_buds_cDNA_P Parameter: Plant Line Value: ap2 (Ler.)
  misc_feature: MA Experiment 108501 PARAMETER Experiment Name: At_ap2_floral_buds_cDNA_P Parameter: Tissue Value: Closed Flower
  misc_feature: MA Experiment ID: 108572 Result: Up-regulated in Transcription
  misc_feature: MA Experiment 108572 PARAMETER Experiment Name: At_Drought_cDNA_P Parameter: Timepoint (hr) Value: 1
  misc_feature: MA Experiment 108572 PARAMETER Experiment Name: At_Drought_cDNA_P Parameter: Tissue Value: Aerial
  misc_feature: MA Experiment 108572 PARAMETER Experiment Name: At_Drought_cDNA_P Parameter: Treatment Value: Drought vs. No Drought
  misc_feature: MA Experiment ID: 108574 Result: Up-regulated in Transcription
  misc_feature: MA Experiment 108574 PARAMETER Experiment Name: At_Wounding__cDNA_P Parameter: Timepoint (hr) Value: 1
  misc_feature: MA Experiment 108574 PARAMETER Experiment Name: At_Wounding__cDNA_P Parameter: Tissue Value: Aerial
  misc_feature: MA Experiment 108574 PARAMETER Experiment Name: At_Wounding__cDNA_P Parameter: Treatment Value: Wounding vs. No Wounding
  misc_feature: MA Experiment ID: 108577 Result: Down-regulated in Transcription
  misc_feature: MA Experiment 108577 PARAMETER Experiment Name: At_42deg_Heat_cDNA_P Parameter: Temperature (deg C) Value: 42 vs. 22
  misc_feature: MA Experiment 108577 PARAMETER Experiment Name: At_42deg_Heat_cDNA_P Parameter: Timepoint (hr) Value: 6
  misc_feature: MA Experiment 108577 PARAMETER Experiment Name: At_42deg_Heat_cDNA_P Parameter: Tissue Value: Aerial
  misc_feature: MA Experiment ID: 108579 Result: Up-regulated in Transcription
  misc_feature: MA Experiment 108579 PARAMETER Experiment Name: At_4deg_Cold_cDNA_P Parameter: Temperature (deg C) Value: 4 vs. 22
  misc_feature: MA Experiment 108579 PARAMETER Experiment Name: At_4deg_Cold_cDNA_P Parameter: Timepoint (hr) Value: 6
  misc_feature: MA Experiment 108579 PARAMETER Experiment Name: At_4deg_Cold_cDNA_P Parameter: Tissue Value: Aerial
  misc_feature: MA Experiment ID: 108585 Result: Down-regulated in Transcription
  misc_feature: MA Experiment 108585 PARAMETER Experiment Name: At_5mM_NaNP_cDNA_P Parameter: Timepoint (hr) Value: 6
  misc_feature: MA Experiment 108585 PARAMETER Experiment Name: At_5mM_NaNP_cDNA_P Parameter: Tissue Value: Aerial
  misc_feature: MA Experiment 108585 PARAMETER Experiment Name: At_5mM_NaNP_cDNA_P Parameter: Treatment Value: null
  misc_feature: MA Experiment ID: 108594 Result: Up-regulated in Transcription
  misc_feature: MA Experiment 108594 PARAMETER Experiment Name: At_Ler-rhl_Root_cDNA_P Parameter: Plant Line Value: null
  misc_feature: MA Experiment ID: 108595 Result: Up-regulated in Transcription
  misc_feature: MA Experiment 108595 PARAMETER Experiment Name: At_Ler-pi_Ovule_cDNA_P Parameter: Plant Line Value: null
  misc_feature: MA Experiment ID: 108668 Result: Down-regulated in Transcription
  misc_feature: MA Experiment 108668 PARAMETER Experiment Name: At_2mM_SA_cDNA_P Parameter: Plant Line Value: WS
  misc_feature: MA Experiment 108668 PARAMETER Experiment Name: At_2mM_SA_cDNA_P Parameter: Timepoint (hr) Value: 6
  misc_feature: MA Experiment 108668 PARAMETER Experiment Name: At_2mM_SA_cDNA_P Parameter: Treatment Value: 2mM SA vs. No Treatment
  misc_feature: MA Experiment ID: 20000030 Result: Down-regulated in Transcription
  misc_feature: MA Experiment 20000030 PARAMETER Experiment Name: At_CS6630_Roots_cDNA_P Parameter: Plant Line Value: CS6630 vs. WS
  misc_feature: MA Experiment 20000030 PARAMETER Experiment Name: At_CS6630_Roots_cDNA_P Parameter: Tissue Value: Roots
  misc_feature: MA Experiment ID: 20000070 Result: Up-regulated in Transcription
  misc_feature: MA Experiment 20000070 PARAMETER Experiment Name: At_100uM_ABA_Mutants_cDNA_P Parameter: Plant Line Value: CS24
  misc_feature: MA Experiment 20000070 PARAMETER Experiment Name: At_100uM_ABA_Mutants_cDNA_P Parameter: Timepoint (hr) Value: 6
  misc_feature: MA Experiment 20000070 PARAMETER Experiment Name: At_100uM_ABA_Mutants_cDNA_P Parameter: Tissue Value: Aerial
  misc_feature: MA Experiment 20000070 PARAMETER Experiment Name: At_100uM_ABA_Mutants_cDNA_P Parameter: Treatment Value: 100uM ABA vs. No Treatment
  misc_feature: MA Experiment ID: 20000071 Result: Up-regulated in Transcription
  misc_feature: MA Experiment 20000071 PARAMETER Experiment Name: At_100uM_ABA_Mutants_cDNA_P Parameter: Plant Line Value: CS8104
  misc_feature: MA Experiment 20000071 PARAMETER Experiment Name: At_100uM_ABA_Mutants_cDNA_P Parameter: Timepoint (hr) Value: 6
  misc_feature: MA Experiment 20000071 PARAMETER Experiment Name: At_100uM_ABA_Mutants_cDNA_P Parameter: Tissue Value: Aerial
  misc_feature: MA Experiment 20000071 PARAMETER Experiment Name: At_100uM_ABA_Mutants_cDNA_P Parameter: Treatment Value: 100uM ABA vs. No Treatment
  misc_feature: MA Experiment ID: 20000072 Result: Up-regulated in Transcription
  misc_feature: MA Experiment 20000072 PARAMETER Experiment Name: At_100uM_ABA_Mutants_cDNA_P Parameter: Plant Line Value: CS8105
  misc_feature: MA Experiment 20000072 PARAMETER Experiment Name: At_100uM_ABA_Mutants_cDNA_P Parameter: Timepoint (hr) Value: 6
  misc_feature: MA Experiment 20000072 PARAMETER Experiment Name: At_100uM_ABA_Mutants_cDNA_P Parameter: Tissue Value: Aerial
  misc_feature: MA Experiment 20000072 PARAMETER Experiment Name: At_100uM_ABA_Mutants_cDNA_P Parameter: Treatment Value: 100uM ABA vs. No Treatment
  misc_feature: MA Experiment ID: 20000086 Result: Up-regulated in Transcription
  misc_feature: MA Experiment 20000086 PARAMETER Experiment Name: At_100uM_ABA_Mutants_cDNA_P Parameter: Plant Line Value: CS22
  misc_feature: MA Experiment 20000086 PARAMETER Experiment Name: At_100uM_ABA_Mutants_cDNA_P Parameter: Timepoint (hr) Value: 6
  misc_feature: MA Experiment 20000086 PARAMETER Experiment Name: At_100uM_ABA_Mutants_cDNA_P Parameter: Tissue Value: Aerial
  misc_feature: MA Experiment 20000086 PARAMETER Experiment Name: At_100uM_ABA_Mutants_cDNA_P Parameter: Treatment Value: 100uM ABA vs. No Treatment
  misc_feature: MA Experiment ID: 20000087 Result: Up-regulated in Transcription
  misc_feature: MA Experiment 20000087 PARAMETER Experiment Name: At_100uM_ABA_Mutants_cDNA_P Parameter: Plant Line Value: WS
  misc_feature: MA Experiment 20000087 PARAMETER Experiment Name: At_100uM_ABA_Mutants_cDNA_P Parameter: Timepoint (hr) Value: 6
  misc_feature: MA Experiment 20000087 PARAMETER Experiment Name: At_100uM_ABA_Mutants_cDNA_P Parameter: Tissue Value: Aerial
  misc_feature: MA Experiment 20000087 PARAMETER Experiment Name: At_100uM_ABA_Mutants_cDNA_P Parameter: Treatment Value: 100uM ABA vs. No Treatment
  misc_feature: MA Experiment ID: 20000088 Result: Up-regulated in Transcription
  misc_feature: MA Experiment 20000088 PARAMETER Experiment Name: At_100uM_ABA_Mutants_cDNA_P Parameter: Plant Line Value: Landsberg
  misc_feature: MA Experiment 20000088 PARAMETER Experiment Name: At_100uM_ABA_Mutants_cDNA_P Parameter: Timepoint (hr) Value: 6
  misc_feature: MA Experiment 20000088 PARAMETER Experiment Name: At_100uM_ABA_Mutants_cDNA_P Parameter: Tissue Value: Aerial
  misc_feature: MA Experiment 20000088 PARAMETER Experiment Name: At_100uM_ABA_Mutants_cDNA_P Parameter: Treatment Value: 100uM ABA vs. No Treatment
  misc_feature: MA Experiment ID: 20000089 Result: Up-regulated in Transcription
  misc_feature: MA Experiment ID: 20000111 Result: Down-regulated in Transcription
  misc_feature: MA Experiment 20000111 PARAMETER Experiment Name: At_42deg_Heat_cDNA_P Parameter: Temperature (deg C) Value: 42 vs. 22
  misc_feature: MA Experiment 20000111 PARAMETER Experiment Name: At_42deg_Heat_cDNA_P Parameter: Timepoint (hr) Value: 6
  misc_feature: MA Experiment 20000111 PARAMETER Experiment Name: At_42deg_Heat_cDNA_P Parameter: Tissue Value: Aerial
  misc_feature: MA Experiment ID: 20000112 Result: Down-regulated in Transcription
  misc_feature: MA Experiment 20000112 PARAMETER Experiment Name: At_42deg_Heat_cDNA_P Parameter: Temperature (deg C) Value: 42 vs. 22
  misc_feature: MA Experiment 20000112 PARAMETER Experiment Name: At_42deg_Heat_cDNA_P Parameter: Timepoint (hr) Value: 2
  misc_feature: MA Experiment 20000112 PARAMETER Experiment Name: At_42deg_Heat_cDNA_P Parameter: Tissue Value: Aerial
  misc_feature: MA Experiment ID: 20000113 Result: Down-regulated in Transcription
  misc_feature: MA Experiment 20000113 PARAMETER Experiment Name: At_42deg_Heat_cDNA_P Parameter: Temperature (deg C) Value: 42 vs. 22
  misc_feature: MA Experiment 20000113 PARAMETER Experiment Name: At_42deg_Heat_cDNA_P Parameter: Timepoint (hr) Value: 8
  misc_feature: MA Experiment 20000113 PARAMETER Experiment Name: At_42deg_Heat_cDNA_P Parameter: Tissue Value: Aerial
  misc_feature: MA Experiment ID: 20000117 Result: Up-regulated in Transcription
  misc_feature: MA Experiment 20000117 PARAMETER Experiment Name: At_100uM_ABA_Mutants_cDNA_P Parameter: Plant Line Value: Columbia
  misc_feature: MA Experiment 20000117 PARAMETER Experiment Name: At_100uM_ABA_Mutants_cDNA_P Parameter: Timepoint (hr) Value: 6
  misc_feature: MA Experiment 20000117 PARAMETER Experiment Name: At_100uM_ABA_Mutants_cDNA_P Parameter: Tissue Value: Aerial
  misc_feature: MA Experiment 20000117 PARAMETER Experiment Name: At_100uM_ABA_Mutants_cDNA_P Parameter: Treatment Value: 100uM ABA vs. No Treatment
  misc_feature: MA Experiment ID: 20000173 Result: Down-regulated in Transcription
  misc_feature: MA Experiment 20000173 PARAMETER Experiment Name: At_42deg_Heat_P Parameter: Age (day) Value: 14
  misc_feature: MA Experiment 20000173 PARAMETER Experiment Name: At_42deg_Heat_P Parameter: Organism Value: A. thaliana
  misc_feature: MA Experiment 20000173 PARAMETER Experiment Name: At_42deg_Heat_P Parameter: Plant Line Value: WS
  misc_feature: MA Experiment 20000173 PARAMETER Experiment Name: At_42deg_Heat_P Parameter: Temperature (deg C) Value: 42 vs. 22
  misc_feature: MA Experiment 20000173 PARAMETER Experiment Name: At_42deg_Heat_P Parameter: Timepoint (hr) Value: 6
  misc_feature: MA Experiment 20000173 PARAMETER Experiment Name: At_42deg_Heat_P Parameter: Tissue Value: Aerial
  misc_feature: MA Experiment ID: 20000184 Result: Down-regulated in Transcription
  misc_feature: MA Experiment 20000184 PARAMETER Experiment Name: At_Shoots__P Parameter: Age (day) Value: 7
  misc_feature: MA Experiment 20000184 PARAMETER Experiment Name: At_Shoots__P Parameter: Tissue Value: Shoots vs. Whole Plant
  misc_feature: MA Experiment ID: 20000185 Result: Down-regulated in Transcription
  misc_feature: MA Experiment 20000185 PARAMETER Experiment Name: At_Roots__P Parameter: Age (day) Value: 7 vs. 21
  misc_feature: MA Experiment 20000185 PARAMETER Experiment Name: At_Roots__P Parameter: Organism Value: A. thaliana
  misc_feature: MA Experiment 20000185 PARAMETER Experiment Name: At_Roots__P Parameter: Tissue Value: Roots vs. Whole Plant
  misc_feature: MA Experiment ID: 20000211 Result: Up-regulated in Transcription
  misc_feature: MA Experiment 20000211 PARAMETER Experiment Name: At_0.001percent_MeJA__P Parameter: Age (day) Value: 14
  misc_feature: MA Experiment 20000211 PARAMETER Experiment Name: At_0.001percent_MeJA__P Parameter: Organism Value: A. thaliana
  misc_feature: MA Experiment 20000211 PARAMETER Experiment Name: At_0.001percent_MeJA__P Parameter: Plant Line Value: WS
  misc_feature: MA Experiment 20000211 PARAMETER Experiment Name: At_0.001percent_MeJA__P Parameter: Timepoint (hr) Value: 1
  misc_feature: MA Experiment 20000211 PARAMETER Experiment Name: At_0.001percent_MeJA__P Parameter: Tissue Value: Aerial
  misc_feature: MA Experiment 20000211 PARAMETER Experiment Name: At_0.001percent_MeJA__P Parameter: Treatment Value: 0.001percent MeJA vs. No Treatment
  misc_feature: MA Experiment ID: 20000213 Result: Up-regulated in Transcription
  misc_feature: MA Experiment 20000213 PARAMETER Experiment Name: At_4deg_Cold_P Parameter: Timepoint (hr) Value: 2
  misc_feature: MA Experiment ID: 20000227 Result: Down-regulated in Transcription
  misc_feature: MA Experiment 20000227 PARAMETER Experiment Name: At_Root-Tips-vs-Tops_P Parameter: Tissue Value: Root Tips vs. Root Tops
  misc_feature: MA Experiment ID: 20000234 Result: Down-regulated in Transcription
  misc_feature: MA Experiment 20000234 PARAMETER Experiment Name: At_Siliques_P Parameter: Age (day) Value: 21
  misc_feature: MA Experiment 20000234 PARAMETER Experiment Name: At_Siliques_P Parameter: Organism Value: A. thaliana
  misc_feature: MA Experiment 20000234 PARAMETER Experiment Name: At_Siliques_P Parameter: Plant Line Value: WS
  misc_feature: MA Experiment 20000234 PARAMETER Experiment Name: At_Siliques_P Parameter: Tissue Value: Less Than 5mm Siliques vs. Whole Plant
  misc_feature: MA Experiment ID: 20000235 Result: Down-regulated in Transcription
  misc_feature: MA Experiment 20000235 PARAMETER Experiment Name: At_Siliques_P Parameter: Age (day) Value: 21
  misc_feature: MA Experiment 20000235 PARAMETER Experiment Name: At_Siliques_P Parameter: Organism Value: A. thaliana
  misc_feature: MA Experiment 20000235 PARAMETER Experiment Name: At_Siliques_P Parameter: Plant Line Value: WS
  misc_feature: MA Experiment 20000235 PARAMETER Experiment Name: At_Siliques_P Parameter: Tissue Value: 5-10mm Siliques vs. Whole Plant
  misc_feature: MA Experiment ID: 20000269 Result: Up-regulated in Transcription
  misc_feature: MA Experiment 20000269 PARAMETER Experiment Name: At_1mM_KNO3_L-vs-H_Roots_P Parameter: Age (day) Value: 7,10,12
  misc_feature: MA Experiment 20000269 PARAMETER Experiment Name: At_1mM_KNO3_L-vs-H_Roots_P Parameter: Organism Value: A. thaliana
  misc_feature: MA Experiment 20000269 PARAMETER Experiment Name: At_1mM_KNO3_L-vs-H_Roots_P Parameter: Plant Line Value: WS
  misc_feature: MA Experiment 20000269 PARAMETER Experiment Name: At_1mM_KNO3_L-vs-H_Roots_P Parameter: Timepoint (day) Value: 7,10,12
  misc_feature: MA Experiment 20000269 PARAMETER Experiment Name: At_1mM_KNO3_L-vs-H_Roots_P Parameter: Tissue Value: Roots
  misc_feature: MA Experiment 20000269 PARAMETER Experiment Name: At_1mM_KNO3_L-vs-H_Roots_P Parameter: Treatment Value: 1mM KNO3 vs. 50mM KNO3
  misc_feature: MA Experiment ID: 20000436 Result: Up-regulated in Transcription
  misc_feature: MA Experiment 20000436 PARAMETER Experiment Name: At_Drought_P Parameter: Age (day) Value: 7
  misc_feature: MA Experiment 20000436 PARAMETER Experiment Name: At_Drought_P Parameter: Organism Value: A. thaliana
  misc_feature: MA Experiment 20000436 PARAMETER Experiment Name: At_Drought_P Parameter: Plant Line Value: WS
  misc_feature: MA Experiment 20000436 PARAMETER Experiment Name: At_Drought_P Parameter: Timepoint (hr) Value: 12
  misc_feature: MA Experiment 20000436 PARAMETER Experiment Name: At_Drought_P Parameter: Tissue Value: Whole Plant
  misc_feature: MA Experiment 20000436 PARAMETER Experiment Name: At_Drought_P Parameter: Treatment Value: Drought vs. No Drought
  misc_feature: MA Experiment ID: 20000437 Result: Up-regulated in Transcription
  misc_feature: MA Experiment 20000437 PARAMETER Experiment Name: At_Drought_P Parameter: Age (day) Value: 8
  misc_feature: MA Experiment 20000437 PARAMETER Experiment Name: At_Drought_P Parameter: Organism Value: A. thaliana
  misc_feature: MA Experiment 20000437 PARAMETER Experiment Name: At_Drought_P Parameter: Plant Line Value: WS
  misc_feature: MA Experiment 20000437 PARAMETER Experiment Name: At_Drought_P Parameter: Timepoint (hr) Value: 24
  misc_feature: MA Experiment 20000437 PARAMETER Experiment Name: At_Drought_P Parameter: Tissue Value: Whole Plant
  misc_feature: MA Experiment 20000437 PARAMETER Experiment Name: At_Drought_P Parameter: Treatment Value: Drought vs. No Drought
  misc_feature: MA Experiment ID: 20000438 Result: Down-regulated in Transcription
  misc_feature: MA Experiment 20000438 PARAMETER Experiment Name: At_Shoots__P Parameter: Age (day) Value: 14
  misc_feature: MA Experiment 20000438 PARAMETER Experiment Name: At_Shoots__P Parameter: Tissue Value: Shoots vs. Whole Plant
  misc_feature: MA Experiment ID: 20000451 Result: Down-regulated in Transcription
  misc_feature: MA Experiment 20000451 PARAMETER Experiment Name: At_CS6879_Shoots-Roots_P Parameter: Age (day) Value: 14
  misc_feature: MA Experiment 20000451 PARAMETER Experiment Name: At_CS6879_Shoots-Roots_P Parameter: Organism Value: A. thaliana
  misc_feature: MA Experiment 20000451 PARAMETER Experiment Name: At_CS6879_Shoots-Roots_P Parameter: Plant Line Value: CS6879 vs. WS
  misc_feature: MA Experiment 20000451 PARAMETER Experiment Name: At_CS6879_Shoots-Roots_P Parameter: Tissue Value: Roots
  misc_feature: MA Experiment ID: 20000495 Result: Down-regulated in Transcription
  misc_feature: MA Experiment 20000495 PARAMETER Experiment Name: At_Guard_Cells_P Parameter: Harvest Date Value: 8/2/2002
  misc_feature: MA Experiment 20000495 PARAMETER Experiment Name: At_Guard_Cells_P Parameter: Organism Value: A. thaliana
  misc_feature: MA Experiment 20000495 PARAMETER Experiment Name: At_Guard_Cells_P Parameter: Tissue Value: Guard Cells vs. Leaves
  misc_feature: MA Experiment ID: 20001247 Result: Down-regulated in Transcription
  misc_feature: MA Experiment 20001247 PARAMETER Experiment Name: At_Far-red-induction_P Parameter: Age (day) Value: 7
  misc_feature: MA Experiment 20001247 PARAMETER Experiment Name: At_Far-red-induction_P Parameter: Light Value: Far-red vs. White
  misc_feature: MA Experiment 20001247 PARAMETER Experiment Name: At_Far-red-induction_P Parameter: Organism Value: A. thaliana
  misc_feature: MA Experiment 20001247 PARAMETER Experiment Name: At_Far-red-induction_P Parameter: Plant Line Value: Columbia
  misc_feature: MA Experiment 20001247 PARAMETER Experiment Name: At_Far-red-induction_P Parameter: Timepoint (hr) Value: 1
  misc_feature: MA Experiment 20001247 PARAMETER Experiment Name: At_Far-red-induction_P Parameter: Tissue Value: Whole Plant
  misc_feature: MA Experiment ID: 20001451 Result: Down-regulated in Transcription
  misc_feature: MA Experiment 20001451 PARAMETER Experiment Name: At_Far-red-induction_P Parameter: Age (day) Value: 7
  misc_feature: MA Experiment 20001451 PARAMETER Experiment Name: At_Far-red-induction_P Parameter: Light Value: Far-red vs. White
  misc_feature: MA Experiment 20001451 PARAMETER Experiment Name: At_Far-red-induction_P Parameter: Organism Value: A. thaliana
  misc_feature: MA Experiment 20001451 PARAMETER Experiment Name: At_Far-red-induction_P Parameter: Plant Line Value: Columbia
  misc_feature: MA Experiment 20001451 PARAMETER Experiment Name: At_Far-red-induction_P Parameter: Timepoint (hr) Value: 24
  misc_feature: MA Experiment 20001451 PARAMETER Experiment Name: At_Far-red-induction_P Parameter: Tissue Value: Whole Plant
  misc_feature: MA Experiment ID: 20001558 Result: Down-regulated in Transcription
  misc_feature: MA Experiment 20001558 PARAMETER Experiment Name: At_Drought_Soil_Dry_P Parameter: Age (day) Value: 27
  misc_feature: MA Experiment 20001558 PARAMETER Experiment Name: At_Drought_Soil_Dry_P Parameter: Organism Value: A. thaliana
  misc_feature: MA Experiment 20001558 PARAMETER Experiment Name: At_Drought_Soil_Dry_P Parameter: Plant Line Value: WS
  misc_feature: MA Experiment 20001558 PARAMETER Experiment Name: At_Drought_Soil_Dry_P Parameter: Post Timepoint (hr) Value: 6
  misc_feature: MA Experiment 20001558 PARAMETER Experiment Name: At_Drought_Soil_Dry_P Parameter: Post-Treatment Value: Re-Water vs. No Drought
  misc_feature: MA Experiment 20001558 PARAMETER Experiment Name: At_Drought_Soil_Dry_P Parameter: Timepoint (day) Value: 13
  misc_feature: MA Experiment 20001558 PARAMETER Experiment Name: At_Drought_Soil_Dry_P Parameter: Treatment Value: Drought vs. No Drought
  misc_feature: MA Experiment ID: 20001905 Result: Down-regulated in Transcription
  misc_feature: MA Experiment 20001905 PARAMETER Experiment Name: At_Drought_Reproduction_P Parameter: Age (day) Value: 40
  misc_feature: MA Experiment 20001905 PARAMETER Experiment Name: At_Drought_Reproduction_P Parameter: Organism Value: A. thaliana
  misc_feature: MA Experiment 20001905 PARAMETER Experiment Name: At_Drought_Reproduction_P Parameter: Plant Line Value: WS
  misc_feature: MA Experiment 20001905 PARAMETER Experiment Name: At_Drought_Reproduction_P Parameter: Timepoint (day) Value: 10
  misc_feature: MA Experiment 20001905 PARAMETER Experiment Name: At_Drought_Reproduction_P Parameter: Tissue Value: Rosettes
  misc_feature: MA Experiment 20001905 PARAMETER Experiment Name: At_Drought_Reproduction_P Parameter: Treatment Value: Drought vs. No Drought
  misc_feature: MA Experiment ID: 20001906 Result: Down-regulated in Transcription
  misc_feature: MA Experiment 20001906 PARAMETER Experiment Name: At_Drought_Reproduction_P Parameter: Age (day) Value: 35
  misc_feature: MA Experiment 20001906 PARAMETER Experiment Name: At_Drought_Reproduction_P Parameter: Organism Value: A. thaliana
  misc_feature: MA Experiment 20001906 PARAMETER Experiment Name: At_Drought_Reproduction_P Parameter: Plant Line Value: WS
  misc_feature: MA Experiment 20001906 PARAMETER Experiment Name: At_Drought_Reproduction_P Parameter: Timepoint (day) Value: 5
  misc_feature: MA Experiment 20001906 PARAMETER Experiment Name: At_Drought_Reproduction_P Parameter: Tissue Value: Siliques
  misc_feature: MA Experiment 20001906 PARAMETER Experiment Name: At_Drought_Reproduction_P Parameter: Treatment Value: Drought vs. No Drought
  misc_feature: MA Experiment ID: 20001911 Result: Down-regulated in Transcription
  misc_feature: MA Experiment 20001911 PARAMETER Experiment Name: At_Drought_Reproduction_P Parameter: Age (day) Value: 40
  misc_feature: MA Experiment 20001911 PARAMETER Experiment Name: At_Drought_Reproduction_P Parameter: Organism Value: A. thaliana
  misc_feature: MA Experiment 20001911 PARAMETER Experiment Name: At_Drought_Reproduction_P Parameter: Plant Line Value: WS
  misc_feature: MA Experiment 20001911 PARAMETER Experiment Name: At_Drought_Reproduction_P Parameter: Timepoint (day) Value: 10
  misc_feature: MA Experiment 20001911 PARAMETER Experiment Name: At_Drought_Reproduction_P Parameter: Tissue Value: Flowers
  misc_feature: MA Experiment 20001911 PARAMETER Experiment Name: At_Drought_Reproduction_P Parameter: Treatment Value: Drought vs. No Drought
aaacaaatttcaagttctttaaacgatttccttttcaagaaaaatccttctccttcttctttttaccacatagatcttcttgatctacaatggattctgtttctctttctgaggttactgtcattaaaggaacaacacatttgggttttatgcacagtttcagacagccattttgtggtgtcaaaatatctccaaagttctatttatccaaagttgatggaccaaaggcaatatcttcgagcagcaacacaaagagtcaatttgtttatggaggaggaagcatagctgcaacttcagattcaggttataagatgaatggagtaaacctaaaaagcagaacattgatgagttctgcagttaaagaaagatcattacttgatgcttatgatgatgagtatggtggagtaatagtagatcatggaaaattaccatcaaacccttatgctttcgcttctatgcttcgagcttctctatccgattggagaagaaagggaaagaaaggagtttggttaaagttacctgtggaacaatcagaattagtcccaatagctataaaggaaggttttgagtatcatcatgcagagaaaggatatgtaatgttaacatattggataccagaggaggaacctagtatgcttcctgcaaatgcttcacatcaagttggtgttggaggttttgtattaaatcaacataaagaggtgcttgtggtacaagaaaagtattctgctccttcgattactggtctatggaagttaccaacagggtttattaatgaatctgaagagattttctctggtgctgtaagagaagtcaaggaagaaactggggtagatacagagttctcagaggttatagctttcagacatgctcacaacgttgcatttgagaaatctgatctgttcttcatctgtatgttgagaccactctctgataagataatcatcgatgctcttgagatcaaagccgcaaagtggatgccattggctgaatttgtggagcaaccgatgataagaggagacaaaatgtttaaaagagtgattgaaatatgcgaggcgagattaagccatcggtactgcggtctttctcctcatcgacttgtctctacttttgatggcaaaccttcttctctctattacaacgttgttgatgatgatcatgatccttcccactccaattgtagcactgagttttatagatagacgggtaaaacagaaccaaatcaagtggttcgattctgtatatacttattctcatgtaatgtatgttgttatttgatactctctcttcagtatagtaaatagtaatagatcctctgcc

SEQ ID NO: 25566 - protein, 369 aa, Arabidopsis thaliana
  peptide (1)..(369): Ceres Seq. ID no. 12322015
  misc_feature (189)..(322): Pfam Name: NUDIX domain Pfam Description: NUDIX domain
  misc_feature (86)..(356): Homolog of NCBI NO: 15228145 NR Description: putative mutT domain protein; protein id:
  misc_feature (95)..(358): Homolog of NCBI NO: 7486814 NR Description: hypothetical protein M7J2.190 - Arabidopsis
  misc_feature (95)..(358): Homolog of NCBI NO: 38564312 NR Description: At4g25434 [Arabidopsis thaliana]
  misc_feature (94)..(353): Homolog of NCBI NO: 9758793 NR Description: MutT domain protein-like [Arabidopsis thaliana]
  misc_feature (94)..(353): Homolog of NCBI NO: 18422823 NR Description: MutT domain protein-like
  misc_feature (88)..(364): Homolog of NCBI NO: 38346172 NR Description: OSJNBa0079A21.19 [Oryza sativa (japonica
  misc_feature (75)..(369): Homolog of NCBI NO: 8809607 NR Description: mutT domain protein-like [Arabidopsis thaliana]
  misc_feature (1)..(369): Homolog of NCBI NO: 21593371 NR Description: mutT domain protein-like [Arabidopsis thaliana]
  misc_feature (1)..(369): Homolog of NCBI NO: 18422772 NR Description: mutT domain protein-like
  misc_feature (1)..(369): Homolog of NCBI NO: 21928133 NR Description: AT5g47240/MQL5_10 [Arabidopsis thaliana]
MDSVSLSEVTVIKGTTHLGFMHSFRQPFCGVKISPKFYLSKVDGPKAISSSSNTKSQFVYGGGSIAATSDSGYKMNGVNLKSRTLMSSAVKERSLLDAYDDEYGGVIVDHGKLPSNPYAFASMLRASLSDWRRKGKKGVWLKLPVEQSELVPIAIKEGFEYHHAEKGYVMLTYWIPEEEPSMLPANASHQVGVGGFVLNQHKEVLVVQEKYSAPSITGLWKLPTGFINESEEIFSGAVREVKEETGVDTEFSEVIAFRHAHNVAFEKSDLFFICMLRPLSDKIIIDALEIKAAKWMPLAEFVEQPMIRGDKMFKRVIEICEARLSHRYCGLSPHRLVSTFDGKPSSLYYNVVDDDHDPSHSNCSTEFYR

SEQ ID NO: 25567 - protein, 349 aa, Arabidopsis thaliana
  peptide (1)..(349): Ceres Seq. ID no. 12322016
  misc_feature (169)..(302): Pfam Name: NUDIX domain Pfam Description: NUDIX domain
  misc_feature (1)..(349): Homolog of NCBI NO: 21928133 NR Description: AT5g47240/MQL5_10 [Arabidopsis thaliana]
  misc_feature (66)..(336): Homolog of NCBI NO: 15228145 NR Description: putative mutT domain protein; protein id:
  misc_feature (75)..(338): Homolog of NCBI NO: 7486814 NR Description: hypothetical protein M7J2.190 - Arabidopsis
  misc_feature (75)..(338): Homolog of NCBI NO: 38564312 NR Description: At4g25434 [Arabidopsis thaliana]
  misc_feature (74)..(333): Homolog of NCBI NO: 9758793 NR Description: MutT domain protein-like [Arabidopsis thaliana]
  misc_feature (74)..(333): Homolog of NCBI NO: 18422823 NR Description: MutT domain protein-like
  misc_feature (68)..(344): Homolog of NCBI NO: 38346172 NR Description: OSJNBa0079A21.19 [Oryza sativa (japonica
  misc_feature (55)..(349): Homolog of NCBI NO: 8809607 NR Description: mutT domain protein-like [Arabidopsis thaliana]
  misc_feature (1)..(349): Homolog of NCBI NO: 21593371 NR Description: mutT domain protein-like [Arabidopsis thaliana]
  misc_feature (1)..(349): Homolog of NCBI NO: 18422772 NR Description: mutT domain protein-like
MHSFRQPFCGVKISPKFYLSKVDGPKAISSSSNTKSQFVYGGGSIAATSDSGYKMNGVNLKSRTLMSSAVKERSLLDAYDDEYGGVIVDHGKLPSNPYAFASMLRASLSDWRRKGKKGVWLKLPVEQSELVPIAIKEGFEYHHAEKGYVMLTYWIPEEEPSMLPANASHQVGVGGFVLNQHKEVLVVQEKYSAPSITGLWKLPTGFINESEEIFSGAVREVKEETGVDTEFSEVIAFRHAHNVAFEKSDLFFICMLRPLSDKIIIDALEIKAAKWMPLAEFVEQPMIRGDKMFKRVIEICEARLSHRYCGLSPHRLVSTFDGKPSSLYYNVVDDDHDPSHSNCSTEFYR

SEQ ID NO: 25568 - protein, 295 aa, Arabidopsis thaliana
  peptide (1)..(295): Ceres Seq. ID no. 12322017
  misc_feature (115)..(248): Pfam Name: NUDIX domain Pfam Description: NUDIX domain
  misc_feature (12)..(282): Homolog of NCBI NO: 15228145 NR Description: putative mutT domain protein; protein id:
  misc_feature (21)..(284): Homolog of NCBI NO: 7486814 NR Description: hypothetical protein M7J2.190 - Arabidopsis
  misc_feature (21)..(284): Homolog of NCBI NO: 38564312 NR Description: At4g25434 [Arabidopsis thaliana]
  misc_feature (20)..(279): Homolog of NCBI NO: 9758793 NR Description: MutT domain protein-like [Arabidopsis thaliana]
  misc_feature (20)..(279): Homolog of NCBI NO: 18422823 NR Description: MutT domain protein-like
  misc_feature (14)..(290): Homolog of NCBI NO: 38346172 NR Description: OSJNBa0079A21.19 [Oryza sativa (japonica
  misc_feature (1)..(295): Homolog of NCBI NO: 8809607 NR Description: mutT domain protein-like [Arabidopsis thaliana]
  misc_feature (1)..(295): Homolog of NCBI NO: 21593371 NR Description: mutT domain protein-like [Arabidopsis thaliana]
  misc_feature (1)..(295): Homolog of NCBI NO: 18422772 NR Description: mutT domain protein-like
  misc_feature (1)..(295): Homolog of NCBI NO: 21928133 NR Description: AT5g47240/MQL5_10 [Arabidopsis thaliana]
MNGVNLKSRTLMSSAVKERSLLDAYDDEYGGVIVDHGKLPSNPYAFASMLRASLSDWRRKGKKGVWLKLPVEQSELVPIAIKEGFEYHHAEKGYVMLTYWIPEEEPSMLPANASHQVGVGGFVLNQHKEVLVVQEKYSAPSITGLWKLPTGFINESEEIFSGAVREVKEETGVDTEFSEVIAFRHAHNVAFEKSDLFFICMLRPLSDKIIIDALEIKAAKWMPLAEFVEQPMIRGDKMFKRVIEICEARLSHRYCGLSPHRLVSTFDGKPSSLYYNVVDDDHDPSHSNCSTEFYR

SEQ ID NO: 25569 - DNA, 1404 bp, Arabidopsis thaliana
  misc_feature (1)..(1404): Ceres Seq. ID no. 12335633
  misc_feature: MA Experiment ID: 20000184 Result: Up-regulated in Transcription
  misc_feature: MA Experiment 20000184 PARAMETER Experiment Name: At_Shoots__P Parameter: Age (day) Value: 7
  misc_feature: MA Experiment 20000184 PARAMETER Experiment Name: At_Shoots__P Parameter: Tissue Value: Shoots vs. Whole Plant
  misc_feature: MA Experiment ID: 20000227 Result: Up-regulated in Transcription
  misc_feature: MA Experiment 20000227 PARAMETER Experiment Name: At_Root-Tips-vs-Tops_P Parameter: Tissue Value: Root Tips vs. Root Tops
  misc_feature: MA Experiment ID: 20000234 Result: Up-regulated in Transcription
  misc_feature: MA Experiment 20000234 PARAMETER Experiment Name: At_Siliques_P Parameter: Age (day) Value: 21
  misc_feature: MA Experiment 20000234 PARAMETER Experiment Name: At_Siliques_P Parameter: Organism Value: A. thaliana
  misc_feature: MA Experiment 20000234 PARAMETER Experiment Name: At_Siliques_P Parameter: Plant Line Value: WS
  misc_feature: MA Experiment 20000234 PARAMETER Experiment Name: At_Siliques_P Parameter: Tissue Value: Less Than 5mm Siliques vs. Whole Plant
  misc_feature: MA Experiment ID: 20001557 Result: Up-regulated in Transcription
  misc_feature: MA Experiment 20001557 PARAMETER Experiment Name: At_Drought_Soil_Dry_P Parameter: Age (day) Value: 27
  misc_feature: MA Experiment 20001557 PARAMETER Experiment Name: At_Drought_Soil_Dry_P Parameter: Organism Value: A. thaliana
  misc_feature: MA Experiment 20001557 PARAMETER Experiment Name: At_Drought_Soil_Dry_P Parameter: Plant Line Value: WS
  misc_feature: MA Experiment 20001557 PARAMETER Experiment Name: At_Drought_Soil_Dry_P Parameter: Post Timepoint (hr) Value: 3
  misc_feature: MA Experiment 20001557 PARAMETER Experiment Name: At_Drought_Soil_Dry_P Parameter: Post-Treatment Value: Re-Water vs. No Drought
  misc_feature: MA Experiment 20001557 PARAMETER Experiment Name: At_Drought_Soil_Dry_P Parameter: Timepoint (day) Value: 13
  misc_feature: MA Experiment 20001557 PARAMETER Experiment Name: At_Drought_Soil_Dry_P Parameter: Treatment Value: Drought vs. No Drought
  misc_feature: MA Experiment ID: 20001558 Result: Up-regulated in Transcription
  misc_feature: MA Experiment 20001558 PARAMETER Experiment Name: At_Drought_Soil_Dry_P Parameter: Age (day) Value: 27
  misc_feature: MA Experiment 20001558 PARAMETER Experiment Name: At_Drought_Soil_Dry_P Parameter: Organism Value: A. thaliana
  misc_feature: MA Experiment 20001558 PARAMETER Experiment Name: At_Drought_Soil_Dry_P Parameter: Plant Line Value: WS
  misc_feature: MA Experiment 20001558 PARAMETER Experiment Name: At_Drought_Soil_Dry_P Parameter: Post Timepoint (hr) Value: 6
  misc_feature: MA Experiment 20001558 PARAMETER Experiment Name: At_Drought_Soil_Dry_P Parameter: Post-Treatment Value: Re-Water vs. No Drought
  misc_feature: MA Experiment 20001558 PARAMETER Experiment Name: At_Drought_Soil_Dry_P Parameter: Timepoint (day) Value: 13
  misc_feature: MA Experiment 20001558 PARAMETER Experiment Name: At_Drought_Soil_Dry_P Parameter: Treatment Value: Drought vs. No Drought
  misc_feature: MA Experiment ID: 20001560 Result: Up-regulated in Transcription
  misc_feature: MA Experiment 20001560 PARAMETER Experiment Name: At_Drought_Soil_Dry_P Parameter: Age (day) Value: 28
  misc_feature: MA Experiment 20001560 PARAMETER Experiment Name: At_Drought_Soil_Dry_P Parameter: Organism Value: A. thaliana
  misc_feature: MA Experiment 20001560 PARAMETER Experiment Name: At_Drought_Soil_Dry_P Parameter: Plant Line Value: WS
  misc_feature: MA Experiment 20001560 PARAMETER Experiment Name: At_Drought_Soil_Dry_P Parameter: Post Timepoint (hr) Value: None
  misc_feature: MA Experiment 20001560 PARAMETER Experiment Name: At_Drought_Soil_Dry_P Parameter: Post-Treatment Value: None
  misc_feature: MA Experiment 20001560 PARAMETER Experiment Name: At_Drought_Soil_Dry_P Parameter: Timepoint (day) Value: 14
  misc_feature: MA Experiment 20001560 PARAMETER Experiment Name: At_Drought_Soil_Dry_P Parameter: Treatment Value: Drought vs. No Drought
  misc_feature: MA Experiment ID: 20001757 Result: Up-regulated in Transcription
  misc_feature: MA Experiment 20001757 PARAMETER Experiment Name: At_50mM_NH4NO3_L-to-H_P Parameter: Timepoint (hr) Value: 6
  misc_feature: MA Experiment 20001757 PARAMETER Experiment Name: At_50mM_NH4NO3_L-to-H_P Parameter: Tissue Value: Leaf
  misc_feature: MA Experiment 20001757 PARAMETER Experiment Name: At_50mM_NH4NO3_L-to-H_P Parameter: Treatment Value: 50mM NH4NO3 vs 100mM Mannitol
aaaccctaatttctcaaagagtctaaagagacggagagtgagagaagagagaaacatttcgagacaaatggccgccgccgctgctcgtcctctcgtcaccatccaaaccttggatggtgacatgtccaccgatcaatcctccaccgtcgtacttcccgacgtcatgacggcgccagttcgaccagacatcgttaacttcgttcacgcccaaatctccaacaacagccgtcagccatacgccgtatcgaagaaggccggtcaccagacctccgccgagtcctggggaaccggacgtgccgtgtctcgtatccctcgtgttcccggtggtggtactcaccgtgctggtcaagctgcgttcggtaacatgtgtcgtggtggtcgtatgttcgctccaaccaagatctggcgccgctggcaccgtcgtgtcaatgtcaacatgaagcgtcacgcaatcgtctcagctatcgctgcaactgctgttcctgcgcttgtgatggctcgtggtcacaagatcgagaatgttcctgagatgcctcttgttgtgagtgactccgccgaagctgtggagaagacctcagctgcgatcaaggttttgaaacagatcggtgcttatgatgatgctgagaaggcaaagaacagcattggaatccgtcctggtaaaggtaaaatgaggaaccgtcgttacatttctaggaaaggtcctctggtggtttatggaactgaaggatctaagatagttaaggcgtttagaaaccttcctggtgttgagctttgtcatgtggagaggcttaatttgttgaagcttgctcctggtggtcaccttggtcggtttgtgatctggaccaagtctgcctttgagaagcttgagtctatctatggttcgtttgagaagccatcagagaagaagaaggggtatgtgcttcctcgtgcaaagatggtgaatgctgatcttgccaggattatcaattcagatgagattcagagtgttgtgaatccgatcaagaaggatgcgaagagggctgttcttaagaagaatccattgaagaatctcaatgtgatgttgaagttgaatccttatgctaagaccgcgaagaggatgtcactgttagctgaagcacagagagttaaggctaagaaggagaagctcgccaagaagaggaaaaccgttaccaaggaggaggcgttggcaatcaaagcagcaggcaagtcgtggtacaagactatgatctccgacagtgattacaccgagtttgataacttcaccaaatggctcggtgctagccagtaataatctcgtctgctttggaacactttccatattttagtcaaaagattttggtttttttaatctgttttgtctttgggtgtctggatatcaagttgaattatgaacaagtttcactc

SEQ ID NO: 25570 - protein, 428 aa, Arabidopsis thaliana; identical to SEQ ID NO: 21901
  peptide (1)..(428): Ceres Seq. ID no. 12335634
  misc_feature (47)..(291): Pfam Name: Ribosomal protein L4/L1 family Pfam Description: Ribosomal protein L4/L1 family
  misc_feature (27)..(393): Homolog of NCBI NO: 1350686 NR Description: 60S RIBOSOMAL PROTEIN L4 (L1)
  misc_feature (71)..(428): Homolog of NCBI NO: 6441068 NR Description: 60S ribosomal protein L4 [Chlamydomonas sp. HS-5]
  misc_feature (122)..(428): Homolog of NCBI NO: 13605831 NR Description: AT5g02870/F9G14_180 [Arabidopsis thaliana]
  misc_feature (25)..(428): Homolog of NCBI NO: 34897236 NR Description: putative 60S ribosomal protein L1
  misc_feature (25)..(428): Homolog of NCBI NO: 34393487 NR Description: putative 60S ribosomal protein L4/L1
  misc_feature (24)..(428): Homolog of NCBI NO: 17367847 NR Description: 60S ribosomal protein L4 (L1)
  misc_feature (23)..(428): Homolog of NCBI NO: 26450328 NR Description: putative 60S ribosomal protein [Arabidopsis
  misc_feature (23)..(428): Homolog of NCBI NO: 15242558 NR Description: 60S ribosomal protein - like
  misc_feature (23)..(428): Homolog of NCBI NO: 21593543 NR Description: 60S ribosomal protein L4-B (L1) [Arabidopsis
  misc_feature (23)..(428): Homolog of NCBI NO: 15232723 NR Description: putative 60S ribosomal protein L1

SEQ ID NO: 25571 - protein, 406 aa, Arabidopsis thaliana; identical to SEQ ID NO: 21902
  peptide (1)..(406): Ceres Seq. ID no. 12335635
  misc_feature (25)..(269): Pfam Name: Ribosomal protein L4/L1 family Pfam Description: Ribosomal protein L4/L1 family
  misc_feature (5)..(371): Homolog of NCBI NO: 1350686 NR Description: 60S RIBOSOMAL PROTEIN L4 (L1)
  misc_feature (49)..(406): Homolog of NCBI NO: 6441068 NR Description: 60S ribosomal protein L4 [Chlamydomonas sp. HS-5]
  misc_feature (100)..(406): Homolog of NCBI NO: 13605831 NR Description: AT5g02870/F9G14_180 [Arabidopsis thaliana]
  misc_feature (3)..(406): Homolog of NCBI NO: 34897236 NR Description: putative 60S ribosomal protein L1
  misc_feature (3)..(406): Homolog of NCBI NO: 34393487 NR Description: putative 60S ribosomal protein L4/L1
  misc_feature (2)..(406): Homolog of NCBI NO: 17367847 NR Description: 60S ribosomal protein L4 (L1)
  misc_feature (1)..(406): Homolog of NCBI NO: 26450328 NR Description: putative 60S ribosomal protein [Arabidopsis
  misc_feature (1)..(406): Homolog of NCBI NO: 15242558 NR Description: 60S ribosomal protein - like
  misc_feature (1)..(406): Homolog of NCBI NO: 21593543 NR Description: 60S ribosomal protein L4-B (L1) [Arabidopsis
  misc_feature (1)..(406): Homolog of NCBI NO: 15232723 NR Description: putative 60S ribosomal protein L1

SEQ ID NO: 25572 - protein, 388 aa, Arabidopsis thaliana; identical to SEQ ID NO: 21903
  peptide (1)..(388): Ceres Seq. ID no. 12335636
  misc_feature (7)..(251): Pfam Name: Ribosomal protein L4/L1 family Pfam Description: Ribosomal protein L4/L1 family
  misc_feature (1)..(353): Homolog of NCBI NO: 1350686 NR Description: 60S RIBOSOMAL PROTEIN L4 (L1)
  misc_feature (31)..(388): Homolog of NCBI NO: 6441068 NR Description: 60S ribosomal protein L4 [Chlamydomonas sp. HS-5]
  misc_feature (82)..(388): Homolog of NCBI NO: 13605831 NR Description: AT5g02870/F9G14_180 [Arabidopsis thaliana]
  misc_feature (1)..(388): Homolog of NCBI NO: 34897236 NR Description: putative 60S ribosomal protein L1
  misc_feature (1)..(388): Homolog of NCBI NO: 34393487 NR Description: putative 60S ribosomal protein L4/L1
  misc_feature (1)..(388): Homolog of NCBI NO: 17367847 NR Description: 60S ribosomal protein L4 (L1)
  misc_feature (1)..(388): Homolog of NCBI NO: 26450328 NR Description: putative 60S ribosomal protein [Arabidopsis
  misc_feature (1)..(388): Homolog of NCBI NO: 15242558 NR Description: 60S ribosomal protein - like
  misc_feature (1)..(388): Homolog of NCBI NO: 21593543 NR Description: 60S ribosomal protein L4-B (L1) [Arabidopsis
  misc_feature (1)..(388): Homolog of NCBI NO: 15232723 NR Description: putative 60S ribosomal protein L1

SEQ ID NO: 25573 - DNA, 1729 bp, Arabidopsis thaliana
  misc_feature (1)..(1729): Ceres Seq. ID no. 13488450
  misc_feature: MA Experiment ID: 108434 Result: Up-regulated in Transcription
  misc_feature: MA Experiment 108434 PARAMETER Experiment Name: At_Root_Tips_cDNA_P Parameter: Tissue Value: Root Tips
  misc_feature: MA Experiment ID: 108461 Result: Down-regulated in Transcription
  misc_feature: MA Experiment 108461 PARAMETER Experiment Name: At_Germinating_Seeds_cDNA_P Parameter: Age (day) Value: 1 vs. 0
  misc_feature: MA Experiment 108461 PARAMETER Experiment Name: At_Germinating_Seeds_cDNA_P Parameter: Tissue Value: Germinating Seeds
  misc_feature: MA Experiment ID: 108462 Result: Down-regulated in Transcription
  misc_feature: MA Experiment 108462 PARAMETER Experiment Name: At_Germinating_Seeds_cDNA_P Parameter: Age (day) Value: 2 vs. 0
  misc_feature: MA Experiment 108462 PARAMETER Experiment Name: At_Germinating_Seeds_cDNA_P Parameter: Tissue Value: Germinating Seeds
  misc_feature: MA Experiment ID: 108463 Result: Down-regulated in Transcription
  misc_feature: MA Experiment 108463 PARAMETER Experiment Name: At_Germinating_Seeds_cDNA_P Parameter: Age (day) Value: 3 vs. 0
  misc_feature: MA Experiment 108463 PARAMETER Experiment Name: At_Germinating_Seeds_cDNA_P Parameter: Tissue Value: Germinating Seeds
  misc_feature: MA Experiment ID: 108464 Result: Down-regulated in Transcription
  misc_feature: MA Experiment 108464 PARAMETER Experiment Name: At_Germinating_Seeds_cDNA_P Parameter: Age (day) Value: 4 vs. 0
  misc_feature: MA Experiment 108464 PARAMETER Experiment Name: At_Germinating_Seeds_cDNA_P Parameter: Tissue Value: Germinating Seeds
  misc_feature: MA Experiment ID: 108572 Result: Down-regulated in Transcription
  misc_feature: MA Experiment 108572 PARAMETER Experiment Name: At_Drought_cDNA_P Parameter: Timepoint (hr) Value: 1
  misc_feature: MA Experiment 108572 PARAMETER Experiment Name: At_Drought_cDNA_P Parameter: Tissue Value: Aerial
  misc_feature: MA Experiment 108572 PARAMETER Experiment Name: At_Drought_cDNA_P Parameter: Treatment Value: Drought vs. No Drought
  misc_feature: MA Experiment ID: 108595 Result: Down-regulated in Transcription
  misc_feature: MA Experiment 108595 PARAMETER Experiment Name: At_Ler-pi_Ovule_cDNA_P Parameter: Plant Line Value: null
  misc_feature: MA Experiment ID: 20000180 Result: Down-regulated in Transcription
  misc_feature: MA Experiment 20000180 PARAMETER Experiment Name: At_Germinating_Seeds_P Parameter: Age (hr) Value: 24 vs. 0
  misc_feature: MA Experiment 20000180 PARAMETER Experiment Name: At_Germinating_Seeds_P Parameter: Tissue Value: Germinating Seeds
  misc_feature: MA Experiment ID: 20000184 Result: Down-regulated in Transcription
  misc_feature: MA Experiment 20000184 PARAMETER Experiment Name: At_Shoots__P Parameter: Age (day) Value: 7
  misc_feature: MA Experiment 20000184 PARAMETER Experiment Name: At_Shoots__P Parameter: Tissue Value: Shoots vs. Whole Plant
  misc_feature: MA Experiment ID: 20000224 Result: Up-regulated in Transcription
  misc_feature: MA Experiment ID: 20001557 Result: Up-regulated in Transcription
  misc_feature: MA Experiment 20001557 PARAMETER Experiment Name: At_Drought_Soil_Dry_P Parameter: Age (day) Value: 27
  misc_feature: MA Experiment 20001557 PARAMETER Experiment Name: At_Drought_Soil_Dry_P Parameter: Organism Value: A. thaliana
  misc_feature: MA Experiment 20001557 PARAMETER Experiment Name: At_Drought_Soil_Dry_P Parameter: Plant Line Value: WS
  misc_feature: MA Experiment 20001557 PARAMETER Experiment Name: At_Drought_Soil_Dry_P Parameter: Post Timepoint (hr) Value: 3
  misc_feature: MA Experiment 20001557 PARAMETER Experiment Name: At_Drought_Soil_Dry_P Parameter: Post-Treatment Value: Re-Water vs. No Drought
  misc_feature: MA Experiment 20001557 PARAMETER Experiment Name: At_Drought_Soil_Dry_P Parameter: Timepoint (day) Value: 13
  misc_feature: MA Experiment 20001557 PARAMETER Experiment Name: At_Drought_Soil_Dry_P Parameter: Treatment Value: Drought vs. No Drought
  misc_feature: MA Experiment ID: 20001558 Result: Up-regulated in Transcription
  misc_feature: MA Experiment 20001558 PARAMETER Experiment Name: At_Drought_Soil_Dry_P Parameter: Age (day) Value: 27
  misc_feature: MA Experiment 20001558 PARAMETER Experiment Name: At_Drought_Soil_Dry_P Parameter: Organism Value: A. thaliana
  misc_feature: MA Experiment 20001558 PARAMETER Experiment Name: At_Drought_Soil_Dry_P Parameter: Plant Line Value: WS
  misc_feature: MA Experiment 20001558 PARAMETER Experiment Name: At_Drought_Soil_Dry_P Parameter: Post Timepoint (hr) Value: 6
  misc_feature: MA Experiment 20001558 PARAMETER Experiment Name: At_Drought_Soil_Dry_P Parameter: Post-Treatment Value: Re-Water vs. No Drought
  misc_feature: MA Experiment 20001558 PARAMETER Experiment Name: At_Drought_Soil_Dry_P Parameter: Timepoint (day) Value: 13
  misc_feature: MA Experiment 20001558 PARAMETER Experiment Name: At_Drought_Soil_Dry_P Parameter: Treatment Value: Drought vs. No Drought
  misc_feature: MA Experiment ID: 20001560 Result: Up-regulated in Transcription
  misc_feature: MA Experiment 20001560 PARAMETER Experiment Name: At_Drought_Soil_Dry_P Parameter: Age (day) Value: 28
  misc_feature: MA Experiment 20001560 PARAMETER Experiment Name: At_Drought_Soil_Dry_P Parameter: Organism Value: A. thaliana
  misc_feature: MA Experiment 20001560 PARAMETER Experiment Name: At_Drought_Soil_Dry_P Parameter: Plant Line Value: WS
  misc_feature: MA Experiment 20001560 PARAMETER Experiment Name: At_Drought_Soil_Dry_P Parameter: Post Timepoint (hr) Value: None
  misc_feature: MA Experiment 20001560 PARAMETER Experiment Name: At_Drought_Soil_Dry_P Parameter: Post-Treatment Value: None
  misc_feature: MA Experiment 20001560 PARAMETER Experiment Name: At_Drought_Soil_Dry_P Parameter: Timepoint (day) Value: 14
  misc_feature: MA Experiment 20001560 PARAMETER Experiment Name: At_Drought_Soil_Dry_P Parameter: Treatment Value: Drought vs. No Drought
agaactcgctctcttttctcagccaacaaacactagtctcttctgatttgtaccctaacgtttactcgacttatctaaagccgtgaacctcgccggaattcttaaagtcgcgatttttccttaacgccgtttgattcccttacggcctttgaggtccaggagatagcaaatttgttggtgagtactgaaaaatggaggaagagaacgaagtagtgaagacgtttgcagagcttggtgtgcgtgaggagcttgttaaagcttgcgagagattgggatggaagaacccttccaaaattcaagccgaagcccttccttttgctcttgaagggaaagatgtaattggacttgcgcaaaccggttctggtaaaaccggagcttttgcaattcctatattgcaagcactacttgagtatgtttatgattctgagcctaagaaaggacgtagaccggatcctgctttcttcgcttgtgttttatctccaactcgagaacttgcaatccagattgctgaacagtttgaagctcttggtgctgatataagtcttaggtgtgctgtgcttgttggaggtatagacaggatgcaacaaactattgctcttgggaaacggcctcatgttattgttgcaacacctggtcgtctttgggatcatatgtctgatacaaaaggcttttctctgaaatcattgaaatatctggttcttgatgaagcagatagactgttgaatgaagattttgagaaatctcttaaccagattttggaagagatccctcttgagcggaaaacatttcttttttcagcgactatgactaaaaaggttcgaaaacttcaaagggcatgtttgaggaatcctgtgaagattgaagctgcctccaaatattccactgtcgatactcttaagcagcagtatcggtttgttgccgctaaatacaaggattgctatctggtatacattctgagtgaaatgcctgaatcaacatctatgattttcacccgaacatgtgatggtactcgctttctggctttggtgcttcggagccttggttttagagctattcctatcagtggtcaaatgactcagtcaaagagactgggagctttaaataagttcaaagcaggggaatgtaatatcttggtttgtaccgatgtggctagtagagggctcgatatcccatcagttgatgtggttatcaattatgatattcccacaaattcaaaggattacatccatagagtaggaagaaccgctcgtgctggacgttctggtgttgggatatcacttgtaaaccagtatgagctcgaatggtatatacaaatagaaaaactcattggcaagaaactacctgaatatcccgctgaggaagatgaagtcttgtcattgttggagagagttgcagaagcgaaaaagctatctgcaatgaatatgaaagaatcaggaggtaggaagagaaggggagaagatgatgaagaaagtgagaggttcttgggaggtaacaaggacagaggcaacaaggaaagaggtggtaacaaagacaagaagtcttctaagaagttcaaacgataaaatagctctgtttttactgttttccgataactcaccaaagttttgaattgaagttttccatatgaactagggaaatttaatccattttgtactcgtaatttgtatgttcttttctttttgctttgtttctcaatgacagattatacaatttaagttgaaagatgttt

SEQ ID NO: 25574 - protein, 456 aa, Arabidopsis thaliana
  peptide (1)..(456): Ceres Seq. ID no. 13488451
  misc_feature (22)..(238): Pfam Name: DEAD/DEAH box helicase Pfam Description: DEAD/DEAH box helicase
  misc_feature (1)..(456): Homolog of NCBI NO: 21464402 NR Description: RE27528p [Drosophila melanogaster]
  misc_feature (4)..(452): Homolog of NCBI NO: 27229058 NR Description: RIKEN cDNA 4930588A18 [Mus musculus]
  misc_feature (4)..(452): Homolog of NCBI NO: 16549139 NR Description: unnamed protein product [Homo sapiens]
  misc_feature (4)..(452): Homolog of NCBI NO: 20149629 NR Description: hqp0256 protein [Homo sapiens]
  misc_feature (4)..(452): Homolog of NCBI NO: 11121196 NR Description: DEAD box protein [Homo sapiens]
  misc_feature (1)..(449): Homolog of NCBI NO: 31126733 NR Description: putative RNA helicase [Oryza sativa (japonica
  misc_feature (81)..(456): Homolog of NCBI NO: 11358794 NR Description: RNA helicase RH10 [imported] - Arabidopsis
  misc_feature (1)..(456): Homolog of NCBI NO: 21593647 NR Description: replication protein A1-like [Arabidopsis thaliana]
  misc_feature (1)..(456): Homolog of NCBI NO: 26450667 NR Description: putative replication protein A1 [Arabidopsis
  misc_feature (1)..(456): Homolog of NCBI NO: 18424420 NR Description: DEAD/DEAH box helicase, putative [Arabidopsis
MEEENEVVKTFAELGVREELVKACERLGWKNPSKIQAEALPFALEGKDVIGLAQTGSGKTGAFAIPILQALLEYVYDSEPKKGRRPDPAFFACVLSPTRELAIQIAEQFEALGADISLRCAVLVGGIDRMQQTIALGKRPHVIVATPGRLWDHMSDTKGFSLKSLKYLVLDEADRLLNEDFEKSLNQILEEIPLERKTFLFSATMTKKVRKLQRACLRNPVKIEAASKYSTVDTLKQQYRFVAAKYKDCYLVYILSEMPESTSMIFTRTCDGTRFLALVLRSLGFRAIPISGQMTQSKRLGALNKFKAGECNILVCTDVASRGLDIPSVDVVINYDIPTNSKDYIHRVGRTARAGRSGVGISLVNQYELEWYIQIEKLIGKKLPEYPAEEDEVLSLLERVAEAKKLSAMNMKESGGRKRRGEDDEESERFLGGNKDRGNKERGGNKDKKSSKKFKR

SEQ ID NO: 25575 - protein, 327 aa, Arabidopsis thaliana
  peptide (1)..(327): Ceres Seq. ID no. 13488452
  misc_feature (1)..(109): Pfam Name: DEAD/DEAH box helicase Pfam Description: DEAD/DEAH box helicase
  misc_feature (1)..(327): Homolog of NCBI NO: 21464402 NR Description: RE27528p [Drosophila melanogaster]
  misc_feature (1)..(323): Homolog of NCBI NO: 27229058 NR Description: RIKEN cDNA 4930588A18 [Mus musculus]
  misc_feature (1)..(323): Homolog of NCBI NO: 16549139 NR Description: unnamed protein product [Homo sapiens]
  misc_feature (1)..(323): Homolog of NCBI NO: 20149629 NR Description: hqp0256 protein [Homo sapiens]
  misc_feature (1)..(323): Homolog of NCBI NO: 11121196 NR Description: DEAD box protein [Homo sapiens]
  misc_feature (1)..(320): Homolog of NCBI NO: 31126733 NR Description: putative RNA helicase [Oryza sativa (japonica
  misc_feature (1)..(327): Homolog of NCBI NO: 11358794 NR Description: RNA helicase RH10 [imported] - Arabidopsis
  misc_feature (1)..(327): Homolog of NCBI NO: 21593647 NR Description: replication protein A1-like [Arabidopsis thaliana]
  misc_feature (1)..(327): Homolog of NCBI NO: 26450667 NR Description: putative replication protein A1 [Arabidopsis
  misc_feature (1)..(327): Homolog of NCBI NO: 18424420 NR Description: DEAD/DEAH box helicase, putative [Arabidopsis
MQQTIALGKRPHVIVATPGRLWDHMSDTKGFSLKSLKYLVLDEADRLLNEDFEKSLNQILEEIPLERKTFLFSATMTKKVRKLQRACLRNPVKIEAASKYSTVDTLKQQYRFVAAKYKDCYLVYILSEMPESTSMIFTRTCDGTRFLALVLRSLGFRAIPISGQMTQSKRLGALNKFKAGECNILVCTDVASRGLDIPSVDVVINYDIPTNSKDYIHRVGRTARAGRSGVGISLVNQYELEWYIQIEKLIGKKLPEYPAEEDEVLSLLERVAEAKKLSAMNMKESGGRKRRGEDDEESERFLGGNKDRGNKERGGNKDKKSSKKFKR

SEQ ID NO: 25576 - protein, 303 aa, Arabidopsis thaliana
  peptide (1)..(303): Ceres Seq. ID no. 13488453
  misc_feature (1)..(85): Pfam Name: DEAD/DEAH box helicase Pfam Description: DEAD/DEAH box helicase
  misc_feature (1)..(303): Homolog of NCBI NO: 21464402 NR Description: RE27528p [Drosophila melanogaster]
  misc_feature (1)..(299): Homolog of NCBI NO: 27229058 NR Description: RIKEN cDNA 4930588A18 [Mus musculus]
  misc_feature (1)..(299): Homolog of NCBI NO: 16549139 NR Description: unnamed protein product [Homo sapiens]
  misc_feature (1)..(299): Homolog of NCBI NO: 20149629 NR Description: hqp0256 protein [Homo sapiens]
  misc_feature (1)..(299): Homolog of NCBI NO: 11121196 NR Description: DEAD box protein [Homo sapiens]
  misc_feature (1)..(296): Homolog of NCBI NO: 31126733 NR Description: putative RNA helicase [Oryza sativa (japonica
  misc_feature (1)..(303): Homolog of NCBI NO: 11358794 NR Description: RNA helicase RH10 [imported] - Arabidopsis
  misc_feature (1)..(303): Homolog of NCBI NO: 21593647 NR Description: replication protein A1-like [Arabidopsis thaliana]
  misc_feature (1)..(303): Homolog of NCBI NO: 26450667 NR Description: putative replication protein A1 [Arabidopsis
  misc_feature (1)..(303): Homolog of NCBI NO: 18424420 NR Description: DEAD/DEAH box helicase, putative [Arabidopsis
MSDTKGFSLKSLKYLVLDEADRLLNEDFEKSLNQILEEIPLERKTFLFSATMTKKVRKLQRACLRNPVKIEAASKYSTVDTLKQQYRFVAAKYKDCYLVYILSEMPESTSMIFTRTCDGTRFLALVLRSLGFRAIPISGQMTQSKRLGALNKFKAGECNILVCTDVASRGLDIPSVDVVINYDIPTNSKDYIHRVGRTARAGRSGVGISLVNQYELEWYIQIEKLIGKKLPEYPAEEDEVLSLLERVAEAKKLSAMNMKESGGRKRRGEDDEESERFLGGNKDRGNKERGGNKDKKSSKKFKR

SEQ ID NO: 25577 - DNA, 820 bp, Arabidopsis thaliana
  misc_feature (1)..(820): Ceres Seq. ID no. 12482846
  misc_feature: MA Experiment ID: 108434 Result: Down-regulated in Transcription
  misc_feature: MA Experiment 108434 PARAMETER Experiment Name: At_Root_Tips_cDNA_P Parameter: Tissue Value: Root Tips
  misc_feature: MA Experiment ID: 108461 Result: Up-regulated in Transcription
  misc_feature: MA Experiment 108461 PARAMETER Experiment Name: At_Germinating_Seeds_cDNA_P Parameter: Age (day) Value: 1 vs. 0
  misc_feature: MA Experiment 108461 PARAMETER Experiment Name: At_Germinating_Seeds_cDNA_P Parameter: Tissue Value: Germinating Seeds
  misc_feature: MA Experiment ID: 108462 Result: Up-regulated in Transcription
  misc_feature: MA Experiment 108462 PARAMETER Experiment Name: At_Germinating_Seeds_cDNA_P Parameter: Age (day) Value: 2 vs. 0
  misc_feature: MA Experiment 108462 PARAMETER Experiment Name: At_Germinating_Seeds_cDNA_P Parameter: Tissue Value: Germinating Seeds
  misc_feature: MA Experiment ID: 108463 Result: Up-regulated in Transcription
  misc_feature: MA Experiment 108463 PARAMETER Experiment Name: At_Germinating_Seeds_cDNA_P Parameter: Age (day) Value: 3 vs. 0
  misc_feature: MA Experiment 108463 PARAMETER Experiment Name: At_Germinating_Seeds_cDNA_P Parameter: Tissue Value: Germinating Seeds
  misc_feature: MA Experiment ID: 108464 Result: Up-regulated in Transcription
  misc_feature: MA Experiment 108464 PARAMETER Experiment Name: At_Germinating_Seeds_cDNA_P Parameter: Age (day) Value: 4 vs. 0
  misc_feature: MA Experiment 108464 PARAMETER Experiment Name: At_Germinating_Seeds_cDNA_P Parameter: Tissue Value: Germinating Seeds
  misc_feature: MA Experiment ID: 20000171 Result: Up-regulated in Transcription
  misc_feature: MA Experiment 20000171 PARAMETER Experiment Name: At_42deg_Heat_P Parameter: Age (day) Value: 14
  misc_feature: MA Experiment 20000171 PARAMETER Experiment Name: At_42deg_Heat_P Parameter: Organism Value: A. thaliana
  misc_feature: MA Experiment 20000171 PARAMETER Experiment Name: At_42deg_Heat_P Parameter: Plant Line Value: WS
  misc_feature: MA Experiment 20000171 PARAMETER Experiment Name: At_42deg_Heat_P Parameter: Temperature (deg C) Value: 42 vs. 22
  misc_feature: MA Experiment 20000171 PARAMETER Experiment Name: At_42deg_Heat_P Parameter: Timepoint (hr) Value: 1
  misc_feature: MA Experiment 20000171 PARAMETER Experiment Name: At_42deg_Heat_P Parameter: Tissue Value: Aerial
  misc_feature: MA Experiment ID: 20000179 Result: Up-regulated in Transcription
  misc_feature: MA Experiment 20000179 PARAMETER Experiment Name: At_Germinating_Seeds_P Parameter: Age (hr) Value: 6 vs. 0
  misc_feature: MA Experiment 20000179 PARAMETER Experiment Name: At_Germinating_Seeds_P Parameter: Tissue Value: Germinating Seeds
  misc_feature: MA Experiment ID: 20000180 Result: Up-regulated in Transcription
  misc_feature: MA Experiment 20000180 PARAMETER Experiment Name: At_Germinating_Seeds_P Parameter: Age (hr) Value: 24 vs. 0
  misc_feature: MA Experiment 20000180 PARAMETER Experiment Name: At_Germinating_Seeds_P Parameter: Tissue Value: Germinating Seeds
  misc_feature: MA Experiment ID: 20000184 Result: Up-regulated in Transcription
  misc_feature: MA Experiment 20000184 PARAMETER Experiment Name: At_Shoots__P Parameter: Age (day) Value: 7
  misc_feature: MA Experiment 20000184 PARAMETER Experiment Name: At_Shoots__P Parameter: Tissue Value: Shoots vs. Whole Plant
  misc_feature: MA Experiment ID: 20000185 Result: Up-regulated in Transcription
  misc_feature: MA Experiment 20000185 PARAMETER Experiment Name: At_Roots__P Parameter: Age (day) Value: 7 vs. 21
  misc_feature: MA Experiment 20000185 PARAMETER Experiment Name: At_Roots__P Parameter: Organism Value: A. thaliana
  misc_feature: MA Experiment 20000185 PARAMETER Experiment Name: At_Roots__P Parameter: Tissue Value: Roots vs. Whole Plant
  misc_feature: MA Experiment ID: 20000224 Result: Up-regulated in Transcription
  misc_feature: MA Experiment ID: 20000227 Result: Up-regulated in Transcription
  misc_feature: MA Experiment 20000227 PARAMETER Experiment Name: At_Root-Tips-vs-Tops_P Parameter: Tissue Value: Root Tips vs. Root Tops
  misc_feature: MA Experiment ID: 20000438 Result: Up-regulated in Transcription
  misc_feature: MA Experiment 20000438 PARAMETER Experiment Name: At_Shoots__P Parameter: Age (day) Value: 14
  misc_feature: MA Experiment 20000438 PARAMETER Experiment Name: At_Shoots__P Parameter: Tissue Value: Shoots vs. Whole Plant
  misc_feature: MA Experiment ID: 20000439 Result: Up-regulated in Transcription
  misc_feature: MA Experiment 20000439 PARAMETER Experiment Name: At_Roots__P Parameter: Age (day) Value: 14 vs. 21
  misc_feature: MA Experiment 20000439 PARAMETER Experiment Name: At_Roots__P Parameter: Organism Value: A. thaliana
  misc_feature: MA Experiment 20000439 PARAMETER Experiment Name: At_Roots__P Parameter: Tissue Value: Roots vs. Whole Plant
  misc_feature: MA Experiment ID: 20000527 Result: Down-regulated in Transcription
  misc_feature: MA Experiment 20000527 PARAMETER Experiment Name: At_10percent_PEG_P Parameter: Age (day) Value: 20
  misc_feature: MA Experiment 20000527 PARAMETER Experiment Name: At_10percent_PEG_P Parameter: Organism Value: A. thaliana
  misc_feature: MA Experiment 20000527 PARAMETER Experiment Name: At_10percent_PEG_P Parameter: Plant Line Value: WS
  misc_feature: MA Experiment 20000527 PARAMETER Experiment Name: At_10percent_PEG_P Parameter: Timepoint (day) Value: 20
  misc_feature: MA Experiment 20000527 PARAMETER Experiment Name: At_10percent_PEG_P Parameter: Tissue Value: Whole Plant
  misc_feature: MA Experiment 20000527 PARAMETER Experiment Name: At_10percent_PEG_P Parameter: Treatment Value: 10percent PEG vs. No Treatment
aattgatggagttttgattattatttgtaggcatctagacccaactacttttggagattatccacaaatcatgaaagaccttcttggtcacagattgcccaaattcacttcttcacaaaaagcaaaattgaaagattcgaccgatttcgtagggcttaactactatacttcaacattttcaaaccataatgaaaagccagatccgtctacaccaagttggaagcaagattctcttgttgcttgggaacctaagaatgtagatcacagcgccattggtagccagcctcttaccgctgcattgcccgtctacgctaaaggttttagaagtcttttaaagtacatcaaagataaatacgcaaacccggaaattatgatcatggaaaatggatatggagataaacttaaggacaaagattcggttgaggttggtactgctgattataacaggaaatactatcttcagaggcatcttctagctatgaacgaagctatttgcattgacaaagtgagagttacgggatactttgtatggtcattattagataactttgaatggcaagatggttataataacagattcggactctattacgtcgatttcaaaaataacctcacacgttatgagaaagaatcagccaagtactacaaagatttcctcggtcaaggtgttcgtccatccgcgctcaagaaggatgagctttaagttatattttgaggatttggttttctgttcaatgcttctttcctatgttttagtttgtgattgatcatgattcatgaagtcttggttaataataataaaagtgttttgtattccttc

SEQ ID NO: 25578 - protein, 233 aa, Arabidopsis thaliana
  peptide (1)..(233): Ceres Seq. ID no. 12482847
  misc_feature (1)..(233): Homolog of NCBI NO: 9502167 NR Description: contains similarity to Pfam family PF00232
  misc_feature (1)..(233): Homolog of NCBI NO: 15241841 NR Description: glycosyl hydrolase family 1; protein id:
  misc_feature (1)..(233): Homolog of NCBI NO: 1732572 NR Description: beta-glucosidase [Brassica nigra]
  misc_feature (1)..(233): Homolog of NCBI NO: 15232626 NR Description: glycosyl hydrolase family 1
  misc_feature (1)..(233): Homolog of NCBI NO: 1732570 NR Description: beta-glucosidase [Arabidopsis thaliana]
  misc_feature (1)..(233): Homolog of NCBI NO: 1363489 NR Description: thioglucosidase (EC 3.2.1.147) 3D precursor -
  misc_feature (11)..(233): Homolog of NCBI NO: 30697327 NR Description: glycosyl hydrolase family 1, beta-glucosidase
  misc_feature (11)..(233): Homolog of NCBI NO: 15219605 NR Description: glycosyl hydrolase family 1, beta-glucosidase
  misc_feature (11)..(233): Homolog of NCBI NO: 2286069 NR Description: beta-glucosidase [Arabidopsis thaliana]
  misc_feature (11)..(233): Homolog of NCBI NO: 15219623 NR Description: glycosyl hydrolase family 1
IDGVLIIICRHLDPTTFGDYPQIMKDLLGHRLPKFTSSQKAKLKDSTDFVGLNYYTSTFSNHNEKPDPSTPSWKQDSLVAWEPKNVDHSAIGSQPLTAALPVYAKGFRSLLKYIKDKYANPEIMIMENGYGDKLKDKDSVEVGTADYNRKYYLQRHLLAMNEAICIDKVRVTGYFVWSLLDNFEWQDGYNNRFGLYYVDFKNNLTRYEKESAKYYKDFLGQGVRPSALKKDEL

SEQ ID NO: 25579 - protein, 210 aa, Arabidopsis thaliana
  peptide (1)..(210): Ceres Seq. ID no. 12482848
  misc_feature (1)..(210): Homolog of NCBI NO: 1732570 NR Description: beta-glucosidase [Arabidopsis thaliana]
  misc_feature (1)..(210): Homolog of NCBI NO: 1363489 NR Description: thioglucosidase (EC 3.2.1.147) 3D precursor -
  misc_feature (1)..(210): Homolog of NCBI NO: 30697327 NR Description: glycosyl hydrolase family 1, beta-glucosidase
  misc_feature (1)..(210): Homolog of NCBI NO: 15219605 NR Description: glycosyl hydrolase family 1, beta-glucosidase
  misc_feature (1)..(210): Homolog of NCBI NO: 2286069 NR Description: beta-glucosidase [Arabidopsis thaliana]
  misc_feature (1)..(210): Homolog of NCBI NO: 15219623 NR Description: glycosyl hydrolase family 1
  misc_feature (1)..(210): Homolog of NCBI NO: 9502167 NR Description: contains similarity to Pfam family PF00232
  misc_feature (1)..(210): Homolog of NCBI NO: 15241841 NR Description: glycosyl hydrolase family 1; protein id:
  misc_feature (1)..(210): Homolog of NCBI NO: 1732572 NR Description: beta-glucosidase [Brassica nigra]
  misc_feature (1)..(210): Homolog of NCBI NO: 15232626 NR Description: glycosyl hydrolase family 1
MKDLLGHRLPKFTSSQKAKLKDSTDFVGLNYYTSTFSNHNEKPDPSTPSWKQDSLVAWEPKNVDHSAIGSQPLTAALPVYAKGFRSLLKYIKDKYANPEIMIMENGYGDKLKDKDSVEVGTADYNRKYYLQRHLLAMNEAICIDKVRVTGYFVWSLLDNFEWQDGYNNRFGLYYVDFKNNLTRYEKESAKYYKDFLGQGVRPSALKKDEL

SEQ ID NO: 25580 - DNA, 964 bp, Arabidopsis thaliana
  misc_feature (1)..(964): Ceres Seq. ID no. 12327196
  misc_feature: MA Experiment ID: 108434 Result: Down-regulated in Transcription
  misc_feature: MA Experiment 108434 PARAMETER Experiment Name: At_Root_Tips_cDNA_P Parameter: Tissue Value: Root Tips
  misc_feature: MA Experiment ID: 108464 Result: Down-regulated in Transcription
  misc_feature: MA Experiment 108464 PARAMETER Experiment Name: At_Germinating_Seeds_cDNA_P Parameter: Age (day) Value: 4 vs. 0
  misc_feature: MA Experiment 108464 PARAMETER Experiment Name: At_Germinating_Seeds_cDNA_P Parameter: Tissue Value: Germinating Seeds
  misc_feature: MA Experiment ID: 108573 Result: Down-regulated in Transcription
  misc_feature: MA Experiment 108573 PARAMETER Experiment Name: At_Drought_cDNA_P Parameter: Timepoint (hr) Value: 6
  misc_feature: MA Experiment 108573 PARAMETER Experiment Name: At_Drought_cDNA_P Parameter: Tissue Value: Aerial
  misc_feature: MA Experiment 108573 PARAMETER Experiment Name: At_Drought_cDNA_P Parameter: Treatment Value: Drought vs. No Drought
  misc_feature: MA Experiment ID: 20000069 Result: Up-regulated in Transcription
  misc_feature: MA Experiment 20000069 PARAMETER Experiment Name: At_100uM_ABA_Mutants_cDNA_P Parameter: Plant Line Value: CS23
  misc_feature: MA Experiment 20000069 PARAMETER Experiment Name: At_100uM_ABA_Mutants_cDNA_P Parameter: Timepoint (hr) Value: 6
  misc_feature: MA Experiment 20000069 PARAMETER Experiment Name: At_100uM_ABA_Mutants_cDNA_P Parameter: Tissue Value: Aerial
  misc_feature: MA Experiment 20000069 PARAMETER Experiment Name: At_100uM_ABA_Mutants_cDNA_P Parameter: Treatment Value: 100uM ABA vs. No Treatment
  misc_feature: MA Experiment ID: 20000070 Result: Up-regulated in Transcription
  misc_feature: MA Experiment 20000070 PARAMETER Experiment Name: At_100uM_ABA_Mutants_cDNA_P Parameter: Plant Line Value: CS24
  misc_feature: MA Experiment 20000070 PARAMETER Experiment Name: At_100uM_ABA_Mutants_cDNA_P Parameter: Timepoint (hr) Value: 6
  misc_feature: MA Experiment 20000070 PARAMETER Experiment Name: At_100uM_ABA_Mutants_cDNA_P Parameter: Tissue Value: Aerial
  misc_feature: MA Experiment 20000070 PARAMETER Experiment Name: At_100uM_ABA_Mutants_cDNA_P Parameter: Treatment Value: 100uM ABA vs. No Treatment
  misc_feature: MA Experiment ID: 20000071 Result: Up-regulated in Transcription
  misc_feature: MA Experiment 20000071 PARAMETER Experiment Name: At_100uM_ABA_Mutants_cDNA_P Parameter: Plant Line Value: CS8104
  misc_feature: MA Experiment 20000071 PARAMETER Experiment Name: At_100uM_ABA_Mutants_cDNA_P Parameter: Timepoint (hr) Value: 6
  misc_feature: MA Experiment 20000071 PARAMETER Experiment Name: At_100uM_ABA_Mutants_cDNA_P Parameter: Tissue Value: Aerial
  misc_feature: MA Experiment 20000071 PARAMETER Experiment Name: At_100uM_ABA_Mutants_cDNA_P Parameter: Treatment Value: 100uM ABA vs. No Treatment
  misc_feature: MA Experiment ID: 20000072 Result: Up-regulated in Transcription
  misc_feature: MA Experiment 20000072 PARAMETER Experiment Name: At_100uM_ABA_Mutants_cDNA_P Parameter: Plant Line Value: CS8105
  misc_feature: MA Experiment 20000072 PARAMETER Experiment Name: At_100uM_ABA_Mutants_cDNA_P Parameter: Timepoint (hr) Value: 6
  misc_feature: MA Experiment 20000072 PARAMETER Experiment Name: At_100uM_ABA_Mutants_cDNA_P Parameter: Tissue Value: Aerial
  misc_feature: MA Experiment 20000072 PARAMETER Experiment Name: At_100uM_ABA_Mutants_cDNA_P Parameter: Treatment Value: 100uM ABA vs. No Treatment
  misc_feature: MA Experiment ID: 20000086 Result: Up-regulated in Transcription
  misc_feature: MA Experiment 20000086 PARAMETER Experiment Name: At_100uM_ABA_Mutants_cDNA_P Parameter: Plant Line Value: CS22
  misc_feature: MA Experiment 20000086 PARAMETER Experiment Name: At_100uM_ABA_Mutants_cDNA_P Parameter: Timepoint (hr) Value: 6
  misc_feature: MA Experiment 20000086 PARAMETER Experiment Name: At_100uM_ABA_Mutants_cDNA_P Parameter: Tissue Value: Aerial
  misc_feature: MA Experiment 20000086 PARAMETER Experiment Name: At_100uM_ABA_Mutants_cDNA_P Parameter: Treatment Value: 100uM ABA vs. No Treatment
  misc_feature: MA Experiment ID: 20000087 Result: Up-regulated in Transcription
  misc_feature: MA Experiment 20000087 PARAMETER Experiment Name: At_100uM_ABA_Mutants_cDNA_P Parameter: Plant Line Value: WS
  misc_feature: MA Experiment 20000087 PARAMETER Experiment Name: At_100uM_ABA_Mutants_cDNA_P Parameter: Timepoint (hr) Value: 6
  misc_feature: MA Experiment 20000087 PARAMETER Experiment Name: At_100uM_ABA_Mutants_cDNA_P Parameter: Tissue Value: Aerial
  misc_feature: MA Experiment 20000087 PARAMETER Experiment Name: At_100uM_ABA_Mutants_cDNA_P Parameter: Treatment Value: 100uM ABA vs. No Treatment
  misc_feature: MA Experiment ID: 20000088 Result: Up-regulated in Transcription
  misc_feature: MA Experiment 20000088 PARAMETER Experiment Name: At_100uM_ABA_Mutants_cDNA_P Parameter: Plant Line Value: Landsberg
  misc_feature: MA Experiment 20000088 PARAMETER Experiment Name: At_100uM_ABA_Mutants_cDNA_P Parameter: Timepoint (hr) Value: 6
  misc_feature: MA Experiment 20000088 PARAMETER Experiment Name: At_100uM_ABA_Mutants_cDNA_P Parameter: Tissue Value: Aerial
  misc_feature: MA Experiment 20000088 PARAMETER Experiment Name: At_100uM_ABA_Mutants_cDNA_P Parameter: Treatment Value: 100uM ABA vs. No Treatment
  misc_feature: MA Experiment ID: 20000117 Result: Up-regulated in Transcription
  misc_feature: MA Experiment 20000117 PARAMETER Experiment Name: At_100uM_ABA_Mutants_cDNA_P Parameter: Plant Line Value: Columbia
  misc_feature: MA Experiment 20000117 PARAMETER Experiment Name: At_100uM_ABA_Mutants_cDNA_P Parameter: Timepoint (hr) Value: 6
  misc_feature: MA Experiment 20000117 PARAMETER Experiment Name: At_100uM_ABA_Mutants_cDNA_P Parameter: Tissue Value: Aerial
  misc_feature: MA Experiment 20000117 PARAMETER Experiment Name: At_100uM_ABA_Mutants_cDNA_P Parameter: Treatment Value: 100uM ABA vs. No Treatment
  misc_feature: MA Experiment ID: 20000185 Result: Down-regulated in Transcription
  misc_feature: MA Experiment 20000185 PARAMETER Experiment Name: At_Roots__P Parameter: Age (day) Value: 7 vs. 21
  misc_feature: MA Experiment 20000185 PARAMETER Experiment Name: At_Roots__P Parameter: Organism Value: A. thaliana
  misc_feature: MA Experiment 20000185 PARAMETER Experiment Name: At_Roots__P Parameter: Tissue Value: Roots vs. Whole Plant
  misc_feature: MA Experiment ID: 20000224 Result: Up-regulated in Transcription
  misc_feature: MA Experiment ID: 20000439 Result: Down-regulated in Transcription
  misc_feature: MA Experiment 20000439 PARAMETER Experiment Name: At_Roots__P Parameter: Age (day) Value: 14 vs. 21
  misc_feature: MA Experiment 20000439 PARAMETER Experiment Name: At_Roots__P Parameter: Organism Value: A. thaliana
  misc_feature: MA Experiment 20000439 PARAMETER Experiment Name: At_Roots__P Parameter: Tissue Value: Roots vs. Whole Plant
accaatcggtccgttcccatactctcctttaatggcttctgagagatatttaagtttagcaaaaaaatcctaagcttctacaatggcgaatcttcccaccgttctcgtcaccggcgctagtggcagaacaggccagattgtgtataagaagctgaaggaggggtcagacaagtttgtagcaaagggtttagttagaagtgctcaaggaaaagagaaaattggaggagaagctgatgttttcattggggatataacagatgctgatagcattaaccctgcgtttcaaggaatcgatgcgcttgtgattctcactagtgctgtgcctaaaatgaaacctggttttgatcccactaaaggtggaagacctgagttcattttcgaagatggacagtatcctgaacaagttgattggattggacagaagaatcaaattgatgcagccaaggttgctggtgttaagcatattgtcgtggtcgggtcaatgggtggtaccaatccggatcatcctttgaacaaactgggaaatgggaatatactggtttggaagagaaaggctgaacagtaccttgctgattctggaactccttacacaattatcagagctggaggacttctagataaggaaggcggtgtacgagagctgctagttggtaaagacgatgagctacttcagacagacacgaaaaccgtccccagggctgatgttgcagaagtctgcattcaggcattgctgttcgaggaggccaagaacaaagctttcgatctcggctcaaagccagagggaaccagtaccccaaccaaagacttcaaggctctcttctctcaagtcacctctcgtttttaaatcattatctttgttgccaataagaacatttgggatcaaaccttctaaaataaattctgtagtgtctatttgaaaggatacgttctttcaattcaatgagaatattggggttgaatgttc

SEQ ID NO: 25581 - protein, 253 aa, Arabidopsis thaliana
  peptide (1)..(253): Ceres Seq. ID no. 12327197
  misc_feature (7)..(81): Pfam Name: Isoflavone reductase Pfam Description: Isoflavone reductase
  misc_feature (7)..(81): Pfam Name: Isoflavone reductase Pfam Description: Isoflavone reductase
  misc_feature (1)..(252): Homolog of NCBI NO: 30689062 NR Description: expressed protein [Arabidopsis thaliana]
  misc_feature (92)..(248): Homolog of NCBI NO: 17230243 NR Description: hypothetical protein [Nostoc sp. PCC 7120]
  misc_feature (92)..(249): Homolog of NCBI NO: 23130188 NR Description: hypothetical protein [Nostoc punctiforme]
  misc_feature (92)..(249): Homolog of NCBI NO: 16330694 NR Description: hypothetical protein [Synechocystis sp. PCC 6803]
  misc_feature (1)..(253): Homolog of NCBI NO: 7485430 NR Description: hypothetical protein At2g37660 [imported] -
  misc_feature (1)..(252): Homolog of NCBI NO: 30689062 NR Description: expressed protein [Arabidopsis thaliana]
  misc_feature (92)..(249): Homolog of NCBI NO: 23130188 NR Description: hypothetical protein [Nostoc punctiforme]
  misc_feature (1)..(253): Homolog of NCBI NO: 7485430 NR Description: hypothetical protein At2g37660 [imported] -
  misc_feature (1)..(253): Homolog of NCBI NO: 18413869 NR Description: putative protein
  misc_feature (1)..(248): Homolog of NCBI NO: 11358410 NR Description: hypothetical protein T7H20.290 - Arabidopsis
  misc_feature (1)..(253): Homolog of NCBI NO: 34897418 NR Description: unknown protein [Oryza sativa (japonica
  misc_feature (1)..(253): Homolog of NCBI NO: 14719331 NR Description: putative 3-beta hydroxysteroid
  misc_feature (1)..(253): Homolog of NCBI NO: 18404496 NR Description: expressed protein
  misc_feature (92)..(249): Homolog of NCBI NO: 16330694 NR Description: hypothetical protein [Synechocystis sp. PCC 6803]
  misc_feature (92)..(248): Homolog of NCBI NO: 17230243 NR Description: hypothetical protein [Nostoc sp. PCC 7120]
  misc_feature (1)..(253): Homolog of NCBI NO: 18404496 NR Description: expressed protein
  misc_feature (1)..(253): Homolog of NCBI NO: 14719331 NR Description: putative 3-beta hydroxysteroid
  misc_feature (1)..(253): Homolog of NCBI NO: 34897418 NR Description: unknown protein [Oryza sativa (japonica
  misc_feature (1)..(248): Homolog of NCBI NO: 11358410 NR Description: hypothetical protein T7H20.290 - Arabidopsis
  misc_feature (1)..(253): Homolog of NCBI NO: 18413869 NR Description: putative protein
MANLPTVLVTGASGRTGQIVYKKLKEGSDKFVAKGLVRSAQGKEKIGGEADVFIGDITDADSINPAFQGIDALVILTSAVPKMKPGFDPTKGGRPEFIFEDGQYPEQVDWIGQKNQIDAAKVAGVKHIVVVGSMGGTNPDHPLNKLGNGNILVWKRKAEQYLADSGTPYTIIRAGGLLDKEGGVRELLVGKDDELLQTDTKTVPRADVAEVCIQALLFEEAKNKAFDLGSKPEGTSTPTKDFKALFSQVTSRF

SEQ ID NO: 25582 - protein, 171 aa, Arabidopsis thaliana
  peptide (1)..(171): Ceres Seq. ID no. 12327198
  misc_feature (24)..(149): Pfam Name: Isoflavone reductase Pfam Description: Isoflavone reductase
  misc_feature (24)..(149): Pfam Name: Isoflavone reductase Pfam Description: Isoflavone reductase
  misc_feature (1)..(170): Homolog of NCBI NO: 30689062 NR Description: expressed protein [Arabidopsis thaliana]
  misc_feature (10)..(166): Homolog of NCBI NO: 17230243 NR Description: hypothetical protein [Nostoc sp. PCC 7120]
  misc_feature (10)..(167): Homolog of NCBI NO: 23130188 NR Description: hypothetical protein [Nostoc punctiforme]
  misc_feature (10)..(167): Homolog of NCBI NO: 16330694 NR Description: hypothetical protein [Synechocystis sp. PCC 6803]
  misc_feature (1)..(171): Homolog of NCBI NO: 7485430 NR Description: hypothetical protein At2g37660 [imported] -
  misc_feature (1)..(170): Homolog of NCBI NO: 30689062 NR Description: expressed protein [Arabidopsis thaliana]
  misc_feature (10)..(167): Homolog of NCBI NO: 23130188 NR Description: hypothetical protein [Nostoc punctiforme]
  misc_feature (1)..(171): Homolog of NCBI NO: 7485430 NR Description: hypothetical protein At2g37660 [imported] -
  misc_feature (1)..(171): Homolog of NCBI NO: 18413869 NR Description: putative protein
  misc_feature (1)..(166): Homolog of NCBI NO: 11358410 NR Description: hypothetical protein T7H20.290 - Arabidopsis
  misc_feature (1)..(171): Homolog of NCBI NO: 34897418 NR Description: unknown protein [Oryza sativa (japonica
  misc_feature (1)..(171): Homolog of NCBI NO: 14719331 NR Description: putative 3-beta hydroxysteroid
  misc_feature (1)..(171): Homolog of NCBI NO: 18404496 NR Description: expressed protein
  misc_feature (10)..(167): Homolog of NCBI NO: 16330694 NR Description: hypothetical protein [Synechocystis sp. PCC 6803]
  misc_feature (10)..(166): Homolog of NCBI NO: 17230243 NR Description: hypothetical protein [Nostoc sp. PCC 7120]
  misc_feature (1)..(171): Homolog of NCBI NO: 18404496 NR Description: expressed protein
  misc_feature (1)..(171): Homolog of NCBI NO: 14719331 NR Description: putative 3-beta hydroxysteroid
  misc_feature (1)..(171): Homolog of NCBI NO: 34897418 NR Description: unknown protein [Oryza sativa (japonica
  misc_feature (1)..(166): Homolog of NCBI NO: 11358410 NR Description: hypothetical protein T7H20.290 - Arabidopsis
  misc_feature (1)..(171): Homolog of NCBI NO: 18413869 NR Description: putative protein
MKPGFDPTKGGRPEFIFEDGQYPEQVDWIGQKNQIDAAKVAGVKHIVVVGSMGGTNPDHPLNKLGNGNILVWKRKAEQYLADSGTPYTIIRAGGLLDKEGGVRELLVGKDDELLQTDTKTVPRADVAEVCIQALLFEEAKNKAFDLGSKPEGTSTPTKDFKALFSQVTSRF

SEQ ID NO: 25583 - DNA, 949 bp, Arabidopsis thaliana
  misc_feature (1)..(949): Ceres Seq. ID no. 12423207
  misc_feature: MA Experiment ID: 108595 Result: Down-regulated in Transcription
  misc_feature: MA Experiment 108595 PARAMETER Experiment Name: At_Ler-pi_Ovule_cDNA_P Parameter: Plant Line Value: null
  misc_feature: MA Experiment ID: 108605 Result: Up-regulated in Transcription
  misc_feature: MA Experiment 108605 PARAMETER Experiment Name: At_100uM_ABA_cDNA_P Parameter: Timepoint (hr) Value: 6
  misc_feature: MA Experiment 108605 PARAMETER Experiment Name: At_100uM_ABA_cDNA_P Parameter: Tissue Value: Aerial
  misc_feature: MA Experiment 108605 PARAMETER Experiment Name: At_100uM_ABA_cDNA_P Parameter: Treatment Value: 100uM ABA vs. No Treatment
  misc_feature: MA Experiment ID: 108607 Result: Up-regulated in Transcription
  misc_feature: MA Experiment 108607 PARAMETER Experiment Name: At_100uM_ABA_cDNA_P Parameter: Timepoint (hr) Value: 4
  misc_feature: MA Experiment 108607 PARAMETER Experiment Name: At_100uM_ABA_cDNA_P Parameter: Tissue Value: Aerial
  misc_feature: MA Experiment 108607 PARAMETER Experiment Name: At_100uM_ABA_cDNA_P Parameter: Treatment Value: 100uM ABA vs. No Treatment
  misc_feature: MA Experiment ID: 20000070 Result: Up-regulated in Transcription
  misc_feature: MA Experiment 20000070 PARAMETER Experiment Name: At_100uM_ABA_Mutants_cDNA_P Parameter: Plant Line Value: CS24
  misc_feature: MA Experiment 20000070 PARAMETER Experiment Name: At_100uM_ABA_Mutants_cDNA_P Parameter: Timepoint (hr) Value: 6
  misc_feature: MA Experiment 20000070 PARAMETER Experiment Name: At_100uM_ABA_Mutants_cDNA_P Parameter: Tissue Value: Aerial
  misc_feature: MA Experiment 20000070 PARAMETER Experiment Name: At_100uM_ABA_Mutants_cDNA_P Parameter: Treatment Value: 100uM ABA vs. No Treatment
  misc_feature: MA Experiment ID: 20000071 Result: Up-regulated in Transcription
  misc_feature: MA Experiment 20000071 PARAMETER Experiment Name: At_100uM_ABA_Mutants_cDNA_P Parameter: Plant Line Value: CS8104
  misc_feature: MA Experiment 20000071 PARAMETER Experiment Name: At_100uM_ABA_Mutants_cDNA_P Parameter: Timepoint (hr) Value: 6
  misc_feature: MA Experiment 20000071 PARAMETER Experiment Name: At_100uM_ABA_Mutants_cDNA_P Parameter: Tissue Value: Aerial
  misc_feature: MA Experiment 20000071 PARAMETER Experiment Name: At_100uM_ABA_Mutants_cDNA_P Parameter: Treatment Value: 100uM ABA vs. No Treatment
  misc_feature: MA Experiment ID: 20000072 Result: Up-regulated in Transcription
  misc_feature: MA Experiment 20000072 PARAMETER Experiment Name: At_100uM_ABA_Mutants_cDNA_P Parameter: Plant Line Value: CS8105
  misc_feature: MA Experiment 20000072 PARAMETER Experiment Name: At_100uM_ABA_Mutants_cDNA_P Parameter: Timepoint (hr) Value: 6
  misc_feature: MA Experiment 20000072 PARAMETER Experiment Name: At_100uM_ABA_Mutants_cDNA_P Parameter: Tissue Value: Aerial
  misc_feature: MA Experiment 20000072 PARAMETER Experiment Name: At_100uM_ABA_Mutants_cDNA_P Parameter: Treatment Value: 100uM ABA vs. No Treatment
  misc_feature: MA Experiment ID: 20000117 Result: Up-regulated in Transcription
  misc_feature: MA Experiment 20000117 PARAMETER Experiment Name: At_100uM_ABA_Mutants_cDNA_P Parameter: Plant Line Value: Columbia
  misc_feature: MA Experiment 20000117 PARAMETER Experiment Name: At_100uM_ABA_Mutants_cDNA_P Parameter: Timepoint (hr) Value: 6
  misc_feature: MA Experiment 20000117 PARAMETER Experiment Name: At_100uM_ABA_Mutants_cDNA_P Parameter: Tissue Value: Aerial
  misc_feature: MA Experiment 20000117 PARAMETER Experiment Name: At_100uM_ABA_Mutants_cDNA_P Parameter: Treatment Value: 100uM ABA vs. No Treatment
  misc_feature: MA Experiment ID: 20000169 Result: Up-regulated in Transcription
  misc_feature: MA Experiment 20000169 PARAMETER Experiment Name: At_100uM_ABA_P Parameter: Age (day) Value: 14
  misc_feature: MA Experiment 20000169 PARAMETER Experiment Name: At_100uM_ABA_P Parameter: Organism Value: A. thaliana
  misc_feature: MA Experiment 20000169 PARAMETER Experiment Name: At_100uM_ABA_P Parameter: Plant Line Value: WS
  misc_feature: MA Experiment 20000169 PARAMETER Experiment Name: At_100uM_ABA_P Parameter: Timepoint (hr) Value: 6
  misc_feature: MA Experiment 20000169 PARAMETER Experiment Name: At_100uM_ABA_P Parameter: Tissue Value: Aerial
  misc_feature: MA Experiment 20000169 PARAMETER Experiment Name: At_100uM_ABA_P Parameter: Treatment Value: 100uM ABA vs. No Treatment
  misc_feature: MA Experiment ID: 20000264 Result: Up-regulated in Transcription
  misc_feature: MA Experiment 20000264 PARAMETER Experiment Name: At_Open_Flower_P Parameter: Age (day) Value: 21
  misc_feature: MA Experiment 20000264 PARAMETER Experiment Name: At_Open_Flower_P Parameter: Plant Line Value: WS
  misc_feature: MA Experiment 20000264 PARAMETER Experiment Name: At_Open_Flower_P Parameter: Tissue Value: Open Flower vs. Whole Plant
  misc_feature: MA Experiment ID: 20000265 Result: Up-regulated in Transcription
  misc_feature: MA Experiment 20000265 PARAMETER Experiment Name: At_Open_Flower_P Parameter: Age (day) Value: 21
  misc_feature: MA Experiment 20000265 PARAMETER Experiment Name: At_Open_Flower_P Parameter: Plant Line Value: WS
  misc_feature: MA Experiment 20000265 PARAMETER Experiment Name: At_Open_Flower_P Parameter: Tissue Value: Closed Flower vs. Whole Plant
  misc_feature: MA Experiment ID: 20000794 Result: Up-regulated in Transcription
  misc_feature: MA Experiment 20000794 PARAMETER Experiment Name: At_Petals_P Parameter: Age (day) Value: 23-25 days
  misc_feature: MA Experiment 20000794 PARAMETER Experiment Name: At_Petals_P Parameter: Plant Line Value: WS
  misc_feature: MA Experiment 20000794 PARAMETER Experiment Name: At_Petals_P Parameter: Tissue Value: Petals vs. Whole plant
ctccacgattctgaccaaaaaaaggagaaggaataagagaaaagtgagtttgttgtttgtatcgatcagaaaatggcgacgtcgatgatacagaggatgttcaagcaagggacgaagatcgtctgcgtcggccgtaactacgccgctcacgccaaagaactaggcaacgccgtccccaaggaaccagttatattcttgaagccaacatcatcatacttagaaaatggaggaacaattgagatcccacatcctttggattcacttcaccatgaagtagaactcgctttagtgattggacagaaagctagagatgtacctgaatcaatagccatggattacattggaggatatgcggttgctcttgatatgactgctagggaactccaagcttctgctaaggcatctggtctcccatggacggttgcgaaaggacaagataccttcactcctatcagctctgttctgccaaaggcgatggtgcgtgatcccgataatctagaactttggctcaaggttgatggtgaaacaagacagaagggtttgaccaaagatatgatattcaaggtcccctacctcattagctacataagttctataatgaccctttacgaaggagatgtcatcttgacaggcacaccagaaggtgttggacctgtaaagataggtcagaagataacggccggaatcaccggtctatctgaagttcaattcgatgtggagaggcgtgtaaagcccttgagctaataagtggttttatttatctttcatacaaaaatgtcaattttataaaagcatctctaaaattttcatcacttactgtgtttcctaaggaagggagaaataaaactcgttactcattttatttgtaatctctataacaatggctctaagaccggtttaaattgtttatatgggagagtatttgtaaagttgtgatatttactgttgc

SEQ ID NO: 25584 - protein, 223 aa, Arabidopsis thaliana
  peptide (1)..(223): Ceres Seq. ID no. 12423208
  misc_feature (30)..(197): Pfam Name: Fumarylacetoacetate (FAA) hydrolase family Pfam Description: Fumarylacetoacetate (FAA) hydrolase family
  misc_feature (1)..(211): Homolog of NCBI NO: 38648928 NR Description: Unknown (protein for MGC:74876) [Homo sapiens]
  misc_feature (1)..(217): Homolog of NCBI NO: 14336767 NR Description: similar to homoprotocatechuate catabolism
  misc_feature (1)..(217): Homolog of NCBI NO: 13654274 NR Description: hypothetical protein DKFZp566J2046 [Homo sapiens]
  misc_feature (6)..(215): Homolog of NCBI NO: 28829830 NR Description: similar to Arabidopsis thaliana (Mouse-ear
  misc_feature (7)..(187): Homolog of NCBI NO: 28372682 NR Description: putative isomerase [Oryza sativa (japonica
  misc_feature (7)..(223): Homolog of NCBI NO: 34897304 NR Description: putative hydroxylase [Oryza sativa]
  misc_feature (1)..(186): Homolog of NCBI NO: 7485073 NR Description: hypothetical protein - Arabidopsis thaliana
  misc_feature (1)..(222): Homolog of NCBI NO: 15228286 NR Description: putative decarboxilase
  misc_feature (1)..(223): Homolog of NCBI NO: 15234757 NR Description: isomerase like protein
  misc_feature (1)..(223): Homolog of NCBI NO: 16209656 NR Description: AT4g15940/dl4011w [Arabidopsis thaliana]
MATSMIQRMFKQGTKIVCVGRNYAAHAKELGNAVPKEPVIFLKPTSSYLENGGTIEIPHPLDSLHHEVELALVIGQKARDVPESIAMDYIGGYAVALDMTARELQASAKASGLPWTVAKGQDTFTPISSVLPKAMVRDPDNLELWLKVDGETRQKGLTKDMIFKVPYLISYISSIMTLYEGDVILTGTPEGVGPVKIGQKITAGITGLSEVQFDVERRVKPLS

SEQ ID NO: 25585 - protein, 219 aa, Arabidopsis thaliana
  peptide (1)..(219): Ceres Seq. ID no. 12423209
  misc_feature (26)..(193): Pfam Name: Fumarylacetoacetate (FAA) hydrolase family Pfam Description: Fumarylacetoacetate (FAA) hydrolase family
  misc_feature (1)..(207): Homolog of NCBI NO: 38648928 NR Description: Unknown (protein for MGC:74876) [Homo sapiens]
  misc_feature (1)..(213): Homolog of NCBI NO: 14336767 NR Description: similar to homoprotocatechuate catabolism
  misc_feature (1)..(213): Homolog of NCBI NO: 13654274 NR Description: hypothetical protein DKFZp566J2046 [Homo sapiens]
  misc_feature (2)..(211): Homolog of NCBI NO: 28829830 NR Description: similar to Arabidopsis thaliana (Mouse-ear
  misc_feature (3)..(183): Homolog of NCBI NO: 28372682 NR Description: putative isomerase [Oryza sativa (japonica
  misc_feature (3)..(219): Homolog of NCBI NO: 34897304 NR Description: putative hydroxylase [Oryza sativa]
  misc_feature (1)..(182): Homolog of NCBI NO: 7485073 NR Description: hypothetical protein - Arabidopsis thaliana
  misc_feature (1)..(218): Homolog of NCBI NO: 15228286 NR Description: putative decarboxilase
  misc_feature (1)..(219): Homolog of NCBI NO: 15234757 NR Description: isomerase like protein
  misc_feature (1)..(219): Homolog of NCBI NO: 16209656 NR Description: AT4g15940/dl4011w [Arabidopsis thaliana]
MIQRMFKQGTKIVCVGRNYAAHAKELGNAVPKEPVIFLKPTSSYLENGGTIEIPHPLDSLHHEVELALVIGQKARDVPESIAMDYIGGYAVALDMTARELQASAKASGLPWTVAKGQDTFTPISSVLPKAMVRDPDNLELWLKVDGETRQKGLTKDMIFKVPYLISYISSIMTLYEGDVILTGTPEGVGPVKIGQKITAGITGLSEVQFDVERRVKPLS

SEQ ID NO: 25586 - protein, 215 aa, Arabidopsis thaliana
  peptide (1)..(215): Ceres Seq. ID no. 12423210
  misc_feature (22)..(189): Pfam Name: Fumarylacetoacetate (FAA) hydrolase family Pfam Description: Fumarylacetoacetate (FAA) hydrolase family
  misc_feature (1)..(203): Homolog of NCBI NO: 38648928 NR Description: Unknown (protein for MGC:74876) [Homo sapiens]
  misc_feature (1)..(209): Homolog of NCBI NO: 14336767 NR Description: similar to homoprotocatechuate catabolism
  misc_feature (1)..(209): Homolog of NCBI NO: 13654274 NR Description: hypothetical protein DKFZp566J2046 [Homo sapiens]
  misc_feature (1)..(207): Homolog of NCBI NO: 28829830 NR Description: similar to Arabidopsis thaliana (Mouse-ear
  misc_feature (1)..(179): Homolog of NCBI NO: 28372682 NR Description: putative isomerase [Oryza sativa (japonica
  misc_feature (1)..(215): Homolog of NCBI NO: 34897304 NR Description: putative hydroxylase [Oryza sativa]
  misc_feature (1)..(178): Homolog of NCBI NO: 7485073 NR Description: hypothetical protein - Arabidopsis thaliana
  misc_feature (1)..(214): Homolog of NCBI NO: 15228286 NR Description: putative decarboxilase
  misc_feature (1)..(215): Homolog of NCBI NO: 15234757 NR Description: isomerase like protein
  misc_feature (1)..(215): Homolog of NCBI NO: 16209656 NR Description: AT4g15940/dl4011w [Arabidopsis thaliana]
MFKQGTKIVCVGRNYAAHAKELGNAVPKEPVIFLKPTSSYLENGGTIEIPHPLDSLHHEVELALVIGQKARDVPESIAMDYIGGYAVALDMTARELQASAKASGLPWTVAKGQDTFTPISSVLPKAMVRDPDNLELWLKVDGETRQKGLTKDMIFKVPYLISYISSIMTLYEGDVILTGTPEGVGPVKIGQKITAGITGLSEVQFDVERRVKPLS

SEQ ID NO: 25587 - DNA, 880 bp, Arabidopsis thaliana
  misc_feature (1)..(880): Ceres Seq. ID no. 12738463
  misc_feature: MA Experiment ID: 108462 Result: Down-regulated in Transcription
  misc_feature: MA Experiment 108462 PARAMETER Experiment Name: At_Germinating_Seeds_cDNA_P Parameter: Age (day) Value: 2 vs. 0
  misc_feature: MA Experiment 108462 PARAMETER Experiment Name: At_Germinating_Seeds_cDNA_P Parameter: Tissue Value: Germinating Seeds
  misc_feature: MA Experiment ID: 108463 Result: Down-regulated in Transcription
  misc_feature: MA Experiment 108463 PARAMETER Experiment Name: At_Germinating_Seeds_cDNA_P Parameter: Age (day) Value: 3 vs. 0
  misc_feature: MA Experiment 108463 PARAMETER Experiment Name: At_Germinating_Seeds_cDNA_P Parameter: Tissue Value: Germinating Seeds
  misc_feature: MA Experiment ID: 108464 Result: Down-regulated in Transcription
  misc_feature: MA Experiment 108464 PARAMETER Experiment Name: At_Germinating_Seeds_cDNA_P Parameter: Age (day) Value: 4 vs. 0
  misc_feature: MA Experiment 108464 PARAMETER Experiment Name: At_Germinating_Seeds_cDNA_P Parameter: Tissue Value: Germinating Seeds
  misc_feature: MA Experiment ID: 108573 Result: Up-regulated in Transcription
  misc_feature: MA Experiment 108573 PARAMETER Experiment Name: At_Drought_cDNA_P Parameter: Timepoint (hr) Value: 6
  misc_feature: MA Experiment 108573 PARAMETER Experiment Name: At_Drought_cDNA_P Parameter: Tissue Value: Aerial
  misc_feature: MA Experiment 108573 PARAMETER Experiment Name: At_Drought_cDNA_P Parameter: Treatment Value: Drought vs. No Drought
aaacgtttcttcgaaagatcaattaacaaaacaatcatcttcttcctcaatttcttcttctacttctcatctcttttctgttcttctttgttaaacccaatctgggtctatcatcgtcttcgaggagcctgcgtgctagggtttctccgccttcttccttcccttattttagatctcaaaaggtagaagcagctcattacaggaaccatgatgtcctttgaaatgaatgaccggaaaaaaatcgggttaggcctgacaggatttggcgtattcttctcgtttttgggaatagtctttgtctttgataagggattacttgccatgggaaatattcttttcatctcgggggttagtctaaccattggcttcaagtctaccatgcagttcttcatgaagcgtcaaaattataagggaaccatctcttttggcgtcggtttcttctttgttatcatcgggtggcctatcttgggaatgatgttggagacctatggctttttcgtactcttcagtggcttctggcctaccttggcagtctttgctcagaagatacccgttctcggttggattattcagcaaccatatattagatcgttctttgacaagtaccggggcaagcgtgtgccggtctagtcttccatcccgagtagagagacgattcactgagctagatgcagctgaacaggcgattaaagtttttggaagaagaagttggtgactcctgtagaaaactaaaaccataggagaaagaaaataggaaggaaaagaacgtacaatttgaagctgtgtgtctatgtacttgagagaaaaactcagtgacttaatgctctttgatggagtttgtaaacgttttggttgtttaactctgacaaatcggttagtc

SEQ ID NO: 25588 - protein, 140 aa, Arabidopsis thaliana
  peptide (1)..(140): Ceres Seq. ID no. 12738464
  misc_feature (30)..(130): Pfam Name: Got1-like family Pfam Description: Got1-like family
  misc_feature (5)..(127): Homolog of NCBI NO: 24642432 NR Description: CG32576-PA [Drosophila melanogaster]
  misc_feature (6)..(132): Homolog of NCBI NO: 7705636 NR Description: CGI-141 protein [Homo sapiens]
  misc_feature (1)..(132): Homolog of NCBI NO: 7634779 NR Description: HDCMA39P [Homo sapiens]
  misc_feature (6)..(132): Homolog of NCBI NO: 13385354 NR Description: RIKEN cDNA 2310061A22 [Mus musculus]
  misc_feature (1)..(132): Homolog of NCBI NO: 26384022 NR Description: unnamed protein product [Mus musculus]
  misc_feature (1)..(100): Homolog of NCBI NO: 6714435 NR Description: unknown protein [Arabidopsis thaliana]
  misc_feature (1)..(128): Homolog of NCBI NO: 33146513 NR Description: NFkB activating protein-like
  misc_feature (1)..(140): Homolog of NCBI NO: 30678779 NR Description: expressed protein [Arabidopsis thaliana]
  misc_feature (1)..(128): Homolog of NCBI NO: 12324443 NR Description: unknown protein; 50647-51606 [Arabidopsis
  misc_feature (1)..(140): Homolog of NCBI NO: 15229139 NR Description: putative protein
MMSFEMNDRKKIGLGLTGFGVFFSFLGIVFVFDKGLLAMGNILFISGVSLTIGFKSTMQFFMKRQNYKGTISFGVGFFFVIIGWPILGMMLETYGFFVLFSGFWPTLAVFAQKIPVLGWIIQQPYIRSFFDKYRGKRVPV

SEQ ID NO: 25589 - protein, 139 aa, Arabidopsis thaliana
  peptide (1)..(139): Ceres Seq. ID no. 12738465
  misc_feature (29)..(129): Pfam Name: Got1-like family Pfam Description: Got1-like family
  misc_feature (4)..(126): Homolog of NCBI NO: 24642432 NR Description: CG32576-PA [Drosophila melanogaster]
  misc_feature (5)..(131): Homolog of NCBI NO: 7705636 NR Description: CGI-141 protein [Homo sapiens]
  misc_feature (1)..(131): Homolog of NCBI NO: 7634779 NR Description: HDCMA39P [Homo sapiens]
  misc_feature (5)..(131): Homolog of NCBI NO: 13385354 NR Description: RIKEN cDNA 2310061A22 [Mus musculus]
  misc_feature (1)..(131): Homolog of NCBI NO: 26384022 NR Description: unnamed protein product [Mus musculus]
  misc_feature (1)..(99): Homolog of NCBI NO: 6714435 NR Description: unknown protein [Arabidopsis thaliana]
  misc_feature (1)..(127): Homolog of NCBI NO: 33146513 NR Description: NFkB activating protein-like
  misc_feature (1)..(139): Homolog of NCBI NO: 30678779 NR Description: expressed protein [Arabidopsis thaliana]
  misc_feature (1)..(127): Homolog of NCBI NO: 12324443 NR Description: unknown protein; 50647-51606 [Arabidopsis
  misc_feature (1)..(139): Homolog of NCBI NO: 15229139 NR Description: putative protein
MSFEMNDRKKIGLGLTGFGVFFSFLGIVFVFDKGLLAMGNILFISGVSLTIGFKSTMQFFMKRQNYKGTISFGVGFFFVIIGWPILGMMLETYGFFVLFSGFWPTLAVFAQKIPVLGWIIQQPYIRSFFDKYRGKRVPV

SEQ ID NO: 25590 - protein, 135 aa, Arabidopsis thaliana
  peptide (1)..(135): Ceres Seq. ID no. 12738466
  misc_feature (25)..(125): Pfam Name: Got1-like family Pfam Description: Got1-like family
  misc_feature (1)..(122): Homolog of NCBI NO: 24642432 NR Description: CG32576-PA [Drosophila melanogaster]
  misc_feature (1)..(127): Homolog of NCBI NO: 7705636 NR Description: CGI-141 protein [Homo sapiens]
  misc_feature (1)..(127): Homolog of NCBI NO: 7634779 NR Description: HDCMA39P [Homo sapiens]
  misc_feature (1)..(127): Homolog of NCBI NO: 13385354 NR Description: RIKEN cDNA 2310061A22 [Mus musculus]
  misc_feature (1)..(127): Homolog of NCBI NO: 26384022 NR Description: unnamed protein product [Mus musculus]
  misc_feature (1)..(95): Homolog of NCBI NO: 6714435 NR Description: unknown protein [Arabidopsis thaliana]
  misc_feature (1)..(123): Homolog of NCBI NO: 33146513 NR Description: NFkB activating protein-like
  misc_feature (1)..(135): Homolog of NCBI NO: 30678779 NR Description: expressed protein [Arabidopsis thaliana]
  misc_feature (1)..(123): Homolog of NCBI NO: 12324443 NR Description: unknown protein; 50647-51606 [Arabidopsis
  misc_feature (1)..(135): Homolog of NCBI NO: 15229139 NR Description: putative protein
MNDRKKIGLGLTGFGVFFSFLGIVFVFDKGLLAMGNILFISGVSLTIGFKSTMQFFMKRQNYKGTISFGVGFFFVIIGWPILGMMLETYGFFVLFSGFWPTLAVFAQKIPVLGWIIQQPYIRSFFDKYRGKRVPV

SEQ ID NO: 25591 - DNA, 1305 bp, Arabidopsis thaliana
  misc_feature (1)..(1305): Ceres Seq. ID no. 13500051
  misc_feature: MA Experiment ID: 20000113 Result: Down-regulated in Transcription
  misc_feature: MA Experiment 20000113 PARAMETER Experiment Name: At_42deg_Heat_cDNA_P Parameter: Temperature (deg C) Value: 42 vs. 22
  misc_feature: MA Experiment 20000113 PARAMETER Experiment Name: At_42deg_Heat_cDNA_P Parameter: Timepoint (hr) Value: 8
  misc_feature: MA Experiment 20000113 PARAMETER Experiment Name: At_42deg_Heat_cDNA_P Parameter: Tissue Value: Aerial
  misc_feature: MA Experiment ID: 20000224 Result: Down-regulated in Transcription
acagggaaaagcagagcactctttatctcttcttctctctttcttctactctgtgatcaaactatcgaagaaaaaacaaaccctagatttatccgcccctcttcttcctctgatgataagaaagtcgaagactttgagaatctaaagctgaaaaattttgttttttttcattgagggaatcgaatcgagttatgtacaaggatcggagtggaggaggaataatgggtggtggtggatcatcgagatcggagatccttggtggagctattgatcggaaacgaatcaatgatgctttagacaaacatcttaagaaatcttcaccttctacatctagggttttcacttctaaggacaaagattctgtcccttctacttcaactgctaaatctcagcttcattctcgttcccccgatgttgaatctgacacggatagtgaaggatcagatgtgagtggttcagaaggtgatgatacctcttggatctcatggttttgtaatttgagagggaatgagtttttctgtgaagtagatgaagattatatacaagatgatttcaatctctgtggtttgagtggtcaagttccttactatgattatgcacttgatctcattttagatgttgaatcatcaaatggtgatatgtttactgaagaacagcatgagatggtggaatcagctgctgagatgttatatggtcttattcatgttcgttatattctcactactaaaggaatggctgctatgatggagaagtataagaattatgatttcgggagatgccccagagttttctgttgcggacagtcttgtcttccggttgggcaatctgatatcccgaggtccagcactgtgaagatatactgcccaaaatgcgaggatatttactacccgcggtctaaataccaaggcaacattgatggagcttactttggaactactttccctcatttgtttctcatggcctatgggaacatgaaaccgcagaagccggctcaaaactacgttcctaagatctttggctttaaggtacacaacaagcaatgatactctctcctctcaacattcctgtggttgaatacaatttcggtggctcaactacccttcttctgatggtcacgggtttgaaatggatgatactaaactgcgtttggagggatgagaagagctgatgaagaaaggtcgacacttaaaaagtttttcgctgtgtaatctcgaaagttctaagtagaatcttcaacatagaaccgttctttgatgggtcttgtgaaattctttacctgtgagtaatcaattaaatcatttaccg

SEQ ID NO: 25592 - protein, 283 aa, Arabidopsis thaliana
  peptide (1)..(283): Ceres Seq. ID no. 15223084
  misc_feature (92)..(270): Pfam Name: Casein kinase II regulatory subunit Pfam Description: Casein kinase II regulatory subunit
  misc_feature (1)..(283): Homolog of NCBI NO: 15224934 NR Description: casein kinase II beta chain, putative
  misc_feature (1)..(280): Homolog of NCBI NO: 15238013 NR Description: casein kinase II beta chain, putative
  misc_feature (1)..(280): Homolog of NCBI NO: 15236597 NR Description: casein kinase II beta chain, putative
  misc_feature (26)..(280): Homolog of NCBI NO: 11527002 NR Description: protein kinase CK2 regulatory subunit CK2B2 [Zea
  misc_feature (15)..(282): Homolog of NCBI NO: 37536920 NR Description: putative casein kinase II beta subunit
  misc_feature (23)..(280): Homolog of NCBI NO: 11527004 NR Description: protein kinase CK2 regulatory subunit CK2B3 [Zea
  misc_feature (1)..(280): Homolog of NCBI NO: 34901776 NR Description: OJ1058_B11.17 [Oryza sativa (japonica
  misc_feature (1)..(280): Homolog of NCBI NO: 21261784 NR Description: protein kinase Ck2 regulatory subunit 2
  misc_feature (1)..(280): Homolog of NCBI NO: 15232283 NR Description: casein kinase II beta chain, putative
  misc_feature (1)..(283): Homolog of NCBI NO: 30689795 NR Description: casein kinase II beta chain, putative
MYKDRSGGGIMGGGGSSRSEILGGAIDRKRINDALDKHLKKSSPSTSRVFTSKDKDSVPSTSTAKSQLHSRSPDVESDTDSEGSDVSGSEGDDTSWISWFCNLRGNEFFCEVDEDYIQDDFNLCGLSGQVPYYDYALDLILDVESSNGDMFTEEQHEMVESAAEMLYGLIHVRYILTTKGMAAMMEKYKNYDFGRCPRVFCCGQSCLPVGQSDIPRSSTVKIYCPKCEDIYYPRSKYQGNIDGAYFGTTFPHLFLMAYGNMKPQKPAQNYVPKIFGFKVHNKQ

SEQ ID NO: 25593 - protein, 273 aa, Arabidopsis thaliana
  peptide (1)..(273): Ceres Seq. ID no. 15223085
  misc_feature (82)..(260): Pfam Name: Casein kinase II regulatory subunit Pfam Description: Casein kinase II regulatory subunit
  misc_feature (1)..(270): Homolog of NCBI NO: 15238013 NR Description: casein kinase II beta chain, putative
  misc_feature (1)..(270): Homolog of NCBI NO: 15236597 NR Description: casein kinase II beta chain, putative
  misc_feature (16)..(270): Homolog of NCBI NO: 11527002 NR Description: protein kinase CK2 regulatory subunit CK2B2 [Zea
  misc_feature (5)..(272): Homolog of NCBI NO: 37536920 NR Description: putative casein kinase II beta subunit
  misc_feature (13)..(270): Homolog of NCBI NO: 11527004 NR Description: protein kinase CK2 regulatory subunit CK2B3 [Zea
  misc_feature (1)..(270): Homolog of NCBI NO: 34901776 NR Description: OJ1058_B11.17 [Oryza sativa (japonica
  misc_feature (1)..(270): Homolog of NCBI NO: 21261784 NR Description: protein kinase Ck2 regulatory subunit 2
  misc_feature (1)..(270): Homolog of NCBI NO: 15232283 NR Description: casein kinase II beta chain, putative
  misc_feature (1)..(273): Homolog of NCBI NO: 30689795 NR Description: casein kinase II beta chain, putative
  misc_feature (1)..(273): Homolog of NCBI NO: 15224934 NR Description: casein kinase II beta chain, putative
MGGGGSSRSEILGGAIDRKRINDALDKHLKKSSPSTSRVFTSKDKDSVPSTSTAKSQLHSRSPDVESDTDSEGSDVSGSEGDDTSWISWFCNLRGNEFFCEVDEDYIQDDFNLCGLSGQVPYYDYALDLILDVESSNGDMFTEEQHEMVESAAEMLYGLIHVRYILTTKGMAAMMEKYKNYDFGRCPRVFCCGQSCLPVGQSDIPRSSTVKIYCPKCEDIYYPRSKYQGNIDGAYFGTTFPHLFLMAYGNMKPQKPAQNYVPKIFGFKVHNKQ

SEQ ID NO: 25594 - DNA, 623 bp, Arabidopsis thaliana
  misc_feature (1)..(623): Ceres Seq. ID no. 12335342
  misc_feature: MA Experiment ID: 108434 Result: Down-regulated in Transcription
  misc_feature: MA Experiment 108434 PARAMETER Experiment Name: At_Root_Tips_cDNA_P Parameter: Tissue Value: Root Tips
  misc_feature: MA Experiment ID: 108462 Result: Up-regulated in Transcription
  misc_feature: MA Experiment 108462 PARAMETER Experiment Name: At_Germinating_Seeds_cDNA_P Parameter: Age (day) Value: 2 vs. 0
  misc_feature: MA Experiment 108462 PARAMETER Experiment Name: At_Germinating_Seeds_cDNA_P Parameter: Tissue Value: Germinating Seeds
  misc_feature: MA Experiment ID: 108464 Result: Up-regulated in Transcription
  misc_feature: MA Experiment 108464 PARAMETER Experiment Name: At_Germinating_Seeds_cDNA_P Parameter: Age (day) Value: 4 vs. 0
  misc_feature: MA Experiment 108464 PARAMETER Experiment Name: At_Germinating_Seeds_cDNA_P Parameter: Tissue Value: Germinating Seeds
  misc_feature: MA Experiment ID: 108561 Result: Down-regulated in Transcription
  misc_feature: MA Experiment 108561 PARAMETER Experiment Name: At_100uM_ABA_cDNA_P Parameter: Timepoint (hr) Value: 6
  misc_feature: MA Experiment 108561 PARAMETER Experiment Name: At_100uM_ABA_cDNA_P Parameter: Tissue Value: Aerial
  misc_feature: MA Experiment 108561 PARAMETER Experiment Name: At_100uM_ABA_cDNA_P Parameter: Treatment Value: 100uM ABA vs. No Treatment
  misc_feature: MA Experiment ID: 108573 Result: Down-regulated in Transcription
  misc_feature: MA Experiment 108573 PARAMETER Experiment Name: At_Drought_cDNA_P Parameter: Timepoint (hr) Value: 6
  misc_feature: MA Experiment 108573 PARAMETER Experiment Name: At_Drought_cDNA_P Parameter: Tissue Value: Aerial
  misc_feature: MA Experiment 108573 PARAMETER Experiment Name: At_Drought_cDNA_P Parameter: Treatment Value: Drought vs. No Drought
  misc_feature: MA Experiment ID: 108574 Result: Down-regulated in Transcription
  misc_feature: MA Experiment 108574 PARAMETER Experiment Name: At_Wounding__cDNA_P Parameter: Timepoint (hr) Value: 1
  misc_feature: MA Experiment 108574 PARAMETER Experiment Name: At_Wounding__cDNA_P Parameter: Tissue Value: Aerial
  misc_feature: MA Experiment 108574 PARAMETER Experiment Name: At_Wounding__cDNA_P Parameter: Treatment Value: Wounding vs. No Wounding
  misc_feature: MA Experiment ID: 108577 Result: Down-regulated in Transcription
  misc_feature: MA Experiment 108577 PARAMETER Experiment Name: At_42deg_Heat_cDNA_P Parameter: Temperature (deg C) Value: 42 vs. 22
  misc_feature: MA Experiment 108577 PARAMETER Experiment Name: At_42deg_Heat_cDNA_P Parameter: Timepoint (hr) Value: 6
  misc_feature: MA Experiment 108577 PARAMETER Experiment Name: At_42deg_Heat_cDNA_P Parameter: Tissue Value: Aerial
  misc_feature: MA Experiment ID: 108605 Result: Down-regulated in Transcription
  misc_feature: MA Experiment 108605 PARAMETER Experiment Name: At_100uM_ABA_cDNA_P Parameter: Timepoint (hr) Value: 6
  misc_feature: MA Experiment 108605 PARAMETER Experiment Name: At_100uM_ABA_cDNA_P Parameter: Tissue Value: Aerial
  misc_feature: MA Experiment 108605 PARAMETER Experiment Name: At_100uM_ABA_cDNA_P Parameter: Treatment Value: 100uM ABA vs. No Treatment
  misc_feature: MA Experiment ID: 108607 Result: Down-regulated in Transcription
  misc_feature: MA Experiment 108607 PARAMETER Experiment Name: At_100uM_ABA_cDNA_P Parameter: Timepoint (hr) Value: 4
  misc_feature: MA Experiment 108607 PARAMETER Experiment Name: At_100uM_ABA_cDNA_P Parameter: Tissue Value: Aerial
  misc_feature: MA Experiment 108607 PARAMETER Experiment Name: At_100uM_ABA_cDNA_P Parameter: Treatment Value: 100uM ABA vs. No Treatment
  misc_feature: MA Experiment ID: 108668 Result: Down-regulated in Transcription
  misc_feature: MA Experiment 108668 PARAMETER Experiment Name: At_2mM_SA_cDNA_P Parameter: Plant Line Value: WS
  misc_feature: MA Experiment 108668 PARAMETER Experiment Name: At_2mM_SA_cDNA_P Parameter: Timepoint (hr) Value: 6
  misc_feature: MA Experiment 108668 PARAMETER Experiment Name: At_2mM_SA_cDNA_P Parameter: Treatment Value: 2mM SA vs. No Treatment
  misc_feature: MA Experiment ID: 20000111 Result: Down-regulated in Transcription
  misc_feature: MA Experiment 20000111 PARAMETER Experiment Name: At_42deg_Heat_cDNA_P Parameter: Temperature (deg C) Value: 42 vs. 22
  misc_feature: MA Experiment 20000111 PARAMETER Experiment Name: At_42deg_Heat_cDNA_P Parameter: Timepoint (hr) Value: 6
  misc_feature: MA Experiment 20000111 PARAMETER Experiment Name: At_42deg_Heat_cDNA_P Parameter: Tissue Value: Aerial
  misc_feature: MA Experiment ID: 20000180 Result: Up-regulated in Transcription
  misc_feature: MA Experiment 20000180 PARAMETER Experiment Name: At_Germinating_Seeds_P Parameter: Age (hr) Value: 24 vs. 0
  misc_feature: MA Experiment 20000180 PARAMETER Experiment Name: At_Germinating_Seeds_P Parameter: Tissue Value: Germinating Seeds
  misc_feature: MA Experiment ID: 20000182 Result: Down-regulated in Transcription
  misc_feature: MA Experiment 20000182 PARAMETER Experiment Name: At_2mM_SA_P Parameter: Age (day) Value: 14
  misc_feature: MA Experiment 20000182 PARAMETER Experiment Name: At_2mM_SA_P Parameter: Organism Value: A. thaliana
  misc_feature: MA Experiment 20000182 PARAMETER Experiment Name: At_2mM_SA_P Parameter: Plant Line Value: WS
  misc_feature: MA Experiment 20000182 PARAMETER Experiment Name: At_2mM_SA_P Parameter: Timepoint (hr) Value: 6
  misc_feature: MA Experiment 20000182 PARAMETER Experiment Name: At_2mM_SA_P Parameter: Tissue Value: Aerial
  misc_feature: MA Experiment 20000182 PARAMETER Experiment Name: At_2mM_SA_P Parameter: Treatment Value: 2mM SA vs. No Treatment
  misc_feature: MA Experiment ID: 20000185 Result: Up-regulated in Transcription
  misc_feature: MA Experiment 20000185 PARAMETER Experiment Name: At_Roots__P Parameter: Age (day) Value: 7 vs. 21
  misc_feature: MA Experiment 20000185 PARAMETER Experiment Name: At_Roots__P Parameter: Organism Value: A. thaliana
  misc_feature: MA Experiment 20000185 PARAMETER Experiment Name: At_Roots__P Parameter: Tissue Value: Roots vs. Whole Plant
  misc_feature: MA Experiment ID: 20000224 Result: Down-regulated in Transcription
  misc_feature: MA Experiment ID: 20000227 Result: Down-regulated in Transcription
  misc_feature: MA Experiment 20000227 PARAMETER Experiment Name: At_Root-Tips-vs-Tops_P Parameter: Tissue Value: Root Tips vs. Root Tops
  misc_feature: MA Experiment ID: 20000441 Result: Up-regulated in Transcription
  misc_feature: MA Experiment 20000441 PARAMETER Experiment Name: At_1uM_BR-BRZ__P Parameter: Tissue Value: Shoot Apices
  misc_feature: MA Experiment 20000441 PARAMETER Experiment Name: At_1uM_BR-BRZ__P Parameter: Treatment Value: 1uM BR vs. No Treatment
  misc_feature: MA Experiment ID: 20000451 Result: Down-regulated in Transcription
  misc_feature: MA Experiment 20000451 PARAMETER Experiment Name: At_CS6879_Shoots-Roots_P Parameter: Age (day) Value: 14
  misc_feature: MA Experiment 20000451 PARAMETER Experiment Name: At_CS6879_Shoots-Roots_P Parameter: Organism Value: A. thaliana
  misc_feature: MA Experiment 20000451 PARAMETER Experiment Name: At_CS6879_Shoots-Roots_P Parameter: Plant Line Value: CS6879 vs. WS
  misc_feature: MA Experiment 20000451 PARAMETER Experiment Name: At_CS6879_Shoots-Roots_P Parameter: Tissue Value: Roots
  misc_feature: MA Experiment ID: 20000453 Result: Down-regulated in Transcription
  misc_feature: MA Experiment 20000453 PARAMETER Experiment Name: At_100uM_ABA_P Parameter: Age (day) Value: 15
  misc_feature: MA Experiment 20000453 PARAMETER Experiment Name: At_100uM_ABA_P Parameter: Organism Value: A. thaliana
  misc_feature: MA Experiment 20000453 PARAMETER Experiment Name: At_100uM_ABA_P Parameter: Plant Line Value: WS
  misc_feature: MA Experiment 20000453 PARAMETER Experiment Name: At_100uM_ABA_P Parameter: Timepoint (hr) Value: 24
  misc_feature: MA Experiment 20000453 PARAMETER Experiment Name: At_100uM_ABA_P Parameter: Tissue Value: Aerial
  misc_feature: MA Experiment 20000453 PARAMETER Experiment Name: At_100uM_ABA_P Parameter: Treatment Value: 100uM ABA vs. No Treatment
  misc_feature: MA Experiment ID: 20000455 Result: Down-regulated in Transcription
  misc_feature: MA Experiment 20000455 PARAMETER Experiment Name: At_100uM_ABA_P Parameter: Age (day) Value: 16
  misc_feature: MA Experiment 20000455 PARAMETER Experiment Name: At_100uM_ABA_P Parameter: Organism Value: A. thaliana
  misc_feature: MA Experiment 20000455 PARAMETER Experiment Name: At_100uM_ABA_P Parameter: Plant Line Value: WS
  misc_feature: MA Experiment 20000455 PARAMETER Experiment Name: At_100uM_ABA_P Parameter: Timepoint (hr) Value: 48
  misc_feature: MA Experiment 20000455 PARAMETER Experiment Name: At_100uM_ABA_P Parameter: Tissue Value: Aerial
  misc_feature: MA Experiment 20000455 PARAMETER Experiment Name: At_100uM_ABA_P Parameter: Treatment Value: 100uM ABA vs. No Treatment
  misc_feature: MA Experiment ID: 20000573 Result: Up-regulated in Transcription
  misc_feature: MA Experiment 20000573 PARAMETER Experiment Name: At_100uM_ABA_Mutants__P Parameter: Organism Value: A. thaliana
  misc_feature: MA Experiment 20000573 PARAMETER Experiment Name: At_100uM_ABA_Mutants__P Parameter: Plant Line Value: CS22 vs. Ler wt
  misc_feature: MA Experiment 20000573 PARAMETER Experiment Name: At_100uM_ABA_Mutants__P Parameter: Timepoint (hr) Value: N/A
  misc_feature: MA Experiment 20000573 PARAMETER Experiment Name: At_100uM_ABA_Mutants__P Parameter: Tissue Value: Whole Plant
  misc_feature: MA Experiment 20000573 PARAMETER Experiment Name: At_100uM_ABA_Mutants__P Parameter: Treatment Value: None
  misc_feature: MA Experiment ID: 20000575 Result: Down-regulated in Transcription
  misc_feature: MA Experiment 20000575 PARAMETER Experiment Name: At_100uM_ABA_Mutants__P Parameter: Organism Value: A. thaliana
  misc_feature: MA Experiment 20000575 PARAMETER Experiment Name: At_100uM_ABA_Mutants__P Parameter: Plant Line Value: CS22
  misc_feature: MA Experiment 20000575 PARAMETER Experiment Name: At_100uM_ABA_Mutants__P Parameter: Timepoint (hr) Value: 6
  misc_feature: MA Experiment 20000575 PARAMETER Experiment Name: At_100uM_ABA_Mutants__P Parameter: Tissue Value: Whole Plant
  misc_feature: MA Experiment 20000575 PARAMETER Experiment Name: At_100uM_ABA_Mutants__P Parameter: Treatment Value: 1uM ABA vs. No Treatment
  misc_feature: MA Experiment ID: 20000576 Result: Down-regulated in Transcription
  misc_feature: MA Experiment 20000576 PARAMETER Experiment Name: At_100uM_ABA_Mutants__P Parameter: Organism Value: A. thaliana
  misc_feature: MA Experiment 20000576 PARAMETER Experiment Name: At_100uM_ABA_Mutants__P Parameter: Plant Line Value: CS23
  misc_feature: MA Experiment 20000576 PARAMETER Experiment Name: At_100uM_ABA_Mutants__P Parameter: Timepoint (hr) Value: 6
  misc_feature: MA Experiment 20000576 PARAMETER Experiment Name: At_100uM_ABA_Mutants__P Parameter: Tissue Value: Whole Plant
  misc_feature: MA Experiment 20000576 PARAMETER Experiment Name: At_100uM_ABA_Mutants__P Parameter: Treatment Value: 1uM ABA vs. No Treatment
  misc_feature: MA Experiment ID: 20000709 Result: Down-regulated in Transcription
  misc_feature: MA Experiment 20000709 PARAMETER Experiment Name: At_15mM_NH4NO3_L-to-H_P Parameter: Age (hr) Value: 14
  misc_feature: MA Experiment 20000709 PARAMETER Experiment Name: At_15mM_NH4NO3_L-to-H_P Parameter: Organism Value: A. thaliana
  misc_feature: MA Experiment 20000709 PARAMETER Experiment Name: At_15mM_NH4NO3_L-to-H_P Parameter: Plant Line Value: WS
  misc_feature: MA Experiment 20000709 PARAMETER Experiment Name: At_15mM_NH4NO3_L-to-H_P Parameter: Timepoint (hr) Value: 4
  misc_feature: MA Experiment 20000709 PARAMETER Experiment Name: At_15mM_NH4NO3_L-to-H_P Parameter: Tissue Value: Aerial
  misc_feature: MA Experiment 20000709 PARAMETER Experiment Name: At_15mM_NH4NO3_L-to-H_P Parameter: Treatment Value: 15mM NH4NO3 vs. 30mM Mannitol
  misc_feature: MA Experiment ID: 20000794 Result: Up-regulated in Transcription
  misc_feature: MA Experiment 20000794 PARAMETER Experiment Name: At_Petals_P Parameter: Age (day) Value: 23-25 days
  misc_feature: MA Experiment 20000794 PARAMETER Experiment Name: At_Petals_P Parameter: Plant Line Value: WS
  misc_feature: MA Experiment 20000794 PARAMETER Experiment Name: At_Petals_P Parameter: Tissue Value: Petals vs. Whole plant
  misc_feature: MA Experiment ID: 20001248 Result: Up-regulated in Transcription
  misc_feature: MA Experiment 20001248 PARAMETER Experiment Name: At_Far-red-induction_P Parameter: Age (day) Value: 7
  misc_feature: MA Experiment 20001248 PARAMETER Experiment Name: At_Far-red-induction_P Parameter: Light Value: Far-red vs. White
  misc_feature: MA Experiment 20001248 PARAMETER Experiment Name: At_Far-red-induction_P Parameter: Organism Value: A. thaliana
  misc_feature: MA Experiment 20001248 PARAMETER Experiment Name: At_Far-red-induction_P Parameter: Plant Line Value: Columbia
  misc_feature: MA Experiment 20001248 PARAMETER Experiment Name: At_Far-red-induction_P Parameter: Timepoint (hr) Value: 4
  misc_feature: MA Experiment 20001248 PARAMETER Experiment Name: At_Far-red-induction_P Parameter: Tissue Value: Whole Plant
  misc_feature: MA Experiment ID: 20001450 Result: Up-regulated in Transcription
  misc_feature: MA Experiment 20001450 PARAMETER Experiment Name: At_Far-red-induction_P Parameter: Age (day) Value: 7
  misc_feature: MA Experiment 20001450 PARAMETER Experiment Name: At_Far-red-induction_P Parameter: Light Value: Far-red vs. White
  misc_feature: MA Experiment 20001450 PARAMETER Experiment Name: At_Far-red-induction_P Parameter: Organism Value: A. thaliana
  misc_feature: MA Experiment 20001450 PARAMETER Experiment Name: At_Far-red-induction_P Parameter: Plant Line Value: Columbia
  misc_feature: MA Experiment 20001450 PARAMETER Experiment Name: At_Far-red-induction_P Parameter: Timepoint (hr) Value: 8
  misc_feature: MA Experiment 20001450 PARAMETER Experiment Name: At_Far-red-induction_P Parameter: Tissue Value: Whole Plant
  misc_feature: MA Experiment ID: 20001555 Result: Down-regulated in Transcription
  misc_feature: MA Experiment 20001555 PARAMETER Experiment Name: At_Drought_Soil_Dry_P Parameter: Age (day) Value: 24
  misc_feature: MA Experiment 20001555 PARAMETER Experiment Name: At_Drought_Soil_Dry_P Parameter: Organism Value: A. thaliana
  misc_feature: MA Experiment 20001555 PARAMETER Experiment Name: At_Drought_Soil_Dry_P Parameter: Plant Line Value: WS
  misc_feature: MA Experiment 20001555 PARAMETER Experiment Name: At_Drought_Soil_Dry_P Parameter: Post Timepoint (hr) Value: None
  misc_feature: MA Experiment 20001555 PARAMETER Experiment Name: At_Drought_Soil_Dry_P Parameter: Post-Treatment Value: None
  misc_feature: MA Experiment 20001555 PARAMETER Experiment Name: At_Drought_Soil_Dry_P Parameter: Timepoint (day) Value: 10
  misc_feature: MA Experiment 20001555 PARAMETER Experiment Name: At_Drought_Soil_Dry_P Parameter: Treatment Value: Drought vs. No Drought
  misc_feature: MA Experiment ID: 20001556 Result: Down-regulated in Transcription
  misc_feature: MA Experiment 20001556 PARAMETER Experiment Name: At_Drought_Soil_Dry_P Parameter: Age (day) Value: 26
  misc_feature: MA Experiment 20001556 PARAMETER Experiment Name: At_Drought_Soil_Dry_P Parameter: Organism Value: A. thaliana
  misc_feature: MA Experiment 20001556 PARAMETER Experiment Name: At_Drought_Soil_Dry_P Parameter: Plant Line Value: WS
  misc_feature: MA Experiment 20001556 PARAMETER Experiment Name: At_Drought_Soil_Dry_P Parameter: Post Timepoint (hr) Value: None
  misc_feature: MA Experiment 20001556 PARAMETER Experiment Name: At_Drought_Soil_Dry_P Parameter: Post-Treatment Value: None
  misc_feature: MA Experiment 20001556 PARAMETER Experiment Name: At_Drought_Soil_Dry_P Parameter: Timepoint (day) Value: 12
  misc_feature: MA Experiment 20001556 PARAMETER Experiment Name: At_Drought_Soil_Dry_P Parameter: Treatment Value: Drought vs. No Drought
  misc_feature: MA Experiment ID: 20001557 Result: Down-regulated in Transcription
  misc_feature: MA Experiment 20001557 PARAMETER Experiment Name: At_Drought_Soil_Dry_P Parameter: Age (day) Value: 27
  misc_feature: MA Experiment 20001557 PARAMETER Experiment Name: At_Drought_Soil_Dry_P Parameter: Organism Value: A. thaliana
  misc_feature: MA Experiment 20001557 PARAMETER Experiment Name: At_Drought_Soil_Dry_P Parameter: Plant Line Value: WS
  misc_feature: MA Experiment 20001557 PARAMETER Experiment Name: At_Drought_Soil_Dry_P Parameter: Post Timepoint (hr) Value: 3
  misc_feature: MA Experiment 20001557 PARAMETER Experiment Name: At_Drought_Soil_Dry_P Parameter: Post-Treatment Value: Re-Water vs. No Drought
  misc_feature: MA Experiment 20001557 PARAMETER Experiment Name: At_Drought_Soil_Dry_P Parameter: Timepoint (day) Value: 13
  misc_feature: MA Experiment 20001557 PARAMETER Experiment Name: At_Drought_Soil_Dry_P Parameter: Treatment Value: Drought vs. No Drought
  misc_feature: MA Experiment ID: 20001904 Result: Down-regulated in Transcription
  misc_feature: MA Experiment 20001904 PARAMETER Experiment Name: At_Drought_Reproduction_P Parameter: Age (day) Value: 37
  misc_feature: MA Experiment 20001904 PARAMETER Experiment Name: At_Drought_Reproduction_P Parameter: Organism Value: A. thaliana
  misc_feature: MA Experiment 20001904 PARAMETER Experiment Name: At_Drought_Reproduction_P Parameter: Plant Line Value: WS
  misc_feature: MA Experiment 20001904 PARAMETER Experiment Name: At_Drought_Reproduction_P Parameter: Timepoint (day) Value: 7
  misc_feature: MA Experiment 20001904 PARAMETER Experiment Name: At_Drought_Reproduction_P Parameter: Tissue Value: Rosettes
  misc_feature: MA Experiment 20001904 PARAMETER Experiment Name: At_Drought_Reproduction_P Parameter: Treatment Value: Drought vs. No Drought
  misc_feature: MA Experiment ID: 20001906 Result: Down-regulated in Transcription
  misc_feature: MA Experiment 20001906 PARAMETER Experiment Name: At_Drought_Reproduction_P Parameter: Age (day) Value: 35
  misc_feature: MA Experiment 20001906 PARAMETER Experiment Name: At_Drought_Reproduction_P Parameter: Organism Value: A. thaliana
  misc_feature: MA Experiment 20001906 PARAMETER Experiment Name: At_Drought_Reproduction_P Parameter: Plant Line Value: WS
  misc_feature: MA Experiment 20001906 PARAMETER Experiment Name: At_Drought_Reproduction_P Parameter: Timepoint (day) Value: 5
  misc_feature: MA Experiment 20001906 PARAMETER Experiment Name: At_Drought_Reproduction_P Parameter: Tissue Value: Siliques
  misc_feature: MA Experiment 20001906 PARAMETER Experiment Name: At_Drought_Reproduction_P Parameter: Treatment Value: Drought vs. No Drought
acacacaatctctctctctcacactcactgtaataaacacaaatgacgagttcttctgaatcaactcgcaagggtctgaccaaaatcgccacgaaccggttgcagaaagagttcatggagtggcaaaccaatcctccttctggtttcaagcacagagtctctgataatctccaacgatggatcattgaagtgcatggagttccaggaactctttacgccaatgaaacttaccaacttcaagttgagttccctgagcattatcctatggaagctccacaggttatctttcagcatccagctccacttcatcctcatatttacagcaacggtcacatttgtttagatgtcttgtatgattcgtggtcaccggcgatgagactaagttccatctgtctcagcattctctcaatgctctccagctcatccgtgaagcaaaagccgaaagacaatgaccattacttgaaaaactgcaaacatggaagatctcccaaagaaactaggtggcgtttccatgacgataaagtataacatctcctataatattgtgattacaaacgaattgtaagatctcaggtcgagttcttgatctgttgctatctttaaaacaagaacagcttctttct

SEQ ID NO: 25595 - protein, 161 aa, Arabidopsis thaliana
  peptide (1)..(161): Ceres Seq. ID no. 12335343
  misc_feature (1)..(102): Homolog of NCBI NO: 25293672 NR Description: protein F27F5.13 [imported] - Arabidopsis
  misc_feature (65)..(161): Homolog of NCBI NO: 25293670 NR Description: ubiquitin-conjugating enzyme 18
  misc_feature (1)..(130): Homolog of NCBI NO: 34897008 NR Description: putative ubiquitin-conjugating enzyme E2 [Oryza
  misc_feature (1)..(161): Homolog of NCBI NO: 2801444 NR Description: ubiquitin-conjugating enzyme 16 [Arabidopsis
  misc_feature (1)..(161): Homolog of NCBI NO: 18401461 NR Description: E2, ubiquitin-conjugating enzyme 15 (UBC15)
  misc_feature (1)..(161): Homolog of NCBI NO: 481811 NR Description: ubiquitin-conjugating enzyme UBC2-1 - Arabidopsis
  misc_feature (3)..(161): Homolog of NCBI NO: 4090259 NR Description: ubiquitin-conjugating enzyme E2 [Pseudotsuga
  misc_feature (1)..(161): Homolog of NCBI NO: 18422281 NR Description: E2, ubiquitin-conjugating enzyme 18 (UBC18)
  misc_feature (1)..(161): Homolog of NCBI NO: 18410856 NR Description: E2, ubiquitin-conjugating enzyme 16 (UBC16)
  misc_feature (1)..(161): Homolog of NCBI NO: 18419831 NR Description: E2, ubiquitin-conjugating enzyme 17 (UBC17)
MTSSSESTRKGLTKIATNRLQKEFMEWQTNPPSGFKHRVSDNLQRWIIEVHGVPGTLYANETYQLQVEFPEHYPMEAPQVIFQHPAPLHPHIYSNGHICLDVLYDSWSPAMRLSSICLSILSMLSSSSVKQKPKDNDHYLKNCKHGRSPKETRWRFHDDKV

SEQ ID NO: 25596 - protein, 137 aa, Arabidopsis thaliana
  peptide (1)..(137): Ceres Seq. ID no. 12335344
  misc_feature (1)..(78): Homolog of NCBI NO: 25293672 NR Description: protein F27F5.13 [imported] - Arabidopsis
  misc_feature (41)..(137): Homolog of NCBI NO: 25293670 NR Description: ubiquitin-conjugating enzyme 18
  misc_feature (1)..(106): Homolog of NCBI NO: 34897008 NR Description: putative ubiquitin-conjugating enzyme E2 [Oryza
  misc_feature (1)..(137): Homolog of NCBI NO: 2801444 NR Description: ubiquitin-conjugating enzyme 16 [Arabidopsis
  misc_feature (1)..(137): Homolog of NCBI NO: 18401461 NR Description: E2, ubiquitin-conjugating enzyme 15 (UBC15)
  misc_feature (1)..(137): Homolog of NCBI NO: 481811 NR Description: ubiquitin-conjugating enzyme UBC2-1 - Arabidopsis
  misc_feature (1)..(137): Homolog of NCBI NO: 4090259 NR Description: ubiquitin-conjugating enzyme E2 [Pseudotsuga
  misc_feature (1)..(137): Homolog of NCBI NO: 18422281 NR Description: E2, ubiquitin-conjugating enzyme 18 (UBC18)
  misc_feature (1)..(137): Homolog of NCBI NO: 18410856 NR Description: E2, ubiquitin-conjugating enzyme 16 (UBC16)
  misc_feature (1)..(137): Homolog of NCBI NO: 18419831 NR Description: E2, ubiquitin-conjugating enzyme 17 (UBC17)
MEWQTNPPSGFKHRVSDNLQRWIIEVHGVPGTLYANETYQLQVEFPEHYPMEAPQVIFQHPAPLHPHIYSNGHICLDVLYDSWSPAMRLSSICLSILSMLSSSSVKQKPKDNDHYLKNCKHGRSPKETRWRFHDDKV

SEQ ID NO: 25597 - protein, 87 aa, Arabidopsis thaliana
  peptide (1)..(87): Ceres Seq. ID no. 12335345
  misc_feature (1)..(28): Homolog of NCBI NO: 25293672 NR Description: protein F27F5.13 [imported] - Arabidopsis
  misc_feature (1)..(87): Homolog of NCBI NO: 25293670 NR Description: ubiquitin-conjugating enzyme 18
  misc_feature (1)..(56): Homolog of NCBI NO: 34897008 NR Description: putative ubiquitin-conjugating enzyme E2 [Oryza
  misc_feature (1)..(87): Homolog of NCBI NO: 2801444 NR Description: ubiquitin-conjugating enzyme 16 [Arabidopsis
  misc_feature (1)..(87): Homolog of NCBI NO: 18401461 NR Description: E2, ubiquitin-conjugating enzyme 15 (UBC15)
  misc_feature (1)..(87): Homolog of NCBI NO: 481811 NR Description: ubiquitin-conjugating enzyme UBC2-1 - Arabidopsis
  misc_feature (1)..(87): Homolog of NCBI NO: 4090259 NR Description: ubiquitin-conjugating enzyme E2 [Pseudotsuga
  misc_feature (1)..(87): Homolog of NCBI NO: 18422281 NR Description: E2, ubiquitin-conjugating enzyme 18 (UBC18)
  misc_feature (1)..(87): Homolog of NCBI NO: 18410856 NR Description: E2, ubiquitin-conjugating enzyme 16 (UBC16)
  misc_feature (1)..(87): Homolog of NCBI NO: 18419831 NR Description: E2, ubiquitin-conjugating enzyme 17 (UBC17)
MEAPQVIFQHPAPLHPHIYSNGHICLDVLYDSWSPAMRLSSICLSILSMLSSSSVKQKPKDNDHYLKNCKHGRSPKETRWRFHDDKV

SEQ ID NO: 25598 - DNA, 1694 bp, Arabidopsis thaliana
  misc_feature (1)..(1694): Ceres Seq. ID no. 12336125
  misc_feature: MA Experiment ID: 108434 Result: Up-regulated in Transcription
  misc_feature: MA Experiment 108434 PARAMETER Experiment Name: At_Root_Tips_cDNA_P Parameter: Tissue Value: Root Tips
  misc_feature: MA Experiment ID: 108462 Result: Down-regulated in Transcription
  misc_feature: MA Experiment 108462 PARAMETER Experiment Name: At_Germinating_Seeds_cDNA_P Parameter: Age (day) Value: 2 vs. 0
  misc_feature: MA Experiment 108462 PARAMETER Experiment Name: At_Germinating_Seeds_cDNA_P Parameter: Tissue Value: Germinating Seeds
  misc_feature: MA Experiment ID: 108463 Result: Down-regulated in Transcription
  misc_feature: MA Experiment 108463 PARAMETER Experiment Name: At_Germinating_Seeds_cDNA_P Parameter: Age (day) Value: 3 vs. 0
  misc_feature: MA Experiment 108463 PARAMETER Experiment Name: At_Germinating_Seeds_cDNA_P Parameter: Tissue Value: Germinating Seeds
  misc_feature: MA Experiment ID: 108576 Result: Up-regulated in Transcription
  misc_feature: MA Experiment 108576 PARAMETER Experiment Name: At_42deg_Heat_cDNA_P Parameter: Temperature (deg C) Value: 42 vs. 22
  misc_feature: MA Experiment 108576 PARAMETER Experiment Name: At_42deg_Heat_cDNA_P Parameter: Timepoint (hr) Value: 1
  misc_feature: MA Experiment 108576 PARAMETER Experiment Name: At_42deg_Heat_cDNA_P Parameter: Tissue Value: Aerial
  misc_feature: MA Experiment ID: 108577 Result: Up-regulated in Transcription
  misc_feature: MA Experiment 108577 PARAMETER Experiment Name: At_42deg_Heat_cDNA_P Parameter: Temperature (deg C) Value: 42 vs. 22
  misc_feature: MA Experiment 108577 PARAMETER Experiment Name: At_42deg_Heat_cDNA_P Parameter: Timepoint (hr) Value: 6
  misc_feature: MA Experiment 108577 PARAMETER Experiment Name: At_42deg_Heat_cDNA_P Parameter: Tissue Value: Aerial
  misc_feature: MA Experiment ID: 20000087 Result: Down-regulated in Transcription
  misc_feature: MA Experiment 20000087 PARAMETER Experiment Name: At_100uM_ABA_Mutants_cDNA_P Parameter: Plant Line Value: WS
  misc_feature: MA Experiment 20000087 PARAMETER Experiment Name: At_100uM_ABA_Mutants_cDNA_P Parameter: Timepoint (hr) Value: 6
  misc_feature: MA Experiment 20000087 PARAMETER Experiment Name: At_100uM_ABA_Mutants_cDNA_P Parameter: Tissue Value: Aerial
  misc_feature: MA Experiment 20000087 PARAMETER Experiment Name: At_100uM_ABA_Mutants_cDNA_P Parameter: Treatment Value: 100uM ABA vs. No Treatment
  misc_feature: MA Experiment ID: 20000093 Result: Up-regulated in Transcription
  misc_feature: MA Experiment 20000093 PARAMETER Experiment Name: At_42deg_Heat_cDNA_P Parameter: Temperature (deg C) Value: 42 vs. 22
  misc_feature: MA Experiment 20000093 PARAMETER Experiment Name: At_42deg_Heat_cDNA_P Parameter: Timepoint (hr) Value: 0.5
  misc_feature: MA Experiment 20000093 PARAMETER Experiment Name: At_42deg_Heat_cDNA_P Parameter: Tissue Value: Aerial
  misc_feature: MA Experiment ID: 20000111 Result: Up-regulated in Transcription
  misc_feature: MA Experiment 20000111 PARAMETER Experiment Name: At_42deg_Heat_cDNA_P Parameter: Temperature (deg C) Value: 42 vs. 22
  misc_feature: MA Experiment 20000111 PARAMETER Experiment Name: At_42deg_Heat_cDNA_P Parameter: Timepoint (hr) Value: 6
  misc_feature: MA Experiment 20000111 PARAMETER Experiment Name: At_42deg_Heat_cDNA_P Parameter: Tissue Value: Aerial
  misc_feature: MA Experiment ID: 20000112 Result: Up-regulated in Transcription
  misc_feature: MA Experiment 20000112 PARAMETER Experiment Name: At_42deg_Heat_cDNA_P Parameter: Temperature (deg C) Value: 42 vs. 22
  misc_feature: MA Experiment 20000112 PARAMETER Experiment Name: At_42deg_Heat_cDNA_P Parameter: Timepoint (hr) Value: 2
  misc_feature: MA Experiment 20000112 PARAMETER Experiment Name: At_42deg_Heat_cDNA_P Parameter: Tissue Value: Aerial
  misc_feature: MA Experiment ID: 20000113 Result: Up-regulated in Transcription
  misc_feature: MA Experiment 20000113 PARAMETER Experiment Name: At_42deg_Heat_cDNA_P Parameter: Temperature (deg C) Value: 42 vs. 22
  misc_feature: MA Experiment 20000113 PARAMETER Experiment Name: At_42deg_Heat_cDNA_P Parameter: Timepoint (hr) Value: 8
  misc_feature: MA Experiment 20000113 PARAMETER Experiment Name: At_42deg_Heat_cDNA_P Parameter: Tissue Value: Aerial
  misc_feature: MA Experiment ID: 20000144 Result: Up-regulated in Transcription
  misc_feature: MA Experiment 20000144 PARAMETER Experiment Name: At_42deg_Heat_cDNA_P Parameter: Temperature (deg C) Value: 42 vs. 22
  misc_feature: MA Experiment 20000144 PARAMETER Experiment Name: At_42deg_Heat_cDNA_P Parameter: Timepoint (hr) Value: 1
  misc_feature: MA Experiment 20000144 PARAMETER Experiment Name: At_42deg_Heat_cDNA_P Parameter: Tissue Value: Aerial
  misc_feature: MA Experiment ID: 20000171 Result: Up-regulated in Transcription
  misc_feature: MA Experiment 20000171 PARAMETER Experiment Name: At_42deg_Heat_P Parameter: Age (day) Value: 14
  misc_feature: MA Experiment 20000171 PARAMETER Experiment Name: At_42deg_Heat_P Parameter: Organism Value: A. thaliana
  misc_feature: MA Experiment 20000171 PARAMETER Experiment Name: At_42deg_Heat_P Parameter: Plant Line Value: WS
  misc_feature: MA Experiment 20000171 PARAMETER Experiment Name: At_42deg_Heat_P Parameter: Temperature (deg C) Value: 42 vs. 22
  misc_feature: MA Experiment 20000171 PARAMETER Experiment Name: At_42deg_Heat_P Parameter: Timepoint (hr) Value: 1
  misc_feature: MA Experiment 20000171 PARAMETER Experiment Name: At_42deg_Heat_P Parameter: Tissue Value: Aerial
  misc_feature: MA Experiment ID: 20000173 Result: Up-regulated in Transcription
  misc_feature: MA Experiment 20000173 PARAMETER Experiment Name: At_42deg_Heat_P Parameter: Age (day) Value: 14
  misc_feature: MA Experiment 20000173 PARAMETER Experiment Name: At_42deg_Heat_P Parameter: Organism Value: A. thaliana
  misc_feature: MA Experiment 20000173 PARAMETER Experiment Name: At_42deg_Heat_P Parameter: Plant Line Value: WS
  misc_feature: MA Experiment 20000173 PARAMETER Experiment Name: At_42deg_Heat_P Parameter: Temperature (deg C) Value: 42 vs. 22
  misc_feature: MA Experiment 20000173 PARAMETER Experiment Name: At_42deg_Heat_P Parameter: Timepoint (hr) Value: 6
  misc_feature: MA Experiment 20000173 PARAMETER Experiment Name: At_42deg_Heat_P Parameter: Tissue Value: Aerial
  misc_feature: MA Experiment ID: 20000180 Result: Down-regulated in Transcription
  misc_feature: MA Experiment 20000180 PARAMETER Experiment Name: At_Germinating_Seeds_P Parameter: Age (hr) Value: 24 vs. 0
  misc_feature: MA Experiment 20000180 PARAMETER Experiment Name: At_Germinating_Seeds_P Parameter: Tissue Value: Germinating Seeds
  misc_feature: MA Experiment ID: 20001557 Result: Up-regulated in Transcription
  misc_feature: MA Experiment 20001557 PARAMETER Experiment Name: At_Drought_Soil_Dry_P Parameter: Age (day) Value: 27
  misc_feature: MA Experiment 20001557 PARAMETER Experiment Name: At_Drought_Soil_Dry_P Parameter: Organism Value: A. thaliana
  misc_feature: MA Experiment 20001557 PARAMETER Experiment Name: At_Drought_Soil_Dry_P Parameter: Plant Line Value: WS
  misc_feature: MA Experiment 20001557 PARAMETER Experiment Name: At_Drought_Soil_Dry_P Parameter: Post Timepoint (hr) Value: 3
  misc_feature: MA Experiment 20001557 PARAMETER Experiment Name: At_Drought_Soil_Dry_P Parameter: Post-Treatment Value: Re-Water vs. No Drought
  misc_feature: MA Experiment 20001557 PARAMETER Experiment Name: At_Drought_Soil_Dry_P Parameter: Timepoint (day) Value: 13
  misc_feature: MA Experiment 20001557 PARAMETER Experiment Name: At_Drought_Soil_Dry_P Parameter: Treatment Value: Drought vs. No Drought
agcctcttcataagagagaagtcctctcagagaaacggcagccacatcaaccaacccaaacatcgaaagagagacacttttctctctctctttctctatctccttccaatctctctagggttttcgttacaacggcgaaaagatgttcggtagaggaccctcgaagaagagcgacaacactaagttctacgagatcttaggtgttcctaagagcgcttcaccagaagatctcaagaaagcttacaaaaaagccgctatcaagaatcatcctgataagggtggagatcccgagaagtttaaggagttagcacaagcttatgaagtgcttagtgacccggagaagcgtgagatttatgaccagtatggagaggatgcactcaaggaaggaatgggtggtggaggaggtggacatgatccatttgatattttctcatccttctttggtggaggcccctttggaggtaataccagccggcaaaggaggcagaggcgtggtgaggatgttgttcatcccttgaaggtatctcttgaggatgtgtaccttggtacaatgaagaagctttcactttctaggaatgctctctgctctaagtgtaacggaaagggatcaaaatctggagcctccttgaaatgtggagggtgtcagggatctggtatgaaggtgtctattaggcagcttggacctggaatgatccagcagatgcagcatgcatgtaatgaatgcaaagggacaggtgagaccatcaatgatcgggacaggtgtccacaatgcaaaggagacaaggtcattcctgagaagaaggtgcttgaagtgaatgtggagaagggaatgcaacacagtcagaagatcacatttgaaggacaagcagatgaagcgcctgacactgtcactggagatatagtgtttgtccttcagcagaaagagcacccaaagttcaagagaaagggagaagacctctttgtggagcacacactttctctaaccgaagctttgtgtggcttccaatttgttctgactcacttggatggcagaagtcttctcattaaatctaatcctggggaggtcgtgaaacctgattcatacaaggcaataagcgatgaaggaatgccgatataccagaggccattcatgaagggtaagctctacatccacttcacagtggagttcccggactcgttgagcccagatcagaccaaagcactggaagctgttctacctaagccgtcaacagctcagttgagtgacatggagatagatgaatgcgaggagaccacgctccacgatgtcaacattgaggatgagatgaggaggaaggcacaagctcaaagagaggcttatgatgatgacgatgaagatgatgaccatccgggtggtgctcaaagggtgcaatgtgcccagcagtaagtaactccttagagagactttgacccacatgggtttgggctccaaccaatttgtctcttgctttttcattctaagtgtattggagtctttatgggagtttggtacggtttaagaatttgcccacttcggtggaacatcgaaacttgttttctctttttcctctgactttaaaaattaaggccttattacaattttgtgttttttctttatgattaaatttgtagtaatttaatgtctaagaacatatatactgtgtgttttctatattgatatggatttaaaattcaat

SEQ ID NO: 25599 - protein, 420 aa, Arabidopsis thaliana
  peptide (1)..(420): Ceres Seq. ID no. 12336126
  misc_feature (234)..(358): Pfam Name: DnaJ C terminal region Pfam Description: DnaJ C terminal region
  misc_feature (1)..(420): Homolog of NCBI NO: 535588 NR Description: putative [Arabidopsis thaliana]
  misc_feature (1)..(420): Homolog of NCBI NO: 18420428 NR Description: Expressed protein
  misc_feature (1)..(420): Homolog of NCBI NO: 15010708 NR Description: AT3g44110/F26G5_60 [Arabidopsis thaliana]
  misc_feature (1)..(420): Homolog of NCBI NO: 2129577 NR Description: dnaJ protein homolog atj3 - Arabidopsis thaliana
  misc_feature (1)..(420): Homolog of NCBI NO: 15229874 NR Description: dnaJ protein homolog atj3
MFGRGPSKKSDNTKFYEILGVPKSASPEDLKKAYKKAAIKNHPDKGGDPEKFKELAQAYEVLSDPEKREIYDQYGEDALKEGMGGGGGGHDPFDIFSSFFGGGPFGGNTSRQRRQRRGEDVVHPLKVSLEDVYLGTMKKLSLSRNALCSKCNGKGSKSGASLKCGGCQGSGMKVSIRQLGPGMIQQMQHACNECKGTGETINDRDRCPQCKGDKVIPEKKVLEVNVEKGMQHSQKITFEGQADEAPDTVTGDIVFVLQQKEHPKFKRKGEDLFVEHTLSLTEALCGFQFVLTHLDGRSLLIKSNPGEVVKPDSYKAISDEGMPIYQRPFMKGKLYIHFTVEFPDSLSPDQTKALEAVLPKPSTAQLSDMEIDECEETTLHDVNIEDEMRRKAQAQREAYDDDDEDDDHPGGAQRVQCAQQ

SEQ ID NO: 25600 - protein, 338 aa, Arabidopsis thaliana
  peptide (1)..(338): Ceres Seq. ID no. 12336127
  misc_feature (152)..(276): Pfam Name: DnaJ C terminal region Pfam Description: DnaJ C terminal region
  misc_feature (1)..(338): Homolog of NCBI NO: 535588 NR Description: putative [Arabidopsis thaliana]
  misc_feature (1)..(338): Homolog of NCBI NO: 18420428 NR Description: Expressed protein
  misc_feature (1)..(338): Homolog of NCBI NO: 15010708 NR Description: AT3g44110/F26G5_60 [Arabidopsis thaliana]
  misc_feature (1)..(338): Homolog of NCBI NO: 2129577 NR Description: dnaJ protein homolog atj3 - Arabidopsis thaliana
  misc_feature (1)..(338): Homolog of NCBI NO: 15229874 NR Description: dnaJ protein homolog atj3
MGGGGGGHDPFDIFSSFFGGGPFGGNTSRQRRQRRGEDVVHPLKVSLEDVYLGTMKKLSLSRNALCSKCNGKGSKSGASLKCGGCQGSGMKVSIRQLGPGMIQQMQHACNECKGTGETINDRDRCPQCKGDKVIPEKKVLEVNVEKGMQHSQKITFEGQADEAPDTVTGDIVFVLQQKEHPKFKRKGEDLFVEHTLSLTEALCGFQFVLTHLDGRSLLIKSNPGEVVKPDSYKAISDEGMPIYQRPFMKGKLYIHFTVEFPDSLSPDQTKALEAVLPKPSTAQLSDMEIDECEETTLHDVNIEDEMRRKAQAQREAYDDDDEDDDHPGGAQRVQCAQQ

SEQ ID NO: 25601 - protein, 284 aa, Arabidopsis thaliana
  peptide (1)..(284): Ceres Seq. ID no. 12336128
  misc_feature (98)..(222): Pfam Name: DnaJ C terminal region Pfam Description: DnaJ C terminal region
  misc_feature (1)..(284): Homolog of NCBI NO: 535588 NR Description: putative [Arabidopsis thaliana]
  misc_feature (1)..(284): Homolog of NCBI NO: 18420428 NR Description: Expressed protein
  misc_feature (1)..(284): Homolog of NCBI NO: 15010708 NR Description: AT3g44110/F26G5_60 [Arabidopsis thaliana]
  misc_feature (1)..(284): Homolog of NCBI NO: 2129577 NR Description: dnaJ protein homolog atj3 - Arabidopsis thaliana
  misc_feature (1)..(284): Homolog of NCBI NO: 15229874 NR Description: dnaJ protein homolog atj3
MKKLSLSRNALCSKCNGKGSKSGASLKCGGCQGSGMKVSIRQLGPGMIQQMQHACNECKGTGETINDRDRCPQCKGDKVIPEKKVLEVNVEKGMQHSQKITFEGQADEAPDTVTGDIVFVLQQKEHPKFKRKGEDLFVEHTLSLTEALCGFQFVLTHLDGRSLLIKSNPGEVVKPDSYKAISDEGMPIYQRPFMKGKLYIHFTVEFPDSLSPDQTKALEAVLPKPSTAQLSDMEIDECEETTLHDVNIEDEMRRKAQAQREAYDDDDEDDDHPGGAQRVQCAQQ

SEQ ID NO: 25602 - DNA, 1263 bp, Arabidopsis thaliana
  misc_feature (1)..(1263): Ceres Seq. ID no. 12580020
  misc_feature: MA Experiment ID: 108464 Result: Down-regulated in Transcription
  misc_feature: MA Experiment 108464 PARAMETER Experiment Name: At_Germinating_Seeds_cDNA_P Parameter: Age (day) Value: 4 vs. 0
  misc_feature: MA Experiment 108464 PARAMETER Experiment Name: At_Germinating_Seeds_cDNA_P Parameter: Tissue Value: Germinating Seeds
  misc_feature: MA Experiment ID: 108573 Result: Up-regulated in Transcription
  misc_feature: MA Experiment 108573 PARAMETER Experiment Name: At_Drought_cDNA_P Parameter: Timepoint (hr) Value: 6
  misc_feature: MA Experiment 108573 PARAMETER Experiment Name: At_Drought_cDNA_P Parameter: Tissue Value: Aerial
  misc_feature: MA Experiment 108573 PARAMETER Experiment Name: At_Drought_cDNA_P Parameter: Treatment Value: Drought vs. No Drought
  misc_feature: MA Experiment ID: 108576 Result: Down-regulated in Transcription
  misc_feature: MA Experiment 108576 PARAMETER Experiment Name: At_42deg_Heat_cDNA_P Parameter: Temperature (deg C) Value: 42 vs. 22
  misc_feature: MA Experiment 108576 PARAMETER Experiment Name: At_42deg_Heat_cDNA_P Parameter: Timepoint (hr) Value: 1
  misc_feature: MA Experiment 108576 PARAMETER Experiment Name: At_42deg_Heat_cDNA_P Parameter: Tissue Value: Aerial
  misc_feature: MA Experiment ID: 108577 Result: Down-regulated in Transcription
  misc_feature: MA Experiment 108577 PARAMETER Experiment Name: At_42deg_Heat_cDNA_P Parameter: Temperature (deg C) Value: 42 vs. 22
  misc_feature: MA Experiment 108577 PARAMETER Experiment Name: At_42deg_Heat_cDNA_P Parameter: Timepoint (hr) Value: 6
  misc_feature: MA Experiment 108577 PARAMETER Experiment Name: At_42deg_Heat_cDNA_P Parameter: Tissue Value: Aerial
  misc_feature: MA Experiment ID: 108595 Result: Down-regulated in Transcription
  misc_feature: MA Experiment 108595 PARAMETER Experiment Name: At_Ler-pi_Ovule_cDNA_P Parameter: Plant Line Value: null
  misc_feature: MA Experiment ID: 20000224 Result: Down-regulated in Transcription
  misc_feature: MA Experiment ID: 20000286 Result: Up-regulated in Transcription
  misc_feature: MA Experiment 20000286 PARAMETER Experiment Name: At_Open_Flower_P Parameter: Age (day) Value: 21
  misc_feature: MA Experiment 20000286 PARAMETER Experiment Name: At_Open_Flower_P Parameter: Plant Line Value: WS
  misc_feature: MA Experiment 20000286 PARAMETER Experiment Name: At_Open_Flower_P Parameter: Tissue Value: Half Open vs. Whole Plant
  misc_feature: MA Experiment ID: 20000573 Result: Up-regulated in Transcription
  misc_feature: MA Experiment 20000573 PARAMETER Experiment Name: At_100uM_ABA_Mutants__P Parameter: Organism Value: A. thaliana
  misc_feature: MA Experiment 20000573 PARAMETER Experiment Name: At_100uM_ABA_Mutants__P Parameter: Plant Line Value: CS22 vs. Ler wt
  misc_feature: MA Experiment 20000573 PARAMETER Experiment Name: At_100uM_ABA_Mutants__P Parameter: Timepoint (hr) Value: N/A
  misc_feature: MA Experiment 20000573 PARAMETER Experiment Name: At_100uM_ABA_Mutants__P Parameter: Tissue Value: Whole Plant
  misc_feature: MA Experiment 20000573 PARAMETER Experiment Name: At_100uM_ABA_Mutants__P Parameter: Treatment Value: None
cctcttctctcatatctttgaaatggatcacgatgggtttcgtaattggggttactatgaaccagctgctgctacctttaaaggtaatctcggtttgcagctaatgtctaccattgatcggaacactaaaccgtttttacctgggcgggatccgaatctaatgatggggcctaacgggtcatatcaccaccaagagcctcctatccacatgagctacaattggattaaccaacagaaggataagttcttcaatatgttgcctgttacaacagccactcctaactacggtaatttccttcccgaaacttcgtctgctccgtcgatgcagatgaatctccatcatcatcttcaaaccgaggagaatccggttaagttggaagaagagattgttgttcagactaagaagagaaagaccaatgcaaaagctggctcgactccaaaggctaagaagccaaggaaaccaaaggatgagaacagtaacaacaacaacaacaacaacacgaatgttactcgagttaaacccgctaagaaaagtgttgacttggtgatcaatggagtgagtatggacatttcgggtcttcctgttcctatctgcacttgcactggagctcctcagcaatgctaccgttggggatgtggcggttggcagtctgcttgttgtaccacaaacatctcaatgcatccattaccaatgagtactaaacgccgtggagcgaggatctcgggaaggaagatgagtcaaggcgcgtttaagaaggttcttgagaaacttgcttctgatgggtttaactttgggaatccgattgatcttaagagccattgggcaagacatggaactaacaagttcgtcacaatcagatgattagttgcttgattagtaaaacagaacaagtgagtgtttctcttccgggatggaatctctcaatgatggtgtatgtatatacaacaaatctgaaatctgtgaccttttcaaaaattctgtctgcaatctgagttcgattctgttttcaggtaaaccatcttcgttgtagggtttggaagcagagttctctgttttctttaccacttttttttatcacacttttgctttgttttttgtttgtttgtctatctgtgtgtctgaggaagaagaaggtgtctgagaaaaaatctgcagggaaatttatttttttgtacttttttttttcttccttttgttatctttttataaacattttactgacttgtaacagatattcttttaattaaatgtttttatttttc

SEQ ID NO: 25603 - protein, 286 aa, Arabidopsis thaliana
  peptide (1)..(286): Ceres Seq. ID no. 12580021
  misc_feature (8)..(286): Homolog of NCBI NO: 21594368 NR Description: unknown [Arabidopsis thaliana]
  misc_feature (8)..(286): Homolog of NCBI NO: 18391534 NR Description: expressed protein
  misc_feature (8)..(286): Homolog of NCBI NO: 18394147 NR Description: expressed protein
LFSHIFEMDHDGFRNWGYYEPAAATFKGNLGLQLMSTIDRNTKPFLPGRDPNLMMGPNGSYHHQEPPIHMSYNWINQQKDKFFNMLPVTTATPNYGNFLPETSSAPSMQMNLHHHLQTEENPVKLEEEIVVQTKKRKTNAKAGSTPKAKKPRKPKDENSNNNNNNNTNVTRVKPAKKSVDLVINGVSMDISGLPVPICTCTGAPQQCYRWGCGGWQSACCTTNISMHPLPMSTKRRGARISGRKMSQGAFKKVLEKLASDGFNFGNPIDLKSHWARHGTNKFVTIR

SEQ ID NO: 25604 - protein, 279 aa, Arabidopsis thaliana
  peptide (1)..(279): Ceres Seq. ID no. 12580022
  misc_feature (1)..(279): Homolog of NCBI NO: 21594368 NR Description: unknown [Arabidopsis thaliana]
  misc_feature (1)..(279): Homolog of NCBI NO: 18391534 NR Description: expressed protein
  misc_feature (1)..(279): Homolog of NCBI NO: 18394147 NR Description: expressed protein
MDHDGFRNWGYYEPAAATFKGNLGLQLMSTIDRNTKPFLPGRDPNLMMGPNGSYHHQEPPIHMSYNWINQQKDKFFNMLPVTTATPNYGNFLPETSSAPSMQMNLHHHLQTEENPVKLEEEIVVQTKKRKTNAKAGSTPKAKKPRKPKDENSNNNNNNNTNVTRVKPAKKSVDLVINGVSMDISGLPVPICTCTGAPQQCYRWGCGGWQSACCTTNISMHPLPMSTKRRGARISGRKMSQGAFKKVLEKLASDGFNFGNPIDLKSHWARHGTNKFVTIR

SEQ ID NO: 25605 - protein, 252 aa, Arabidopsis thaliana
  peptide (1)..(252): Ceres Seq. ID no. 12580023
  misc_feature (1)..(252): Homolog of NCBI NO: 18391534 NR Description: expressed protein
  misc_feature (1)..(252): Homolog of NCBI NO: 18394147 NR Description: expressed protein
  misc_feature (1)..(252): Homolog of NCBI NO: 21594368 NR Description: unknown [Arabidopsis thaliana]
MSTIDRNTKPFLPGRDPNLMMGPNGSYHHQEPPIHMSYNWINQQKDKFFNMLPVTTATPNYGNFLPETSSAPSMQMNLHHHLQTEENPVKLEEEIVVQTKKRKTNAKAGSTPKAKKPRKPKDENSNNNNNNNTNVTRVKPAKKSVDLVINGVSMDISGLPVPICTCTGAPQQCYRWGCGGWQSACCTTNISMHPLPMSTKRRGARISGRKMSQGAFKKVLEKLASDGFNFGNPIDLKSHWARHGTNKFVTIR

SEQ ID NO: 25606 - DNA, 1128 bp, Arabidopsis thaliana
  misc_feature (1)..(1128): Ceres Seq. ID no. 12396073
  misc_feature: MA Experiment ID: 20000093 Result: Up-regulated in Transcription
  misc_feature: MA Experiment 20000093 PARAMETER Experiment Name: At_42deg_Heat_cDNA_P Parameter: Temperature (deg C) Value: 42 vs. 22
  misc_feature: MA Experiment 20000093 PARAMETER Experiment Name: At_42deg_Heat_cDNA_P Parameter: Timepoint (hr) Value: 0.5
  misc_feature: MA Experiment 20000093 PARAMETER Experiment Name: At_42deg_Heat_cDNA_P Parameter: Tissue Value: Aerial
  misc_feature: MA Experiment ID: 20000112 Result: Up-regulated in Transcription
  misc_feature: MA Experiment 20000112 PARAMETER Experiment Name: At_42deg_Heat_cDNA_P Parameter: Temperature (deg C) Value: 42 vs. 22
  misc_feature: MA Experiment 20000112 PARAMETER Experiment Name: At_42deg_Heat_cDNA_P Parameter: Timepoint (hr) Value: 2
  misc_feature: MA Experiment 20000112 PARAMETER Experiment Name: At_42deg_Heat_cDNA_P Parameter: Tissue Value: Aerial
  misc_feature: MA Experiment ID: 20000113 Result: Up-regulated in Transcription
  misc_feature: MA Experiment 20000113 PARAMETER Experiment Name: At_42deg_Heat_cDNA_P Parameter: Temperature (deg C) Value: 42 vs. 22
  misc_feature: MA Experiment 20000113 PARAMETER Experiment Name: At_42deg_Heat_cDNA_P Parameter: Timepoint (hr) Value: 8
  misc_feature: MA Experiment 20000113 PARAMETER Experiment Name: At_42deg_Heat_cDNA_P Parameter: Tissue Value: Aerial
  misc_feature: MA Experiment ID: 20000171 Result: Up-regulated in Transcription
  misc_feature: MA Experiment 20000171 PARAMETER Experiment Name: At_42deg_Heat_P Parameter: Age (day) Value: 14
  misc_feature: MA Experiment 20000171 PARAMETER Experiment Name: At_42deg_Heat_P Parameter: Organism Value: A. thaliana
  misc_feature: MA Experiment 20000171 PARAMETER Experiment Name: At_42deg_Heat_P Parameter: Plant Line Value: WS
  misc_feature: MA Experiment 20000171 PARAMETER Experiment Name: At_42deg_Heat_P Parameter: Temperature (deg C) Value: 42 vs. 22
  misc_feature: MA Experiment 20000171 PARAMETER Experiment Name: At_42deg_Heat_P Parameter: Timepoint (hr) Value: 1
  misc_feature: MA Experiment 20000171 PARAMETER Experiment Name: At_42deg_Heat_P Parameter: Tissue Value: Aerial
  misc_feature: MA Experiment ID: 20000173 Result: Up-regulated in Transcription
  misc_feature: MA Experiment 20000173 PARAMETER Experiment Name: At_42deg_Heat_P Parameter: Age (day) Value: 14
  misc_feature: MA Experiment 20000173 PARAMETER Experiment Name: At_42deg_Heat_P Parameter: Organism Value: A. thaliana
  misc_feature: MA Experiment 20000173 PARAMETER Experiment Name: At_42deg_Heat_P Parameter: Plant Line Value: WS
  misc_feature: MA Experiment 20000173 PARAMETER Experiment Name: At_42deg_Heat_P Parameter: Temperature (deg C) Value: 42 vs. 22
  misc_feature: MA Experiment 20000173 PARAMETER Experiment Name: At_42deg_Heat_P Parameter: Timepoint (hr) Value: 6
  misc_feature: MA Experiment 20000173 PARAMETER Experiment Name: At_42deg_Heat_P Parameter: Tissue Value: Aerial
  misc_feature: MA Experiment ID: 20000179 Result: Up-regulated in Transcription
  misc_feature: MA Experiment 20000179 PARAMETER Experiment Name: At_Germinating_Seeds_P Parameter: Age (hr) Value: 6 vs. 0
  misc_feature: MA Experiment 20000179 PARAMETER Experiment Name: At_Germinating_Seeds_P Parameter: Tissue Value: Germinating Seeds
  misc_feature: MA Experiment ID: 20000180 Result: Up-regulated in Transcription
  misc_feature: MA Experiment 20000180 PARAMETER Experiment Name: At_Germinating_Seeds_P Parameter: Age (hr) Value: 24 vs. 0
  misc_feature: MA Experiment 20000180 PARAMETER Experiment Name: At_Germinating_Seeds_P Parameter: Tissue Value: Germinating Seeds
  misc_feature: MA Experiment ID: 20000794 Result: Down-regulated in Transcription
  misc_feature: MA Experiment 20000794 PARAMETER Experiment Name: At_Petals_P Parameter: Age (day) Value: 23-25 days
  misc_feature: MA Experiment 20000794 PARAMETER Experiment Name: At_Petals_P Parameter: Plant Line Value: WS
  misc_feature: MA Experiment 20000794 PARAMETER Experiment Name: At_Petals_P Parameter: Tissue Value: Petals vs. Whole plant
  misc_feature: MA Experiment ID: 20001248 Result: Down-regulated in Transcription
  misc_feature: MA Experiment 20001248 PARAMETER Experiment Name: At_Far-red-induction_P Parameter: Age (day) Value: 7
  misc_feature: MA Experiment 20001248 PARAMETER Experiment Name: At_Far-red-induction_P Parameter: Light Value: Far-red vs. White
  misc_feature: MA Experiment 20001248 PARAMETER Experiment Name: At_Far-red-induction_P Parameter: Organism Value: A. thaliana
  misc_feature: MA Experiment 20001248 PARAMETER Experiment Name: At_Far-red-induction_P Parameter: Plant Line Value: Columbia
  misc_feature: MA Experiment 20001248 PARAMETER Experiment Name: At_Far-red-induction_P Parameter: Timepoint (hr) Value: 4
  misc_feature: MA Experiment 20001248 PARAMETER Experiment Name: At_Far-red-induction_P Parameter: Tissue Value: Whole Plant
  misc_feature: MA Experiment ID: 20001450 Result: Down-regulated in Transcription
  misc_feature: MA Experiment 20001450 PARAMETER Experiment Name: At_Far-red-induction_P Parameter: Age (day) Value: 7
  misc_feature: MA Experiment 20001450 PARAMETER Experiment Name: At_Far-red-induction_P Parameter: Light Value: Far-red vs. White
  misc_feature: MA Experiment 20001450 PARAMETER Experiment Name: At_Far-red-induction_P Parameter: Organism Value: A. thaliana
  misc_feature: MA Experiment 20001450 PARAMETER Experiment Name: At_Far-red-induction_P Parameter: Plant Line Value: Columbia
  misc_feature: MA Experiment 20001450 PARAMETER Experiment Name: At_Far-red-induction_P Parameter: Timepoint (hr) Value: 8
  misc_feature: MA Experiment 20001450 PARAMETER Experiment Name: At_Far-red-induction_P Parameter: Tissue Value: Whole Plant
aaaaagcacgaggaaggatcaaatcggaaacttaacagaatttagctaccaattactgtctccggcgagatctcaatttgatccttcacggtggcgtcgacgtccgggcaacaacaagctctctcgagaagaaagccattatcatcatcatcatcatcttcatcatctcctcctccgtcttcctcacctgttcgagctcctgcggcgaagaaaccgagtccggaatacccattttggcagcagaactggtttatcggtctgctattcgtgatggctttaggattcttctgtctcgctatcttcctttacctaagtctcgatcctgattccggttacacgtctgcctccgccgctgcttctggtaaagaaggtgtcgagattacttatggaagtgcgatcaagttgatgcacgagaaaactaaatttcgattacattctcacgatgtgccgtatggatccggcagtggtcagcaatcagtcactggttttccaggcgtcgttgattccaacagctattggattgttaaacctgtgcctgggacaacagaaaagcaaggtgatgctgtcaagagtggagcaaccattaggttgcagcatatgaagaccagaaaatggcttcacagtcacttgcatgcatctcctatatcagggaacttagaggttagctgctttggagatgatacaaattccgatactggggatcactggaagcttataattgaaggaagtgggaagacatggaaacaggaccaaagagtccgtcttcaacacatagacactagtggctacctccatagccatgacaagaagtaccaacgtatagctggtggtcagcaagaggtgtgtggaattcgggagaagaaggcggataacatttggttggcagcagaaggagtctaccttccccttaatgagagcagcaagtaaggttaagagtgaaaaaacttctctggaggactttgaatcttatctcttactctctaaactcacaatcaagaaaatagagatatatatttcttaattttcgattggtaatacttttagtggcacgaatatatcttgttttggtagatattctgcatttatctcttttttaggtcacccttaagagacactatcttattatcc

SEQ ID NO: 25607 - protein, 218 aa, Arabidopsis thaliana
  peptide (1)..(218): Ceres Seq. ID no. 12396074
  misc_feature (96)..(151): Pfam Name: MIR domain Pfam Description: MIR domain
  misc_feature (26)..(215): Homolog of NCBI NO: 27673471 NR Description: similar to stromal cell-derived factor 2
  misc_feature (26)..(215): Homolog of NCBI NO: 2137796 NR Description: stromal cell-derived factor 2 - mouse
  misc_feature (26)..(215): Homolog of NCBI NO: 26344334 NR Description: unnamed protein product [Mus musculus]
  misc_feature (26)..(218): Homolog of NCBI NO: 30584855 NR Description: Homo sapiens stromal cell-derived factor 2
  misc_feature (26)..(218): Homolog of NCBI NO: 14141195 NR Description: stromal cell-derived factor 2 precursor [Homo
  misc_feature (37)..(218): Homolog of NCBI NO: 29840881 NR Description: similar to GenBank Accession Number AE003603
  misc_feature (24)..(217): Homolog of NCBI NO: 24644197 NR Description: CG11999-PA [Drosophila melanogaster]
  misc_feature (46)..(218): Homolog of NCBI NO: 25412278 NR Description: hypothetical protein At2g25110 [imported] -
  misc_feature (1)..(218): Homolog of NCBI NO: 21593658 NR Description: unknown [Arabidopsis thaliana]
  misc_feature (1)..(218): Homolog of NCBI NO: 18400721 NR Description: expressed protein
MALGFFCLAIFLYLSLDPDSGYTSASAAASGKEGVEITYGSAIKLMHEKTKFRLHSHDVPYGSGSGQQSVTGFPGVVDSNSYWIVKPVPGTTEKQGDAVKSGATIRLQHMKTRKWLHSHLHASPISGNLEVSCFGDDTNSDTGDHWKLIIEGSGKTWKQDQRVRLQHIDTSGYLHSHDKKYQRIAGGQQEVCGIREKKADNIWLAAEGVYLPLNESSK

SEQ ID NO: 25608 - protein, 173 aa, Arabidopsis thaliana
  peptide (1)..(173): Ceres Seq. ID no. 12396075
  misc_feature (51)..(106): Pfam Name: MIR domain Pfam Description: MIR domain
  misc_feature (1)..(170): Homolog of NCBI NO: 27673471 NR Description: similar to stromal cell-derived factor 2
  misc_feature (1)..(170): Homolog of NCBI NO: 2137796 NR Description: stromal cell-derived factor 2 - mouse
  misc_feature (1)..(170): Homolog of NCBI NO: 26344334 NR Description: unnamed protein product [Mus musculus]
  misc_feature (1)..(173): Homolog of NCBI NO: 30584855 NR Description: Homo sapiens stromal cell-derived factor 2
  misc_feature (1)..(173): Homolog of NCBI NO: 14141195 NR Description: stromal cell-derived factor 2 precursor [Homo
  misc_feature (1)..(173): Homolog of NCBI NO: 29840881 NR Description: similar to GenBank Accession Number AE003603
  misc_feature (1)..(172): Homolog of NCBI NO: 24644197 NR Description: CG11999-PA [Drosophila melanogaster]
  misc_feature (1)..(173): Homolog of NCBI NO: 25412278 NR Description: hypothetical protein At2g25110 [imported] -
  misc_feature (1)..(173): Homolog of NCBI NO: 21593658 NR Description: unknown [Arabidopsis thaliana]
  misc_feature (1)..(173): Homolog of NCBI NO: 18400721 NR Description: expressed protein
MHEKTKFRLHSHDVPYGSGSGQQSVTGFPGVVDSNSYWIVKPVPGTTEKQGDAVKSGATIRLQHMKTRKWLHSHLHASPISGNLEVSCFGDDTNSDTGDHWKLIIEGSGKTWKQDQRVRLQHIDTSGYLHSHDKKYQRIAGGQQEVCGIREKKADNIWLAAEGVYLPLNESSK

SEQ ID NO: 25609 - protein, 109 aa, Arabidopsis thaliana
  peptide (1)..(109): Ceres Seq. ID no. 12396076
  misc_feature (1)..(42): Pfam Name: MIR domain Pfam Description: MIR domain
  misc_feature (1)..(106): Homolog of NCBI NO: 27673471 NR Description: similar to stromal cell-derived factor 2
  misc_feature (1)..(106): Homolog of NCBI NO: 2137796 NR Description: stromal cell-derived factor 2 - mouse
  misc_feature (1)..(106): Homolog of NCBI NO: 26344334 NR Description: unnamed protein product [Mus musculus]
  misc_feature (1)..(109): Homolog of NCBI NO: 30584855 NR Description: Homo sapiens stromal cell-derived factor 2
  misc_feature (1)..(109): Homolog of NCBI NO: 14141195 NR Description: stromal cell-derived factor 2 precursor [Homo
  misc_feature (1)..(109): Homolog of NCBI NO: 29840881 NR Description: similar to GenBank Accession Number AE003603
  misc_feature (1)..(108): Homolog of NCBI NO: 24644197 NR Description: CG11999-PA [Drosophila melanogaster]
  misc_feature (1)..(109): Homolog of NCBI NO: 25412278 NR Description: hypothetical protein At2g25110 [imported] -
  misc_feature (1)..(109): Homolog of NCBI NO: 21593658 NR Description: unknown [Arabidopsis thaliana]
  misc_feature (1)..(109): Homolog of NCBI NO: 18400721 NR Description: expressed protein
MKTRKWLHSHLHASPISGNLEVSCFGDDTNSDTGDHWKLIIEGSGKTWKQDQRVRLQHIDTSGYLHSHDKKYQRIAGGQQEVCGIREKKADNIWLAAEGVYLPLNESSK

SEQ ID NO: 25610 - DNA, 1407 bp, Arabidopsis thaliana
  misc_feature (1)..(1407): Ceres Seq. ID no. 12336104
  misc_feature: MA Experiment ID: 108569 Result: Up-regulated in Transcription
  misc_feature: MA Experiment 108569 PARAMETER Experiment Name: At_0.001%_MeJA__cDNA_P Parameter: Timepoint (hr) Value: 6
  misc_feature: MA Experiment 108569 PARAMETER Experiment Name: At_0.001%_MeJA__cDNA_P Parameter: Tissue Value: Aerial
  misc_feature: MA Experiment 108569 PARAMETER Experiment Name: At_0.001%_MeJA__cDNA_P Parameter: Treatment Value: 0.001% MeJA vs. No Treatment
  misc_feature: MA Experiment ID: 108573 Result: Up-regulated in Transcription
  misc_feature: MA Experiment 108573 PARAMETER Experiment Name: At_Drought_cDNA_P Parameter: Timepoint (hr) Value: 6
  misc_feature: MA Experiment 108573 PARAMETER Experiment Name: At_Drought_cDNA_P Parameter: Tissue Value: Aerial
  misc_feature: MA Experiment 108573 PARAMETER Experiment Name: At_Drought_cDNA_P Parameter: Treatment Value: Drought vs. No Drought
  misc_feature: MA Experiment ID: 108579 Result: Down-regulated in Transcription
  misc_feature: MA Experiment 108579 PARAMETER Experiment Name: At_4deg_Cold_cDNA_P Parameter: Temperature (deg C) Value: 4 vs. 22
  misc_feature: MA Experiment 108579 PARAMETER Experiment Name: At_4deg_Cold_cDNA_P Parameter: Timepoint (hr) Value: 6
  misc_feature: MA Experiment 108579 PARAMETER Experiment Name: At_4deg_Cold_cDNA_P Parameter: Tissue Value: Aerial
  misc_feature: MA Experiment ID: 108585 Result: Up-regulated in Transcription
  misc_feature: MA Experiment 108585 PARAMETER Experiment Name: At_5mM_NaNP_cDNA_P Parameter: Timepoint (hr) Value: 6
  misc_feature: MA Experiment 108585 PARAMETER Experiment Name: At_5mM_NaNP_cDNA_P Parameter: Tissue Value: Aerial
  misc_feature: MA Experiment 108585 PARAMETER Experiment Name: At_5mM_NaNP_cDNA_P Parameter: Treatment Value: null
  misc_feature: MA Experiment ID: 108668 Result: Up-regulated in Transcription
  misc_feature: MA Experiment 108668 PARAMETER Experiment Name: At_2mM_SA_cDNA_P Parameter: Plant Line Value: WS
  misc_feature: MA Experiment 108668 PARAMETER Experiment Name: At_2mM_SA_cDNA_P Parameter: Timepoint (hr) Value: 6
  misc_feature: MA Experiment 108668 PARAMETER Experiment Name: At_2mM_SA_cDNA_P Parameter: Treatment Value: 2mM SA vs. No Treatment
  misc_feature: MA Experiment ID: 20000224 Result: Down-regulated in Transcription
  misc_feature: MA Experiment ID: 20001450 Result: Up-regulated in Transcription
  misc_feature: MA Experiment 20001450 PARAMETER Experiment Name: At_Far-red-induction_P Parameter: Age (day) Value: 7
  misc_feature: MA Experiment 20001450 PARAMETER Experiment Name: At_Far-red-induction_P Parameter: Light Value: Far-red vs. White
  misc_feature: MA Experiment 20001450 PARAMETER Experiment Name: At_Far-red-induction_P Parameter: Organism Value: A. thaliana
  misc_feature: MA Experiment 20001450 PARAMETER Experiment Name: At_Far-red-induction_P Parameter: Plant Line Value: Columbia
  misc_feature: MA Experiment 20001450 PARAMETER Experiment Name: At_Far-red-induction_P Parameter: Timepoint (hr) Value: 8
  misc_feature: MA Experiment 20001450 PARAMETER Experiment Name: At_Far-red-induction_P Parameter: Tissue Value: Whole Plant
  misc_feature: MA Experiment ID: 20001558 Result: Down-regulated in Transcription
  misc_feature: MA Experiment 20001558 PARAMETER Experiment Name: At_Drought_Soil_Dry_P Parameter: Age (day) Value: 27
  misc_feature: MA Experiment 20001558 PARAMETER Experiment Name: At_Drought_Soil_Dry_P Parameter: Organism Value: A. thaliana
  misc_feature: MA Experiment 20001558 PARAMETER Experiment Name: At_Drought_Soil_Dry_P Parameter: Plant Line Value: WS
  misc_feature: MA Experiment 20001558 PARAMETER Experiment Name: At_Drought_Soil_Dry_P Parameter: Post Timepoint (hr) Value: 6
  misc_feature: MA Experiment 20001558 PARAMETER Experiment Name: At_Drought_Soil_Dry_P Parameter: Post-Treatment Value: Re-Water vs. No Drought
  misc_feature: MA Experiment 20001558 PARAMETER Experiment Name: At_Drought_Soil_Dry_P Parameter: Timepoint (day) Value: 13
  misc_feature: MA Experiment 20001558 PARAMETER Experiment Name: At_Drought_Soil_Dry_P Parameter: Treatment Value: Drought vs. No Drought
atgctgattcctctccttttcttcctcaactcataaacccgatcggccgattccttcacaattatccttaaaattttcgattttgattattgggtttctctctgatcatggcggttgttgagactggagcagcagctactgctgctgatgcaggaggagtcgtgatccagccgccgccgtcttcaccaccatcttcaatgactagtcaagattccggcgtttcttccgatgatcagaaccatcactctaggatcgatcaagttctccggcacgatcaaggtctttacagcaagatcgggtcacacgtggcgagatccgacggcgttgacggtggtgagagctttaagcgtgatatgagagagcttcaggagcttttctctaagcttaatcctatggctgaagagttgttcctccttctctgaataaacaaggaggtaacggtgttaacggtggtttcttcacctctgctggttccttcttccgcaacaatggctttgctggtaccggaaatggcggatacggtaacgaaaacggtggtttccgacggaagaagagttttggtcaagggaaacgaaggatgaatgctcgaacaagcatggctcagcgagaagatgttatccgtagaaccgtctacgtctctgatctcgatcaacaggtcactgaagagcagcttgctggtttgtttgtgagctgtggacaggttgttgactgtcgcatatgcggtgacccaaactcggtccttcggtttgcattcatagagttcactgatgaagagggtgcgatgactgctctaaatttatcggggactatgttgggattctatcctgtgaaagttttaccatccaaaacagctatagcaccggttaacccgacatttttgcctaggactgaagatgagagtgagatgtgtgcaagaactatctactgtactaacatagacaagaaggtgactcaatcagacgtgaagatcttttttgagtacttctgcggagaggtttatcgcctgaggctgcttggagattatcaacactcgactcgtattgcttttgtagagttcgtaatggcggaaagcgcaatagctgctctcaactgcagtggagttgttcttggttctttacctataagggtgagtccttcaaagacgcctgttcgtccgagatcaccgaggcatccaatgcattgatcttagctttacaggttttcacatatctcatgtctccgcaatatatatatcgctgtgtcgtcttaaaaacagcattacacagacatgtaaagatgtttgtctgcatctctcatctcttgttttcgaaatgtaactctgggatctgatgatgcttctttcttcttcctttacctgagaatcttttgggtaaaaaaaacctcgtagagagtttttatttatctctt

SEQ ID NO: 25611 - protein, 201 aa, Arabidopsis thaliana
  peptide (1)..(201): Ceres Seq. ID no. 12336105
  misc_feature (18)..(86): Pfam Name: RNA recognition motif. (a.k.a. RRM, RBD, or RNP domain) Pfam Description: RNA recognition motif. (a.k.a. RRM, RBD, or RNP
  misc_feature (1)..(177): Homolog of NCBI NO: 34903832 NR Description: ATT4F9_7(AL049523|pid:g4539439) Arabidopsis
  misc_feature (1)..(192): Homolog of NCBI NO: 15238531 NR Description: RNA-binding protein, putative; protein id:
  misc_feature (1)..(184): Homolog of NCBI NO: 8671859 NR Description: Contains similarity to RNA-binding protein from thaliana gi|2129727 and contains RNA recognition PF|00076 domain.
  misc_feature (1)..(199): Homolog of NCBI NO: 15220902 NR Description: RNA-binding protein, putative; protein id:
  misc_feature (1)..(199): Homolog of NCBI NO: 15231858 NR Description: RNA-binding protein, putative; protein id:
  misc_feature (1)..(197): Homolog of NCBI NO: 15229132 NR Description: RNA-binding protein, putative; protein id:
  misc_feature (1)..(201): Homolog of NCBI NO: 14030687 NR Description: At1g32790 [Arabidopsis thaliana]
  misc_feature (1)..(201): Homolog of NCBI NO: 1174153 NR Description: RNA-binding protein
  misc_feature (1)..(201): Homolog of NCBI NO: 15235177 NR Description: RNA-binding protein RBP37
  misc_feature (1)..(201): Homolog of NCBI NO: 15223304 NR Description: RNA-binding protein, putative
MNARTSMAQREDVIRRTVYVSDLDQQVTEEQLAGLFVSCGQVVDCRICGDPNSVLRFAFIEFTDEEGAMTALNLSGTMLGFYPVKVLPSKTAIAPVNPTFLPRTEDESEMCARTIYCTNIDKKVTQSDVKIFFEYFCGEVYRLRLLGDYQHSTRIAFVEFVMAESAIAALNCSGVVLGSLPIRVSPSKTPVRPRSPRHPMH

SEQ ID NO: 25612 - protein, 195 aa, Arabidopsis thaliana
  peptide (1)..(195): Ceres Seq. ID no. 12336106
  misc_feature (12)..(80): Pfam Name: RNA recognition motif. (a.k.a. RRM, RBD, or RNP domain) Pfam Description: RNA recognition motif. (a.k.a. RRM, RBD, or RNP
  misc_feature (1)..(171): Homolog of NCBI NO: 34903832 NR Description: ATT4F9_7(AL049523|pid:g4539439) Arabidopsis
  misc_feature (1)..(186): Homolog of NCBI NO: 15238531 NR Description: RNA-binding protein, putative; protein id:
  misc_feature (1)..(178): Homolog of NCBI NO: 8671859 NR Description: Contains similarity to RNA-binding protein from thaliana gi|2129727 and contains RNA recognition PF|00076 domain.
  misc_feature (1)..(193): Homolog of NCBI NO: 15220902 NR Description: RNA-binding protein, putative; protein id:
  misc_feature (1)..(193): Homolog of NCBI NO: 15231858 NR Description: RNA-binding protein, putative; protein id:
  misc_feature (1)..(191): Homolog of NCBI NO: 15229132 NR Description: RNA-binding protein, putative; protein id:
  misc_feature (1)..(195): Homolog of NCBI NO: 14030687 NR Description: At1g32790 [Arabidopsis thaliana]
  misc_feature (1)..(195): Homolog of NCBI NO: 1174153 NR Description: RNA-binding protein
  misc_feature (1)..(195): Homolog of NCBI NO: 15235177 NR Description: RNA-binding protein RBP37
  misc_feature (1)..(195): Homolog of NCBI NO: 15223304 NR Description: RNA-binding protein, putative
MAQREDVIRRTVYVSDLDQQVTEEQLAGLFVSCGQVVDCRICGDPNSVLRFAFIEFTDEEGAMTALNLSGTMLGFYPVKVLPSKTAIAPVNPTFLPRTEDESEMCARTIYCTNIDKKVTQSDVKIFFEYFCGEVYRLRLLGDYQHSTRIAFVEFVMAESAIAALNCSGVVLGSLPIRVSPSKTPVRPRSPRHPMH

SEQ ID NO: 25613 - protein, 133 aa, Arabidopsis thaliana
  peptide (1)..(133): Ceres Seq. ID no. 12336107
  misc_feature (47)..(116): Pfam Name: RNA recognition motif. (a.k.a. RRM, RBD, or RNP domain) Pfam Description: RNA recognition motif. (a.k.a. RRM, RBD, or RNP
  misc_feature (1)..(109): Homolog of NCBI NO: 34903832 NR Description: ATT4F9_7(AL049523|pid:g4539439) Arabidopsis
  misc_feature (1)..(124): Homolog of NCBI NO: 15238531 NR Description: RNA-binding protein, putative; protein id:
  misc_feature (1)..(116): Homolog of NCBI NO: 8671859 NR Description: Contains similarity to RNA-binding protein from thaliana gi|2129727 and contains RNA recognition PF|00076 domain.
  misc_feature (1)..(131): Homolog of NCBI NO: 15220902 NR Description: RNA-binding protein, putative; protein id:
  misc_feature (1)..(131): Homolog of NCBI NO: 15231858 NR Description: RNA-binding protein, putative; protein id:
  misc_feature (1)..(129): Homolog of NCBI NO: 15229132 NR Description: RNA-binding protein, putative; protein id:
  misc_feature (1)..(133): Homolog of NCBI NO: 14030687 NR Description: At1g32790 [Arabidopsis thaliana]
  misc_feature (1)..(133): Homolog of NCBI NO: 1174153 NR Description: RNA-binding protein
  misc_feature (1)..(133): Homolog of NCBI NO: 15235177 NR Description: RNA-binding protein RBP37
  misc_feature (1)..(133): Homolog of NCBI NO: 15223304 NR Description: RNA-binding protein, putative
MTALNLSGTMLGFYPVKVLPSKTAIAPVNPTFLPRTEDESEMCARTIYCTNIDKKVTQSDVKIFFEYFCGEVYRLRLLGDYQHSTRIAFVEFVMAESAIAALNCSGVVLGSLPIRVSPSKTPVRPRSPRHPMH

SEQ ID NO: 25614 - DNA, 1131 bp, Arabidopsis thaliana
  misc_feature (1)..(1131): Ceres Seq. ID no. 12396409
  misc_feature: MA Experiment ID: 108488 Result: Down-regulated in Transcription
  misc_feature: MA Experiment ID: 108561 Result: Up-regulated in Transcription
  misc_feature: MA Experiment 108561 PARAMETER Experiment Name: At_100uM_ABA_cDNA_P Parameter: Timepoint (hr) Value: 6
  misc_feature: MA Experiment 108561 PARAMETER Experiment Name: At_100uM_ABA_cDNA_P Parameter: Tissue Value: Aerial
  misc_feature: MA Experiment 108561 PARAMETER Experiment Name: At_100uM_ABA_cDNA_P Parameter: Treatment Value: 100uM ABA vs. No Treatment
  misc_feature: MA Experiment ID: 108579 Result: Down-regulated in Transcription
  misc_feature: MA Experiment 108579 PARAMETER Experiment Name: At_4deg_Cold_cDNA_P Parameter: Temperature (deg C) Value: 4 vs. 22
  misc_feature: MA Experiment 108579 PARAMETER Experiment Name: At_4deg_Cold_cDNA_P Parameter: Timepoint (hr) Value: 6
  misc_feature: MA Experiment 108579 PARAMETER Experiment Name: At_4deg_Cold_cDNA_P Parameter: Tissue Value: Aerial
  misc_feature: MA Experiment ID: 108595 Result: Down-regulated in Transcription
  misc_feature: MA Experiment 108595 PARAMETER Experiment Name: At_Ler-pi_Ovule_cDNA_P Parameter: Plant Line Value: null
  misc_feature: MA Experiment ID: 108605 Result: Up-regulated in Transcription
  misc_feature: MA Experiment 108605 PARAMETER Experiment Name: At_100uM_ABA_cDNA_P Parameter: Timepoint (hr) Value: 6
  misc_feature: MA Experiment 108605 PARAMETER Experiment Name: At_100uM_ABA_cDNA_P Parameter: Tissue Value: Aerial
  misc_feature: MA Experiment 108605 PARAMETER Experiment Name: At_100uM_ABA_cDNA_P Parameter: Treatment Value: 100uM ABA vs. No Treatment
  misc_feature: MA Experiment ID: 20000069 Result: Up-regulated in Transcription
  misc_feature: MA Experiment 20000069 PARAMETER Experiment Name: At_100uM_ABA_Mutants_cDNA_P Parameter: Plant Line Value: CS23
  misc_feature: MA Experiment 20000069 PARAMETER Experiment Name: At_100uM_ABA_Mutants_cDNA_P Parameter: Timepoint (hr) Value: 6
  misc_feature: MA Experiment 20000069 PARAMETER Experiment Name: At_100uM_ABA_Mutants_cDNA_P Parameter: Tissue Value: Aerial
  misc_feature: MA Experiment 20000069 PARAMETER Experiment Name: At_100uM_ABA_Mutants_cDNA_P Parameter: Treatment Value: 100uM ABA vs. No Treatment
  misc_feature: MA Experiment ID: 20000070 Result: Up-regulated in Transcription
  misc_feature: MA Experiment 20000070 PARAMETER Experiment Name: At_100uM_ABA_Mutants_cDNA_P Parameter: Plant Line Value: CS24
  misc_feature: MA Experiment 20000070 PARAMETER Experiment Name: At_100uM_ABA_Mutants_cDNA_P Parameter: Timepoint (hr) Value: 6
  misc_feature: MA Experiment 20000070 PARAMETER Experiment Name: At_100uM_ABA_Mutants_cDNA_P Parameter: Tissue Value: Aerial
  misc_feature: MA Experiment 20000070 PARAMETER Experiment Name: At_100uM_ABA_Mutants_cDNA_P Parameter: Treatment Value: 100uM ABA vs. No Treatment
  misc_feature: MA Experiment ID: 20000071 Result: Up-regulated in Transcription
  misc_feature: MA Experiment 20000071 PARAMETER Experiment Name: At_100uM_ABA_Mutants_cDNA_P Parameter: Plant Line Value: CS8104
  misc_feature: MA Experiment 20000071 PARAMETER Experiment Name: At_100uM_ABA_Mutants_cDNA_P Parameter: Timepoint (hr) Value: 6
  misc_feature: MA Experiment 20000071 PARAMETER Experiment Name: At_100uM_ABA_Mutants_cDNA_P Parameter: Tissue Value: Aerial
  misc_feature: MA Experiment 20000071 PARAMETER Experiment Name: At_100uM_ABA_Mutants_cDNA_P Parameter: Treatment Value: 100uM ABA vs. No Treatment
  misc_feature: MA Experiment ID: 20000072 Result: Up-regulated in Transcription
  misc_feature: MA Experiment 20000072 PARAMETER Experiment Name: At_100uM_ABA_Mutants_cDNA_P Parameter: Plant Line Value: CS8105
  misc_feature: MA Experiment 20000072 PARAMETER Experiment Name: At_100uM_ABA_Mutants_cDNA_P Parameter: Timepoint (hr) Value: 6
  misc_feature: MA Experiment 20000072 PARAMETER Experiment Name: At_100uM_ABA_Mutants_cDNA_P Parameter: Tissue Value: Aerial
  misc_feature: MA Experiment 20000072 PARAMETER Experiment Name: At_100uM_ABA_Mutants_cDNA_P Parameter: Treatment Value: 100uM ABA vs. No Treatment
  misc_feature: MA Experiment ID: 20000117 Result: Up-regulated in Transcription
  misc_feature: MA Experiment 20000117 PARAMETER Experiment Name: At_100uM_ABA_Mutants_cDNA_P Parameter: Plant Line Value: Columbia
  misc_feature: MA Experiment 20000117 PARAMETER Experiment Name: At_100uM_ABA_Mutants_cDNA_P Parameter: Timepoint (hr) Value: 6
  misc_feature: MA Experiment 20000117 PARAMETER Experiment Name: At_100uM_ABA_Mutants_cDNA_P Parameter: Tissue Value: Aerial
  misc_feature: MA Experiment 20000117 PARAMETER Experiment Name: At_100uM_ABA_Mutants_cDNA_P Parameter: Treatment Value: 100uM ABA vs. No Treatment
  misc_feature: MA Experiment ID: 20000184 Result: Down-regulated in Transcription
  misc_feature: MA Experiment 20000184 PARAMETER Experiment Name: At_Shoots__P Parameter: Age (day) Value: 7
  misc_feature: MA Experiment 20000184 PARAMETER Experiment Name: At_Shoots__P Parameter: Tissue Value: Shoots vs. Whole Plant
  misc_feature: MA Experiment ID: 20000214 Result: Down-regulated in Transcription
  misc_feature: MA Experiment 20000214 PARAMETER Experiment Name: At_4deg_Cold_P Parameter: Timepoint (hr) Value: 6
  misc_feature: MA Experiment ID: 20000224 Result: Down-regulated in Transcription
  misc_feature: MA Experiment ID: 20000437 Result: Up-regulated in Transcription
  misc_feature: MA Experiment 20000437 PARAMETER Experiment Name: At_Drought_P Parameter: Age (day) Value: 8
  misc_feature: MA Experiment 20000437 PARAMETER Experiment Name: At_Drought_P Parameter: Organism Value: A. thaliana
  misc_feature: MA Experiment 20000437 PARAMETER Experiment Name: At_Drought_P Parameter: Plant Line Value: WS
  misc_feature: MA Experiment 20000437 PARAMETER Experiment Name: At_Drought_P Parameter: Timepoint (hr) Value: 24
  misc_feature: MA Experiment 20000437 PARAMETER Experiment Name: At_Drought_P Parameter: Tissue Value: Whole Plant
  misc_feature: MA Experiment 20000437 PARAMETER Experiment Name: At_Drought_P Parameter: Treatment Value: Drought vs. No Drought
aacaacagataaatttgttggtttcaagtaatatcaatttcccggcgaaatctccaccagagttatgggaatcaccggaagtctaacgccagatcagctcgattttttccactctcaagggtatttggtaatcgaatcgttcgcgagtgaggatgagataagaggcttaaggaagaggatggatgagttgcttaatcagtttgattgttccgtctcctctatcttctccaccaaaaatcagaagcacaccacagataattacttctttgagagcgctgagaaaatctccttcttctttgaagaaaaagcttttggtgatgatgggaaattgaagcaacccaaacaactctctataaacaaagttgggcatgcactgcatgagcttgacccattgtataaggatttcacatattcgtcaaagttttcaagtttggcatcatccttaggttacaggagaccagttgtcatgcagtctatgtatattttcaagcaacctggaattggaggcgaagttgtgccgcaccaagataattcttttgtgtacacggatccacagagttgtactggtctctggattgctcttgaagattctacattagttaatggttgtctttgggcaattcctggatctcataagaatggtttagttagaaggtttatccgtggtgacaacggtataacctttgatcagccatccccatcttacgagcagaaagattttgtgtctattgaaatgaaagcaggctcattgattgccattcatggtgatctaatccatcaaagtttcgagaatctatcctcgaagtcaagacatgcctatagcttacatgtagtagaatctgatggatgtaaatgggcaaaagacaactggatacaaagagcaaaaatgccggagcctctctatgttcttccttgattcaagccagtcgtggaaaaacactgtgagttactgtttatcaaatttcttttaagatcactatctttgtgagaactatgaacagtaataagaacatggctaaaagggccttcttgtgtcgtttacttgttgaaatacaatttgtttcttcttggtctctgtagttctgtctttaaataaccaaactctgtggtcaataaagtgtgacagtgatt

SEQ ID NO: 25615 - protein, 283 aa, Arabidopsis thaliana
  peptide (1)..(283): Ceres Seq. ID no. 12396410
  misc_feature (13)..(251): Pfam Name: Phytanoyl-CoA dioxygenase (PhyH) Pfam Description: Phytanoyl-CoA dioxygenase (PhyH)
  misc_feature (7)..(280): Homolog of NCBI NO: 30802141 NR Description: Similar to hypothetical protein MGC16638 [Homo
  misc_feature (16)..(282): Homolog of NCBI NO: 24645709 NR Description: CG14688-PA [Drosophila melanogaster]
  misc_feature (10)..(280): Homolog of NCBI NO: 17544346 NR Description: Factor of activated T-cells cytoplasmic like
  misc_feature (7)..(280): Homolog of NCBI NO: 12837748 NR Description: unnamed protein product [Mus musculus]
  misc_feature (7)..(280): Homolog of NCBI NO: 25058918 NR Description: Unknown (protein for MGC:49146) [Mus musculus]
  misc_feature (1)..(281): Homolog of NCBI NO: 34853210 NR Description: similar to hypothetical protein MGC49146 [Rattus
  misc_feature (5)..(280): Homolog of NCBI NO: 13937293 NR Description: putative LN1 protein [Oryza sativa]
  misc_feature (1)..(192): Homolog of NCBI NO: 25410910 NR Description: hypothetical protein At2g01490 [imported] -
  misc_feature (1)..(283): Homolog of NCBI NO: 21593659 NR Description: unknown [Arabidopsis thaliana]
  misc_feature (1)..(283): Homolog of NCBI NO: 18379234 NR Description: expressed protein
MGITGSLTPDQLDFFHSQGYLVIESFASEDEIRGLRKRMDELLNQFDCSVSSIFSTKNQKHTTDNYFFESAEKISFFFEEKAFGDDGKLKQPKQLSINKVGHALHELDPLYKDFTYSSKFSSLASSLGYRRPVVMQSMYIFKQPGIGGEVVPHQDNSFVYTDPQSCTGLWIALEDSTLVNGCLWAIPGSHKNGLVRRFIRGDNGITFDQPSPSYEQKDFVSIEMKAGSLIAIHGDLIHQSFENLSSKSRHAYSLHVVESDGCKWAKDNWIQRAKMPEPLYVLP

SEQ ID NO: 25616 - protein, 245 aa, Arabidopsis thaliana
  peptide (1)..(245): Ceres Seq. ID no. 12396411
  misc_feature (1)..(213): Pfam Name: Phytanoyl-CoA dioxygenase (PhyH) Pfam Description: Phytanoyl-CoA dioxygenase (PhyH)
  misc_feature (1)..(242): Homolog of NCBI NO: 30802141 NR Description: Similar to hypothetical protein MGC16638 [Homo
  misc_feature (1)..(244): Homolog of NCBI NO: 24645709 NR Description: CG14688-PA [Drosophila melanogaster]
  misc_feature (1)..(242): Homolog of NCBI NO: 17544346 NR Description: Factor of activated T-cells cytoplasmic like
  misc_feature (1)..(242): Homolog of NCBI NO: 12837748 NR Description: unnamed protein product [Mus musculus]
  misc_feature (1)..(242): Homolog of NCBI NO: 25058918 NR Description: Unknown (protein for MGC:49146) [Mus musculus]
  misc_feature (1)..(243): Homolog of NCBI NO: 34853210 NR Description: similar to hypothetical protein MGC49146 [Rattus
  misc_feature (1)..(242): Homolog of NCBI NO: 13937293 NR Description: putative LN1 protein [Oryza sativa]
  misc_feature (1)..(154): Homolog of NCBI NO: 25410910 NR Description: hypothetical protein At2g01490 [imported] -
  misc_feature (1)..(245): Homolog of NCBI NO: 21593659 NR Description: unknown [Arabidopsis thaliana]
  misc_feature (1)..(245): Homolog of NCBI NO: 18379234 NR Description: expressed protein
MDELLNQFDCSVSSIFSTKNQKHTTDNYFFESAEKISFFFEEKAFGDDGKLKQPKQLSINKVGHALHELDPLYKDFTYSSKFSSLASSLGYRRPVVMQSMYIFKQPGIGGEVVPHQDNSFVYTDPQSCTGLWIALEDSTLVNGCLWAIPGSHKNGLVRRFIRGDNGITFDQPSPSYEQKDFVSIEMKAGSLIAIHGDLIHQSFENLSSKSRHAYSLHVVESDGCKWAKDNWIQRAKMPEPLYVLP

SEQ ID NO: 25617 - protein, 149 aa, Arabidopsis thaliana
  peptide (1)..(149): Ceres Seq. ID no. 12396412
  misc_feature (1)..(117): Pfam Name: Phytanoyl-CoA dioxygenase (PhyH) Pfam Description: Phytanoyl-CoA dioxygenase (PhyH)
  misc_feature (1)..(146): Homolog of NCBI NO: 30802141 NR Description: Similar to hypothetical protein MGC16638 [Homo
  misc_feature (1)..(148): Homolog of NCBI NO: 24645709 NR Description: CG14688-PA [Drosophila melanogaster]
  misc_feature (1)..(146): Homolog of NCBI NO: 17544346 NR Description: Factor of activated T-cells cytoplasmic like
  misc_feature (1)..(146): Homolog of NCBI NO: 12837748 NR Description: unnamed protein product [Mus musculus]
  misc_feature (1)..(146): Homolog of NCBI NO: 25058918 NR Description: Unknown (protein for MGC:49146) [Mus musculus]
  misc_feature (1)..(147): Homolog of NCBI NO: 34853210 NR Description: similar to hypothetical protein MGC49146 [Rattus
  misc_feature (1)..(146): Homolog of NCBI NO: 13937293 NR Description: putative LN1 protein [Oryza sativa]
  misc_feature (1)..(58): Homolog of NCBI NO: 25410910 NR Description: hypothetical protein At2g01490 [imported] -
  misc_feature (1)..(149): Homolog of NCBI NO: 21593659 NR Description: unknown [Arabidopsis thaliana]
  misc_feature (1)..(149): Homolog of NCBI NO: 18379234 NR Description: expressed protein
MQSMYIFKQPGIGGEVVPHQDNSFVYTDPQSCTGLWIALEDSTLVNGCLWAIPGSHKNGLVRRFIRGDNGITFDQPSPSYEQKDFVSIEMKAGSLIAIHGDLIHQSFENLSSKSRHAYSLHVVESDGCKWAKDNWIQRAKMPEPLYVLP

SEQ ID NO: 25618 - DNA, 1284 bp, Arabidopsis thaliana
  misc_feature (1)..(1284): Ceres Seq. ID no. 13487713
  misc_feature: MA Experiment ID: 108434 Result: Down-regulated in Transcription
  misc_feature: MA Experiment 108434 PARAMETER Experiment Name: At_Root_Tips_cDNA_P Parameter: Tissue Value: Root Tips
  misc_feature: MA Experiment ID: 108488 Result: Up-regulated in Transcription
  misc_feature: MA Experiment ID: 108569 Result: Up-regulated in Transcription
  misc_feature: MA Experiment 108569 PARAMETER Experiment Name: At_0.001%_MeJA__cDNA_P Parameter: Timepoint (hr) Value: 6
  misc_feature: MA Experiment 108569 PARAMETER Experiment Name: At_0.001%_MeJA__cDNA_P Parameter: Tissue Value: Aerial
  misc_feature: MA Experiment 108569 PARAMETER Experiment Name: At_0.001%_MeJA__cDNA_P Parameter: Treatment Value: 0.001% MeJA vs. No Treatment
  misc_feature: MA Experiment ID: 108573 Result: Down-regulated in Transcription
  misc_feature: MA Experiment 108573 PARAMETER Experiment Name: At_Drought_cDNA_P Parameter: Timepoint (hr) Value: 6
  misc_feature: MA Experiment 108573 PARAMETER Experiment Name: At_Drought_cDNA_P Parameter: Tissue Value: Aerial
  misc_feature: MA Experiment 108573 PARAMETER Experiment Name: At_Drought_cDNA_P Parameter: Treatment Value: Drought vs. No Drought
  misc_feature: MA Experiment ID: 108576 Result: Down-regulated in Transcription
  misc_feature: MA Experiment 108576 PARAMETER Experiment Name: At_42deg_Heat_cDNA_P Parameter: Temperature (deg C) Value: 42 vs. 22
  misc_feature: MA Experiment 108576 PARAMETER Experiment Name: At_42deg_Heat_cDNA_P Parameter: Timepoint (hr) Value: 1
  misc_feature: MA Experiment 108576 PARAMETER Experiment Name: At_42deg_Heat_cDNA_P Parameter: Tissue Value: Aerial
  misc_feature: MA Experiment ID: 108577 Result: Down-regulated in Transcription
  misc_feature: MA Experiment 108577 PARAMETER Experiment Name: At_42deg_Heat_cDNA_P Parameter: Temperature (deg C) Value: 42 vs. 22
  misc_feature: MA Experiment 108577 PARAMETER Experiment Name: At_42deg_Heat_cDNA_P Parameter: Timepoint (hr) Value: 6
  misc_feature: MA Experiment 108577 PARAMETER Experiment Name: At_42deg_Heat_cDNA_P Parameter: Tissue Value: Aerial
  misc_feature: MA Experiment ID: 108585 Result: Down-regulated in Transcription
  misc_feature: MA Experiment 108585 PARAMETER Experiment Name: At_5mM_NaNP_cDNA_P Parameter: Timepoint (hr) Value: 6
  misc_feature: MA Experiment 108585 PARAMETER Experiment Name: At_5mM_NaNP_cDNA_P Parameter: Tissue Value: Aerial
  misc_feature: MA Experiment 108585 PARAMETER Experiment Name: At_5mM_NaNP_cDNA_P Parameter: Treatment Value: null
  misc_feature: MA Experiment ID: 108595 Result: Down-regulated in Transcription
  misc_feature: MA Experiment 108595 PARAMETER Experiment Name: At_Ler-pi_Ovule_cDNA_P Parameter: Plant Line Value: null
  misc_feature: MA Experiment ID: 108668 Result: Down-regulated in Transcription
  misc_feature: MA Experiment 108668 PARAMETER Experiment Name: At_2mM_SA_cDNA_P Parameter: Plant Line Value: WS
  misc_feature: MA Experiment 108668 PARAMETER Experiment Name: At_2mM_SA_cDNA_P Parameter: Timepoint (hr) Value: 6
  misc_feature: MA Experiment 108668 PARAMETER Experiment Name: At_2mM_SA_cDNA_P Parameter: Treatment Value: 2mM SA vs. No Treatment
  misc_feature: MA Experiment ID: 20000090 Result: Down-regulated in Transcription
  misc_feature: MA Experiment ID: 20000112 Result: Down-regulated in Transcription
  misc_feature: MA Experiment 20000112 PARAMETER Experiment Name: At_42deg_Heat_cDNA_P Parameter: Temperature (deg C) Value: 42 vs. 22
  misc_feature: MA Experiment 20000112 PARAMETER Experiment Name: At_42deg_Heat_cDNA_P Parameter: Timepoint (hr) Value: 2
  misc_feature: MA Experiment 20000112 PARAMETER Experiment Name: At_42deg_Heat_cDNA_P Parameter: Tissue Value: Aerial
  misc_feature: MA Experiment ID: 20000113 Result: Down-regulated in Transcription
  misc_feature: MA Experiment 20000113 PARAMETER Experiment Name: At_42deg_Heat_cDNA_P Parameter: Temperature (deg C) Value: 42 vs. 22
  misc_feature: MA Experiment 20000113 PARAMETER Experiment Name: At_42deg_Heat_cDNA_P Parameter: Timepoint (hr) Value: 8
  misc_feature: MA Experiment 20000113 PARAMETER Experiment Name: At_42deg_Heat_cDNA_P Parameter: Tissue Value: Aerial
  misc_feature: MA Experiment ID: 20000171 Result: Down-regulated in Transcription
  misc_feature: MA Experiment 20000171 PARAMETER Experiment Name: At_42deg_Heat_P Parameter: Age (day) Value: 14
  misc_feature: MA Experiment 20000171 PARAMETER Experiment Name: At_42deg_Heat_P Parameter: Organism Value: A. thaliana
  misc_feature: MA Experiment 20000171 PARAMETER Experiment Name: At_42deg_Heat_P Parameter: Plant Line Value: WS
  misc_feature: MA Experiment 20000171 PARAMETER Experiment Name: At_42deg_Heat_P Parameter: Temperature (deg C) Value: 42 vs. 22
  misc_feature: MA Experiment 20000171 PARAMETER Experiment Name: At_42deg_Heat_P Parameter: Timepoint (hr) Value: 1
  misc_feature: MA Experiment 20000171 PARAMETER Experiment Name: At_42deg_Heat_P Parameter: Tissue Value: Aerial
  misc_feature: MA Experiment ID: 20000173 Result: Down-regulated in Transcription
  misc_feature: MA Experiment 20000173 PARAMETER Experiment Name: At_42deg_Heat_P Parameter: Age (day) Value: 14
  misc_feature: MA Experiment 20000173 PARAMETER Experiment Name: At_42deg_Heat_P Parameter: Organism Value: A. thaliana
  misc_feature: MA Experiment 20000173 PARAMETER Experiment Name: At_42deg_Heat_P Parameter: Plant Line Value: WS
  misc_feature: MA Experiment 20000173 PARAMETER Experiment Name: At_42deg_Heat_P Parameter: Temperature (deg C) Value: 42 vs. 22
  misc_feature: MA Experiment 20000173 PARAMETER Experiment Name: At_42deg_Heat_P Parameter: Timepoint (hr) Value: 6
  misc_feature: MA Experiment 20000173 PARAMETER Experiment Name: At_42deg_Heat_P Parameter: Tissue Value: Aerial
  misc_feature: MA Experiment ID: 20000182 Result: Down-regulated in Transcription
  misc_feature: MA Experiment 20000182 PARAMETER Experiment Name: At_2mM_SA_P Parameter: Age (day) Value: 14
  misc_feature: MA Experiment 20000182 PARAMETER Experiment Name: At_2mM_SA_P Parameter: Organism Value: A. thaliana
  misc_feature: MA Experiment 20000182 PARAMETER Experiment Name: At_2mM_SA_P Parameter: Plant Line Value: WS
  misc_feature: MA Experiment 20000182 PARAMETER Experiment Name: At_2mM_SA_P Parameter: Timepoint (hr) Value: 6
  misc_feature: MA Experiment 20000182 PARAMETER Experiment Name: At_2mM_SA_P Parameter: Tissue Value: Aerial
  misc_feature: MA Experiment 20000182 PARAMETER Experiment Name: At_2mM_SA_P Parameter: Treatment Value: 2mM SA vs. No Treatment
  misc_feature: MA Experiment ID: 20000224 Result: Up-regulated in Transcription
  misc_feature: MA Experiment ID: 20000265 Result: Down-regulated in Transcription
  misc_feature: MA Experiment 20000265 PARAMETER Experiment Name: At_Open_Flower_P Parameter: Age (day) Value: 21
  misc_feature: MA Experiment 20000265 PARAMETER Experiment Name: At_Open_Flower_P Parameter: Plant Line Value: WS
  misc_feature: MA Experiment 20000265 PARAMETER Experiment Name: At_Open_Flower_P Parameter: Tissue Value: Closed Flower vs. Whole Plant
  misc_feature: MA Experiment ID: 20000437 Result: Down-regulated in Transcription
  misc_feature: MA Experiment 20000437 PARAMETER Experiment Name: At_Drought_P Parameter: Age (day) Value: 8
  misc_feature: MA Experiment 20000437 PARAMETER Experiment Name: At_Drought_P Parameter: Organism Value: A. thaliana
  misc_feature: MA Experiment 20000437 PARAMETER Experiment Name: At_Drought_P Parameter: Plant Line Value: WS
  misc_feature: MA Experiment 20000437 PARAMETER Experiment Name: At_Drought_P Parameter: Timepoint (hr) Value: 24
  misc_feature: MA Experiment 20000437 PARAMETER Experiment Name: At_Drought_P Parameter: Tissue Value: Whole Plant
  misc_feature: MA Experiment 20000437 PARAMETER Experiment Name: At_Drought_P Parameter: Treatment Value: Drought vs. No Drought
  misc_feature: MA Experiment ID: 20000495 Result: Up-regulated in Transcription
  misc_feature: MA Experiment 20000495 PARAMETER Experiment Name: At_Guard_Cells_P Parameter: Harvest Date Value: 8/2/2002
  misc_feature: MA Experiment 20000495 PARAMETER Experiment Name: At_Guard_Cells_P Parameter: Organism Value: A. thaliana
  misc_feature: MA Experiment 20000495 PARAMETER Experiment Name: At_Guard_Cells_P Parameter: Tissue Value: Guard Cells vs. Leaves
  misc_feature: MA Experiment ID: 20001247 Result: Down-regulated in Transcription
  misc_feature: MA Experiment 20001247 PARAMETER Experiment Name: At_Far-red-induction_P Parameter: Age (day) Value: 7
  misc_feature: MA Experiment 20001247 PARAMETER Experiment Name: At_Far-red-induction_P Parameter: Light Value: Far-red vs. White
  misc_feature: MA Experiment 20001247 PARAMETER Experiment Name: At_Far-red-induction_P Parameter: Organism Value: A. thaliana
  misc_feature: MA Experiment 20001247 PARAMETER Experiment Name: At_Far-red-induction_P Parameter: Plant Line Value: Columbia
  misc_feature: MA Experiment 20001247 PARAMETER Experiment Name: At_Far-red-induction_P Parameter: Timepoint (hr) Value: 1
  misc_feature: MA Experiment 20001247 PARAMETER Experiment Name: At_Far-red-induction_P Parameter: Tissue Value: Whole Plant
  misc_feature: MA Experiment ID: 20001248 Result: Down-regulated in Transcription
  misc_feature: MA Experiment 20001248 PARAMETER Experiment Name: At_Far-red-induction_P Parameter: Age (day) Value: 7
  misc_feature: MA Experiment 20001248 PARAMETER Experiment Name: At_Far-red-induction_P Parameter: Light Value: Far-red vs. White
  misc_feature: MA Experiment 20001248 PARAMETER Experiment Name: At_Far-red-induction_P Parameter: Organism Value: A. thaliana
  misc_feature: MA Experiment 20001248 PARAMETER Experiment Name: At_Far-red-induction_P Parameter: Plant Line Value: Columbia
  misc_feature: MA Experiment 20001248 PARAMETER Experiment Name: At_Far-red-induction_P Parameter: Timepoint (hr) Value: 4
  misc_feature: MA Experiment 20001248 PARAMETER Experiment Name: At_Far-red-induction_P Parameter: Tissue Value: Whole Plant
  misc_feature: MA Experiment ID: 20001450 Result: Down-regulated in Transcription
  misc_feature: MA Experiment 20001450 PARAMETER Experiment Name: At_Far-red-induction_P Parameter: Age (day) Value: 7
  misc_feature: MA Experiment 20001450 PARAMETER Experiment Name: At_Far-red-induction_P Parameter: Light Value: Far-red vs. White
  misc_feature: MA Experiment 20001450 PARAMETER Experiment Name: At_Far-red-induction_P Parameter: Organism Value: A. thaliana
  misc_feature: MA Experiment 20001450 PARAMETER Experiment Name: At_Far-red-induction_P Parameter: Plant Line Value: Columbia
  misc_feature: MA Experiment 20001450 PARAMETER Experiment Name: At_Far-red-induction_P Parameter: Timepoint (hr) Value: 8
  misc_feature: MA Experiment 20001450 PARAMETER Experiment Name: At_Far-red-induction_P Parameter: Tissue Value: Whole Plant
  misc_feature: MA Experiment ID: 20001451 Result: Down-regulated in Transcription
  misc_feature: MA Experiment 20001451 PARAMETER Experiment Name: At_Far-red-induction_P Parameter: Age (day) Value: 7
  misc_feature: MA Experiment 20001451 PARAMETER Experiment Name: At_Far-red-induction_P Parameter: Light Value: Far-red vs. White
  misc_feature: MA Experiment 20001451 PARAMETER Experiment Name: At_Far-red-induction_P Parameter: Organism Value: A. thaliana
  misc_feature: MA Experiment 20001451 PARAMETER Experiment Name: At_Far-red-induction_P Parameter: Plant Line Value: Columbia
  misc_feature: MA Experiment 20001451 PARAMETER Experiment Name: At_Far-red-induction_P Parameter: Timepoint (hr) Value: 24
  misc_feature: MA Experiment 20001451 PARAMETER Experiment Name: At_Far-red-induction_P Parameter: Tissue Value: Whole Plant
  misc_feature: MA Experiment ID: 20001457 Result: Down-regulated in Transcription
  misc_feature: MA Experiment 20001457 PARAMETER Experiment Name: At_50mM_NH4NO3_L-to-H_P Parameter: Age (day) Value: Undefined
  misc_feature: MA Experiment 20001457 PARAMETER Experiment Name: At_50mM_NH4NO3_L-to-H_P Parameter: Organism Value: Undefined
  misc_feature: MA Experiment 20001457 PARAMETER Experiment Name: At_50mM_NH4NO3_L-to-H_P Parameter: Plant Line Value: Undefined
  misc_feature: MA Experiment 20001457 PARAMETER Experiment Name: At_50mM_NH4NO3_L-to-H_P Parameter: Timepoint (hr) Value: 0.5
  misc_feature: MA Experiment 20001457 PARAMETER Experiment Name: At_50mM_NH4NO3_L-to-H_P Parameter: Tissue Value: Siliques
  misc_feature: MA Experiment 20001457 PARAMETER Experiment Name: At_50mM_NH4NO3_L-to-H_P Parameter: Treatment Value: 50mM NH4NO3 vs. 100mM Manitol
  misc_feature: MA Experiment ID: 20001905 Result: Down-regulated in Transcription
  misc_feature: MA Experiment 20001905 PARAMETER Experiment Name: At_Drought_Reproduction_P Parameter: Age (day) Value: 40
  misc_feature: MA Experiment 20001905 PARAMETER Experiment Name: At_Drought_Reproduction_P Parameter: Organism Value: A. thaliana
  misc_feature: MA Experiment 20001905 PARAMETER Experiment Name: At_Drought_Reproduction_P Parameter: Plant Line Value: WS
  misc_feature: MA Experiment 20001905 PARAMETER Experiment Name: At_Drought_Reproduction_P Parameter: Timepoint (day) Value: 10
  misc_feature: MA Experiment 20001905 PARAMETER Experiment Name: At_Drought_Reproduction_P Parameter: Tissue Value: Rosettes
  misc_feature: MA Experiment 20001905 PARAMETER Experiment Name: At_Drought_Reproduction_P Parameter: Treatment Value: Drought vs. No Drought
aaaagccaatctgatctttgtccaaacacagaccatcatcactcatttcctacagaactcagcacaattctttcaaattctctttctaatcttcaatggaatcagaaaccctaaccgccaaggctacgatcacgaccacgaccctaccgagtcacgacgagaccaagacagaatcaacagagttcgagaaaaatcaaaaacggtatcaagacctcatctccacgtttcctcacgagaaaggctggagaccgaaagagcccctgatcgagtatggtggttactggtggctaccgtctctcctcgaaggttgtattcacgcgcaagagttctttcaagcacgacccagtgacttcctcgtctgtagctacccaaagacaggcaccacttggctcaaagccctgactttcgccatcgcaaatcgttcccgcttcgatgattcctccaaccctctcctgaaacgtaaccctcacgagtttgttccttacattgagatagatttccctttcttccctgaagttgatgttctcaaagacaaagggaacactctgttttcgactcatatcccatacgagttattacctgattcggttgtgaaatccggttgtaagatggtttacatatggagagaaccaaaggacactttcatctccatgtggactttccttcacaaggaaaggacagagcttggacctgtcagcaatcttgaggagtcttttgatatgttctgtcgtggtctgtctgggtatggtccttatcttaatcatatcctggcgtattggaaagcataccaagagaatccagataggatcttgttcctcaagtacgagacgatgagagctgatcctttaccgtacgtgaagagtctggctgagtttatgggtcatggattcacagccgaggaagaggagaaaggtgttgttgagaaagtggtgaatctttgcagcttcgagacgttgaagaatcttgaagctaacaaaggggagaaagacagagaggatcgtcctggtgtttacgcgaatagcgcgtatttcaggaaaggaaaggtgggagattggtcgaactatctgactccggagatggctgctcgtatagatgggttaatggaagagaaatttaagggcaccggcttgcttgaacatggtaaatgaatgactaactcttgttccgagcaatgactgatctttatatgctttgtttacaacataagtttgcttcttatgttagtatggctccaatgtattaagttatatagtggaagaataaatgttgcttgtgtttctatcc

SEQ ID NO: 25619 - protein, 350 aa, Arabidopsis thaliana
  peptide (1)..(350): Ceres Seq. ID no. 13487714
  misc_feature (83)..(344): Pfam Name: Sulfotransferase domain Pfam Description: Sulfotransferase domain
  misc_feature (40)..(345): Homolog of NCBI NO: 15230602 NR Description: sulfotransferase family [Arabidopsis thaliana]
  misc_feature (38)..(346): Homolog of NCBI NO: 4321096 NR Description: flavonol 3-sulfotransferase [Flaveria
  misc_feature (38)..(346): Homolog of NCBI NO: 1706918 NR Description: FLAVONOL SULFOTRANSFERASE-LIKE
  misc_feature (24)..(346): Homolog of NCBI NO: 285286 NR Description: flavonol 4'-sulfotransferase - Flaveria
  misc_feature (24)..(346): Homolog of NCBI NO: 1706740 NR Description: FLAVONOL 4'-SULFOTRANSFERASE (F4-ST)
  misc_feature (26)..(348): Homolog of NCBI NO: 15221131 NR Description: sulfotransferase family [Arabidopsis thaliana]
  misc_feature (26)..(348): Homolog of NCBI NO: 21593087 NR Description: putative flavonol sulfotransferase [Arabidopsis
  misc_feature (1)..(346): Homolog of NCBI NO: 15221820 NR Description: sulfotransferase family [Arabidopsis thaliana]
  misc_feature (1)..(350): Homolog of NCBI NO: 21593660 NR Description: putative flavonol sulfotransferase [Arabidopsis
  misc_feature (1)..(350): Homolog of NCBI NO: 15221130 NR Description: sulfotransferase family [Arabidopsis thaliana]
MESETLTAKATITTTTLPSHDETKTESTEFEKNQKRYQDLISTFPHEKGWRPKEPLIEYGGYWWLPSLLEGCIHAQEFFQARPSDFLVCSYPKTGTTWLKALTFAIANRSRFDDSSNPLLKRNPHEFVPYIEIDFPFFPEVDVLKDKGNTLFSTHIPYELLPDSVVKSGCKMVYIWREPKDTFISMWTFLHKERTELGPVSNLEESFDMFCRGLSGYGPYLNHILAYWKAYQENPDRILFLKYETMRADPLPYVKSLAEFMGHGFTAEEEEKGVVEKVVNLCSFETLKNLEANKGEKDREDRPGVYANSAYFRKGKVGDWSNYLTPEMAARIDGLMEEKFKGTGLLEHGK

SEQ ID NO: 25620 - protein, 179 aa, Arabidopsis thaliana
  peptide (1)..(179): Ceres Seq. ID no. 13487715
  misc_feature (1)..(173): Pfam Name: Sulfotransferase domain Pfam Description: Sulfotransferase domain
  misc_feature (1)..(174): Homolog of NCBI NO: 15230602 NR Description: sulfotransferase family [Arabidopsis thaliana]
  misc_feature (1)..(175): Homolog of NCBI NO: 4321096 NR Description: flavonol 3-sulfotransferase [Flaveria
  misc_feature (1)..(175): Homolog of NCBI NO: 1706918 NR Description: FLAVONOL SULFOTRANSFERASE-LIKE
  misc_feature (1)..(175): Homolog of NCBI NO: 285286 NR Description: flavonol 4'-sulfotransferase - Flaveria
  misc_feature (1)..(175): Homolog of NCBI NO: 1706740 NR Description: FLAVONOL 4'-SULFOTRANSFERASE (F4-ST)
  misc_feature (1)..(177): Homolog of NCBI NO: 15221131 NR Description: sulfotransferase family [Arabidopsis thaliana]
  misc_feature (1)..(177): Homolog of NCBI NO: 21593087 NR Description: putative flavonol sulfotransferase [Arabidopsis
  misc_feature (1)..(175): Homolog of NCBI NO: 15221820 NR Description: sulfotransferase family [Arabidopsis thaliana]
  misc_feature (1)..(179): Homolog of NCBI NO: 21593660 NR Description: putative flavonol sulfotransferase [Arabidopsis
  misc_feature (1)..(179): Homolog of NCBI NO: 15221130 NR Description: sulfotransferase family [Arabidopsis thaliana]
MVYIWREPKDTFISMWTFLHKERTELGPVSNLEESFDMFCRGLSGYGPYLNHILAYWKAYQENPDRILFLKYETMRADPLPYVKSLAEFMGHGFTAEEEEKGVVEKVVNLCSFETLKNLEANKGEKDREDRPGVYANSAYFRKGKVGDWSNYLTPEMAARIDGLMEEKFKGTGLLEHGK

SEQ ID NO: 25621 - DNA, 1303 bp, Arabidopsis thaliana
  misc_feature (1)..(1303): Ceres Seq. ID no. 12605177
  misc_feature: MA Experiment ID: 20000182 Result: Up-regulated in Transcription
  misc_feature: MA Experiment 20000182 PARAMETER Experiment Name: At_2mM_SA_P Parameter: Age (day) Value: 14
  misc_feature: MA Experiment 20000182 PARAMETER Experiment Name: At_2mM_SA_P Parameter: Organism Value: A. thaliana
  misc_feature: MA Experiment 20000182 PARAMETER Experiment Name: At_2mM_SA_P Parameter: Plant Line Value: WS
  misc_feature: MA Experiment 20000182 PARAMETER Experiment Name: At_2mM_SA_P Parameter: Timepoint (hr) Value: 6
  misc_feature: MA Experiment 20000182 PARAMETER Experiment Name: At_2mM_SA_P Parameter: Tissue Value: Aerial
  misc_feature: MA Experiment 20000182 PARAMETER Experiment Name: At_2mM_SA_P Parameter: Treatment Value: 2mM SA vs. No Treatment
  misc_feature: MA Experiment ID: 20000184 Result: Down-regulated in Transcription
  misc_feature: MA Experiment 20000184 PARAMETER Experiment Name: At_Shoots__P Parameter: Age (day) Value: 7
  misc_feature: MA Experiment 20000184 PARAMETER Experiment Name: At_Shoots__P Parameter: Tissue Value: Shoots vs. Whole Plant
  misc_feature: MA Experiment ID: 20000214 Result: Down-regulated in Transcription
  misc_feature: MA Experiment 20000214 PARAMETER Experiment Name: At_4deg_Cold_P Parameter: Timepoint (hr) Value: 6
  misc_feature: MA Experiment ID: 20000264 Result: Down-regulated in Transcription
  misc_feature: MA Experiment 20000264 PARAMETER Experiment Name: At_Open_Flower_P Parameter: Age (day) Value: 21
  misc_feature: MA Experiment 20000264 PARAMETER Experiment Name: At_Open_Flower_P Parameter: Plant Line Value: WS
  misc_feature: MA Experiment 20000264 PARAMETER Experiment Name: At_Open_Flower_P Parameter: Tissue Value: Open Flower vs. Whole Plant
  misc_feature: MA Experiment ID: 20000286 Result: Down-regulated in Transcription
  misc_feature: MA Experiment 20000286 PARAMETER Experiment Name: At_Open_Flower_P Parameter: Age (day) Value: 21
  misc_feature: MA Experiment 20000286 PARAMETER Experiment Name: At_Open_Flower_P Parameter: Plant Line Value: WS
  misc_feature: MA Experiment 20000286 PARAMETER Experiment Name: At_Open_Flower_P Parameter: Tissue Value: Half Open vs. Whole Plant
  misc_feature: MA Experiment ID: 20000438 Result: Down-regulated in Transcription
  misc_feature: MA Experiment 20000438 PARAMETER Experiment Name: At_Shoots__P Parameter: Age (day) Value: 14
  misc_feature: MA Experiment 20000438 PARAMETER Experiment Name: At_Shoots__P Parameter: Tissue Value: Shoots vs. Whole Plant
actacacacacctaacgcgaaacctctacgtttcttcgtcttcgcgactcgtgagattgttgtaatcacagttcgggaaagacttaacatttaagatttacgggtttgtttgatcgattagtctcatctgggtttttctccaagttaaattctttgtttctgagatggatcaagcttcgtcttcttcgactatggaggaagacaagaagtcttccactgatcctgtgaatgtcgatgataacgaggagagagaagctatagagattgctctgttccaagtgcctgaatgctatgtttatttgatacctccaaggaaaaccgcagcttcgtacagagcagatgagtgggacgtgaacaaatgggcatgggaaggagctttgaaagtggtgagcaaaggagaagaatgcattataaaactagtagataaaaccacaggggaactttacgctcaggcatttctaagagagggggaacttcatcctgtagaagcagtaatcgacagtagcagatattttgttctccgtgttgaagaaaagatagatggtcgtgttcgacatgcttttatcggactcggattccgggaaagaacagaagcatatgatttccaagcagcactacatgaccatatgaagtatttgaacaagaagaaaacagcagaagaaatggaacaacactatcagaacacttcatccgttgattacagcttaaaggaaggagaaaccattgttctccaactcaaaaatagaagcgataaagacagcaagtcaaaaacggtagagaagagtctgggcaatctctcgttggaggataaaggcaagtcaatagaaaccaccattccttcaatcatcctgccacctccacctccgggaccgctttcccctgtcacaactgctcagaagtccccgtcaagtctgccgccaagcctcagcctccaaagatcgtctgaacaacaagatttagatacaaagcgagaagaagaagaagaagagaagaaagaagacctaaaagccaaagatggaggggttgaagatgcaccagatgatgactttggagatttccaagctgcgggttgatttaaacttataatcttttttaccatacacaaagatcgttttataagtaatgtgactgatcaaagtttggattgtttgctactgagagcttatcttctgtacaattccaaaatacaagcctatttctctgaacttgtgattagatagacaaaactctaaaggtttcattttctccatatacagatatgagctttgcaagagaaacatcagataaatatcaaaaaattcgc

SEQ ID NO: 25622 - protein, 302 aa, Arabidopsis thaliana
  peptide (1)..(302): Ceres Seq. ID no. 12605178
  misc_feature (27)..(225): Homolog of NCBI NO: 13384758 NR Description: RIKEN cDNA 1110005F07 [Mus musculus]
  misc_feature (28)..(253): Homolog of NCBI NO: 8922416 NR Description: hypothetical protein FLJ10420 [Homo sapiens]
  misc_feature (21)..(238): Homolog of NCBI NO: 18379172 NR Description: Expressed protein
  misc_feature (21)..(238): Homolog of NCBI NO: 14596175 NR Description: Unknown protein [Arabidopsis thaliana]
  misc_feature (28)..(263): Homolog of NCBI NO: 10435511 NR Description: unnamed protein product [Homo sapiens]
  misc_feature (27)..(270): Homolog of NCBI NO: 37535352 NR Description: unknown protein [Oryza sativa (japonica
  misc_feature (16)..(117): Homolog of NCBI NO: 34912642 NR Description: P0410E01.25 [Oryza sativa (japonica
  misc_feature (1)..(302): Homolog of NCBI NO: 11280689 NR Description: hypothetical protein F14P22.190 - Arabidopsis
  misc_feature (10)..(302): Homolog of NCBI NO: 21555074 NR Description: unknown [Arabidopsis thaliana]
  misc_feature (1)..(302): Homolog of NCBI NO: 18410992 NR Description: putative protein; protein id: At3g58600.1,
MDQASSSSTMEEDKKSSTDPVNVDDNEEREAIEIALFQVPECYVYLIPPRKTAASYRADEWDVNKWAWEGALKVVSKGEECIIKLVDKTTGELYAQAFLREGELHPVEAVIDSSRYFVLRVEEKIDGRVRHAFIGLGFRERTEAYDFQAALHDHMKYLNKKKTAEEMEQHYQNTSSVDYSLKEGETIVLQLKNRSDKDSKSKTVEKSLGNLSLEDKGKSIETTIPSIILPPPPPGPLSPVTTAQKSPSSLPPSLSLQRSSEQQDLDTKREEEEEEKKEDLKAKDGGVEDAPDDDFGDFQAAG

SEQ ID NO: 25623 - protein, 293 aa, Arabidopsis thaliana
  peptide (1)..(293): Ceres Seq. ID no. 12605179
  misc_feature (18)..(216): Homolog of NCBI NO: 13384758 NR Description: RIKEN cDNA 1110005F07 [Mus musculus]
  misc_feature (19)..(244): Homolog of NCBI NO: 8922416 NR Description: hypothetical protein FLJ10420 [Homo sapiens]
  misc_feature (12)..(229): Homolog of NCBI NO: 18379172 NR Description: Expressed protein
  misc_feature (12)..(229): Homolog of NCBI NO: 14596175 NR Description: Unknown protein [Arabidopsis thaliana]
  misc_feature (19)..(254): Homolog of NCBI NO: 10435511 NR Description: unnamed protein product [Homo sapiens]
  misc_feature (18)..(261): Homolog of NCBI NO: 37535352 NR Description: unknown protein [Oryza sativa (japonica
  misc_feature (7)..(108): Homolog of NCBI NO: 34912642 NR Description: P0410E01.25 [Oryza sativa (japonica
  misc_feature (1)..(293): Homolog of NCBI NO: 11280689 NR Description: hypothetical protein F14P22.190 - Arabidopsis
  misc_feature (1)..(293): Homolog of NCBI NO: 21555074 NR Description: unknown [Arabidopsis thaliana]
  misc_feature (1)..(293): Homolog of NCBI NO: 18410992 NR Description: putative protein; protein id: At3g58600.1,
MEEDKKSSTDPVNVDDNEEREAIEIALFQVPECYVYLIPPRKTAASYRADEWDVNKWAWEGALKVVSKGEECIIKLVDKTTGELYAQAFLREGELHPVEAVIDSSRYFVLRVEEKIDGRVRHAFIGLGFRERTEAYDFQAALHDHMKYLNKKKTAEEMEQHYQNTSSVDYSLKEGETIVLQLKNRSDKDSKSKTVEKSLGNLSLEDKGKSIETTIPSIILPPPPPGPLSPVTTAQKSPSSLPPSLSLQRSSEQQDLDTKREEEEEEKKEDLKAKDGGVEDAPDDDFGDFQAAG

SEQ ID NO: 25624 - DNA, 1180 bp, Arabidopsis thaliana
  misc_feature (1)..(1180): Ceres Seq. ID no. 12334043
  misc_feature: MA Experiment ID: 108461 Result: Up-regulated in Transcription
  misc_feature: MA Experiment 108461 PARAMETER Experiment Name: At_Germinating_Seeds_cDNA_P Parameter: Age (day) Value: 1 vs. 0
  misc_feature: MA Experiment 108461 PARAMETER Experiment Name: At_Germinating_Seeds_cDNA_P Parameter: Tissue Value: Germinating Seeds
  misc_feature: MA Experiment ID: 108595 Result: Down-regulated in Transcription
  misc_feature: MA Experiment 108595 PARAMETER Experiment Name: At_Ler-pi_Ovule_cDNA_P Parameter: Plant Line Value: null
  misc_feature: MA Experiment ID: 20000069 Result: Up-regulated in Transcription
  misc_feature: MA Experiment 20000069 PARAMETER Experiment Name: At_100uM_ABA_Mutants_cDNA_P Parameter: Plant Line Value: CS23
  misc_feature: MA Experiment 20000069 PARAMETER Experiment Name: At_100uM_ABA_Mutants_cDNA_P Parameter: Timepoint (hr) Value: 6
  misc_feature: MA Experiment 20000069 PARAMETER Experiment Name: At_100uM_ABA_Mutants_cDNA_P Parameter: Tissue Value: Aerial
  misc_feature: MA Experiment 20000069 PARAMETER Experiment Name: At_100uM_ABA_Mutants_cDNA_P Parameter: Treatment Value: 100uM ABA vs. No Treatment
  misc_feature: MA Experiment ID: 20000070 Result: Up-regulated in Transcription
  misc_feature: MA Experiment 20000070 PARAMETER Experiment Name: At_100uM_ABA_Mutants_cDNA_P Parameter: Plant Line Value: CS24
  misc_feature: MA Experiment 20000070 PARAMETER Experiment Name: At_100uM_ABA_Mutants_cDNA_P Parameter: Timepoint (hr) Value: 6
  misc_feature: MA Experiment 20000070 PARAMETER Experiment Name: At_100uM_ABA_Mutants_cDNA_P Parameter: Tissue Value: Aerial
  misc_feature: MA Experiment 20000070 PARAMETER Experiment Name: At_100uM_ABA_Mutants_cDNA_P Parameter: Treatment Value: 100uM ABA vs. No Treatment
  misc_feature: MA Experiment ID: 20000071 Result: Up-regulated in Transcription
  misc_feature: MA Experiment 20000071 PARAMETER Experiment Name: At_100uM_ABA_Mutants_cDNA_P Parameter: Plant Line Value: CS8104
  misc_feature: MA Experiment 20000071 PARAMETER Experiment Name: At_100uM_ABA_Mutants_cDNA_P Parameter: Timepoint (hr) Value: 6
  misc_feature: MA Experiment 20000071 PARAMETER Experiment Name: At_100uM_ABA_Mutants_cDNA_P Parameter: Tissue Value: Aerial
  misc_feature: MA Experiment 20000071 PARAMETER Experiment Name: At_100uM_ABA_Mutants_cDNA_P Parameter: Treatment Value: 100uM ABA vs. No Treatment
  misc_feature: MA Experiment ID: 20000089 Result: Up-regulated in Transcription
  misc_feature: MA Experiment ID: 20000117 Result: Up-regulated in Transcription
  misc_feature: MA Experiment 20000117 PARAMETER Experiment Name: At_100uM_ABA_Mutants_cDNA_P Parameter: Plant Line Value: Columbia
  misc_feature: MA Experiment 20000117 PARAMETER Experiment Name: At_100uM_ABA_Mutants_cDNA_P Parameter: Timepoint (hr) Value: 6
  misc_feature: MA Experiment 20000117 PARAMETER Experiment Name: At_100uM_ABA_Mutants_cDNA_P Parameter: Tissue Value: Aerial
  misc_feature: MA Experiment 20000117 PARAMETER Experiment Name: At_100uM_ABA_Mutants_cDNA_P Parameter: Treatment Value: 100uM ABA vs. No Treatment
  misc_feature: MA Experiment ID: 20000180 Result: Up-regulated in Transcription
  misc_feature: MA Experiment 20000180 PARAMETER Experiment Name: At_Germinating_Seeds_P Parameter: Age (hr) Value: 24 vs. 0
  misc_feature: MA Experiment 20000180 PARAMETER Experiment Name: At_Germinating_Seeds_P Parameter: Tissue Value: Germinating Seeds
  misc_feature: MA Experiment ID: 20000184 Result: Down-regulated in Transcription
  misc_feature: MA Experiment 20000184 PARAMETER Experiment Name: At_Shoots__P Parameter: Age (day) Value: 7
  misc_feature: MA Experiment 20000184 PARAMETER Experiment Name: At_Shoots__P Parameter: Tissue Value: Shoots vs. Whole Plant
  misc_feature: MA Experiment ID: 20000227 Result: Up-regulated in Transcription
  misc_feature: MA Experiment 20000227 PARAMETER Experiment Name: At_Root-Tips-vs-Tops_P Parameter: Tissue Value: Root Tips vs. Root Tops
  misc_feature: MA Experiment ID: 20001451 Result: Down-regulated in Transcription
  misc_feature: MA Experiment 20001451 PARAMETER Experiment Name: At_Far-red-induction_P Parameter: Age (day) Value: 7
  misc_feature: MA Experiment 20001451 PARAMETER Experiment Name: At_Far-red-induction_P Parameter: Light Value: Far-red vs. White
  misc_feature: MA Experiment 20001451 PARAMETER Experiment Name: At_Far-red-induction_P Parameter: Organism Value: A. thaliana
  misc_feature: MA Experiment 20001451 PARAMETER Experiment Name: At_Far-red-induction_P Parameter: Plant Line Value: Columbia
  misc_feature: MA Experiment 20001451 PARAMETER Experiment Name: At_Far-red-induction_P Parameter: Timepoint (hr) Value: 24
  misc_feature: MA Experiment 20001451 PARAMETER Experiment Name: At_Far-red-induction_P Parameter: Tissue Value: Whole Plant
  misc_feature: MA Experiment ID: 20001905 Result: Down-regulated in Transcription
  misc_feature: MA Experiment 20001905 PARAMETER Experiment Name: At_Drought_Reproduction_P Parameter: Age (day) Value: 40
  misc_feature: MA Experiment 20001905 PARAMETER Experiment Name: At_Drought_Reproduction_P Parameter: Organism Value: A. thaliana
  misc_feature: MA Experiment 20001905 PARAMETER Experiment Name: At_Drought_Reproduction_P Parameter: Plant Line Value: WS
  misc_feature: MA Experiment 20001905 PARAMETER Experiment Name: At_Drought_Reproduction_P Parameter: Timepoint (day) Value: 10
  misc_feature: MA Experiment 20001905 PARAMETER Experiment Name: At_Drought_Reproduction_P Parameter: Tissue Value: Rosettes
  misc_feature: MA Experiment 20001905 PARAMETER Experiment Name: At_Drought_Reproduction_P Parameter: Treatment Value: Drought vs. No Drought
acactgagaaactctcaatctgagcagatatttacccaatcagggattcaggaagagaagcagagaaagaaatggagataacactgaacagtggcttcaagatgccgatcgtcggcttaggagtatggagaatggagaaggaagggattcgagaccttatcctcaatgccatcaagatcggctatcgccatctcgactgtgctgctgattataggaatgagaccgaagttggtgatgctcttacagaagcattcaagactggtctggttaagagggaggatctcttcattacaaccaagctatggaattcagaccatggccatgtcattgaggcctgcaaagacagtctcaagaaacttcaacttgattacctcgatctcttcctcgttcattttcccgtagcaacgaaacacaccggagtagggacaaccgatagtgctttgggcgatgacggggtattggacatagacacgaccatctctctggaaactacatggcacgacatggaaaagcttgtttctatgggtttagtccgcagcattggaatcagtaactatgatgtctttctaacgagagattgcttggcttactccaagatcaaacctgctgtgaatcagatcgagacacatccttacttccaacgtgattctcttgtcaaattctgccagaaacatggtatctgtgtcactgctcatactcctctcggaggtgccacagccaatgccgagtggtttggcaccgtgtcatgcctggatgatccagttctcaaagatgtggccgagaagtacaaaaagacagtggcacaagttgtcctgaggtggggaatccagagaaaaacggtggtgataccaaagacatcaaagcctgcgagattggaagagaactttcaggttttcgacttcgaactatcgaaagaggacatggaagtgatcaaaagcatggagaggaaataccgcacgaaccaaccagccaagttttggaacattgatctctacgcttgatcacactctctctatctacatgaataaatgaagcttaagaagataaacaacgagaagaagccatagctttacctgaaacattctcaaatgtttgtgagcctatctttcatacataaactcatgttgttaaacagattatgatttcttaagtactacaatatcacacattgatggaaagt

SEQ ID NO: 25625 - protein, 309 aa, Arabidopsis thaliana
  peptide (1)..(309): Ceres Seq. ID no. 12334044
  misc_feature (45)..(307): Homolog of NCBI NO: 19310922 NR Description: NADP dependent sorbitol 6-phosphate dehydrogenase
  misc_feature (45)..(309): Homolog of NCBI NO: 19310926 NR Description: NADP dependent sorbitol 6-phosphate dehydrogenase
  misc_feature (45)..(309): Homolog of NCBI NO: 19310934 NR Description: NADP dependent sorbitol 6-phosphate dehydrogenase
  misc_feature (3)..(309): Homolog of NCBI NO: 134153 NR Description: NADP-dependent D-sorbitol-6-phosphate
  misc_feature (1)..(309): Homolog of NCBI NO: 1835701 NR Description: NADPH-dependent mannose 6-phosphate reductase
  misc_feature (1)..(309): Homolog of NCBI NO: 10334991 NR Description: NADPH-dependent mannose 6-phosphate reductase
  misc_feature (1)..(309): Homolog of NCBI NO: 21554266 NR Description: putative NADPH dependent mannose 6-phosphate
  misc_feature (1)..(309): Homolog of NCBI NO: 15226502 NR Description: mannose 6-phosphate reductase (NADPH-dependent),
  misc_feature (1)..(309): Homolog of NCBI NO: 21592829 NR Description: putative NADPH dependent mannose 6-phosphate
  misc_feature (1)..(309): Homolog of NCBI NO: 15226489 NR Description: mannose 6-phosphate reductase (NADPH-dependent),
MEITLNSGFKMPIVGLGVWRMEKEGIRDLILNAIKIGYRHLDCAADYRNETEVGDALTEAFKTGLVKREDLFITTKLWNSDHGHVIEACKDSLKKLQLDYLDLFLVHFPVATKHTGVGTTDSALGDDGVLDIDTTISLETTWHDMEKLVSMGLVRSIGISNYDVFLTRDCLAYSKIKPAVNQIETHPYFQRDSLVKFCQKHGICVTAHTPLGGATANAEWFGTVSCLDDPVLKDVAEKYKKTVAQVVLRWGIQRKTVVIPKTSKPARLEENFQVFDFELSKEDMEVIKSMERKYRTNQPAKFWNIDLYA

SEQ ID NO: 25626 - protein, 299 aa, Arabidopsis thaliana
  peptide (1)..(299): Ceres Seq. ID no. 12334045
  misc_feature (35)..(297): Homolog of NCBI NO: 19310922 NR Description: NADP dependent sorbitol 6-phosphate dehydrogenase
  misc_feature (35)..(299): Homolog of NCBI NO: 19310926 NR Description: NADP dependent sorbitol 6-phosphate dehydrogenase
  misc_feature (35)..(299): Homolog of NCBI NO: 19310934 NR Description: NADP dependent sorbitol 6-phosphate dehydrogenase
  misc_feature (1)..(299): Homolog of NCBI NO: 134153 NR Description: NADP-dependent D-sorbitol-6-phosphate
  misc_feature (1)..(299): Homolog of NCBI NO: 1835701 NR Description: NADPH-dependent mannose 6-phosphate reductase
  misc_feature (1)..(299): Homolog of NCBI NO: 10334991 NR Description: NADPH-dependent mannose 6-phosphate reductase
  misc_feature (1)..(299): Homolog of NCBI NO: 21554266 NR Description: putative NADPH dependent mannose 6-phosphate
  misc_feature (1)..(299): Homolog of NCBI NO: 15226502 NR Description: mannose 6-phosphate reductase (NADPH-dependent),
  misc_feature (1)..(299): Homolog of NCBI NO: 21592829 NR Description: putative NADPH dependent mannose 6-phosphate
  misc_feature (1)..(299): Homolog of NCBI NO: 15226489 NR Description: mannose 6-phosphate reductase (NADPH-dependent),
MPIVGLGVWRMEKEGIRDLILNAIKIGYRHLDCAADYRNETEVGDALTEAFKTGLVKREDLFITTKLWNSDHGHVIEACKDSLKKLQLDYLDLFLVHFPVATKHTGVGTTDSALGDDGVLDIDTTISLETTWHDMEKLVSMGLVRSIGISNYDVFLTRDCLAYSKIKPAVNQIETHPYFQRDSLVKFCQKHGICVTAHTPLGGATANAEWFGTVSCLDDPVLKDVAEKYKKTVAQVVLRWGIQRKTVVIPKTSKPARLEENFQVFDFELSKEDMEVIKSMERKYRTNQPAKFWNIDLYA

SEQ ID NO: 25627 - protein, 289 aa, Arabidopsis thaliana
  peptide (1)..(289): Ceres Seq. ID no. 12334046
  misc_feature (25)..(287): Homolog of NCBI NO: 19310922 NR Description: NADP dependent sorbitol 6-phosphate dehydrogenase
  misc_feature (25)..(289): Homolog of NCBI NO: 19310926 NR Description: NADP dependent sorbitol 6-phosphate dehydrogenase
  misc_feature (25)..(289): Homolog of NCBI NO: 19310934 NR Description: NADP dependent sorbitol 6-phosphate dehydrogenase
  misc_feature (1)..(289): Homolog of NCBI NO: 134153 NR Description: NADP-dependent D-sorbitol-6-phosphate
  misc_feature (1)..(289): Homolog of NCBI NO: 1835701 NR Description: NADPH-dependent mannose 6-phosphate reductase
  misc_feature (1)..(289): Homolog of NCBI NO: 10334991 NR Description: NADPH-dependent mannose 6-phosphate reductase
  misc_feature (1)..(289): Homolog of NCBI NO: 21554266 NR Description: putative NADPH dependent mannose 6-phosphate
  misc_feature (1)..(289): Homolog of NCBI NO: 15226502 NR Description: mannose 6-phosphate reductase (NADPH-dependent),
  misc_feature (1)..(289): Homolog of NCBI NO: 21592829 NR Description: putative NADPH dependent mannose 6-phosphate
  misc_feature (1)..(289): Homolog of NCBI NO: 15226489 NR Description: mannose 6-phosphate reductase (NADPH-dependent),
MEKEGIRDLILNAIKIGYRHLDCAADYRNETEVGDALTEAFKTGLVKREDLFITTKLWNSDHGHVIEACKDSLKKLQLDYLDLFLVHFPVATKHTGVGTTDSALGDDGVLDIDTTISLETTWHDMEKLVSMGLVRSIGISNYDVFLTRDCLAYSKIKPAVNQIETHPYFQRDSLVKFCQKHGICVTAHTPLGGATANAEWFGTVSCLDDPVLKDVAEKYKKTVAQVVLRWGIQRKTVVIPKTSKPARLEENFQVFDFELSKEDMEVIKSMERKYRTNQPAKFWNIDLYA

SEQ ID NO: 25628 - DNA, 1626 bp, Arabidopsis thaliana
  misc_feature (1)..(1626): Ceres Seq. ID no. 13491969
  misc_feature: MA Experiment ID: 108433 Result: Up-regulated in Transcription
  misc_feature: MA Experiment 108433 PARAMETER Experiment Name: At_rhl_Mutant2_cDNA_P Parameter: Age (day) Value: 7
  misc_feature: MA Experiment 108433 PARAMETER Experiment Name: At_rhl_Mutant2_cDNA_P Parameter: Organism Value: A. thaliana
  misc_feature: MA Experiment 108433 PARAMETER Experiment Name: At_rhl_Mutant2_cDNA_P Parameter: Plant Line Value: rhl Mutant vs. wt landsburg
  misc_feature: MA Experiment 108433 PARAMETER Experiment Name: At_rhl_Mutant2_cDNA_P Parameter: Tissue Value: Roots
  misc_feature: MA Experiment ID: 108461 Result: Up-regulated in Transcription
  misc_feature: MA Experiment 108461 PARAMETER Experiment Name: At_Germinating_Seeds_cDNA_P Parameter: Age (day) Value: 1 vs. 0
  misc_feature: MA Experiment 108461 PARAMETER Experiment Name: At_Germinating_Seeds_cDNA_P Parameter: Tissue Value: Germinating Seeds
  misc_feature: MA Experiment ID: 108462 Result: Up-regulated in Transcription
  misc_feature: MA Experiment 108462 PARAMETER Experiment Name: At_Germinating_Seeds_cDNA_P Parameter: Age (day) Value: 2 vs. 0
  misc_feature: MA Experiment 108462 PARAMETER Experiment Name: At_Germinating_Seeds_cDNA_P Parameter: Tissue Value: Germinating Seeds
  misc_feature: MA Experiment ID: 108463 Result: Up-regulated in Transcription
  misc_feature: MA Experiment 108463 PARAMETER Experiment Name: At_Germinating_Seeds_cDNA_P Parameter: Age (day) Value: 3 vs. 0
  misc_feature: MA Experiment 108463 PARAMETER Experiment Name: At_Germinating_Seeds_cDNA_P Parameter: Tissue Value: Germinating Seeds
  misc_feature: MA Experiment ID: 108464 Result: Up-regulated in Transcription
  misc_feature: MA Experiment 108464 PARAMETER Experiment Name: At_Germinating_Seeds_cDNA_P Parameter: Age (day) Value: 4 vs. 0
  misc_feature: MA Experiment 108464 PARAMETER Experiment Name: At_Germinating_Seeds_cDNA_P Parameter: Tissue Value: Germinating Seeds
  misc_feature: MA Experiment ID: 108501 Result: Up-regulated in Transcription
  misc_feature: MA Experiment 108501 PARAMETER Experiment Name: At_ap2_floral_buds_cDNA_P Parameter: Plant Line Value: ap2 (Ler.)
  misc_feature: MA Experiment 108501 PARAMETER Experiment Name: At_ap2_floral_buds_cDNA_P Parameter: Tissue Value: Closed Flower
  misc_feature: MA Experiment ID: 108561 Result: Up-regulated in Transcription
  misc_feature: MA Experiment 108561 PARAMETER Experiment Name: At_100uM_ABA_cDNA_P Parameter: Timepoint (hr) Value: 6
  misc_feature: MA Experiment 108561 PARAMETER Experiment Name: At_100uM_ABA_cDNA_P Parameter: Tissue Value: Aerial
  misc_feature: MA Experiment 108561 PARAMETER Experiment Name: At_100uM_ABA_cDNA_P Parameter: Treatment Value: 100uM ABA vs. No Treatment
  misc_feature: MA Experiment ID: 108569 Result: Up-regulated in Transcription
  misc_feature: MA Experiment 108569 PARAMETER Experiment Name: At_0.001%_MeJA__cDNA_P Parameter: Timepoint (hr) Value: 6
  misc_feature: MA Experiment 108569 PARAMETER Experiment Name: At_0.001%_MeJA__cDNA_P Parameter: Tissue Value: Aerial
  misc_feature: MA Experiment 108569 PARAMETER Experiment Name: At_0.001%_MeJA__cDNA_P Parameter: Treatment Value: 0.001% MeJA vs. No Treatment
  misc_feature: MA Experiment ID: 108573 Result: Up-regulated in Transcription
  misc_feature: MA Experiment 108573 PARAMETER Experiment Name: At_Drought_cDNA_P Parameter: Timepoint (hr) Value: 6
  misc_feature: MA Experiment 108573 PARAMETER Experiment Name: At_Drought_cDNA_P Parameter: Tissue Value: Aerial
  misc_feature: MA Experiment 108573 PARAMETER Experiment Name: At_Drought_cDNA_P Parameter: Treatment Value: Drought vs. No Drought
  misc_feature: MA Experiment ID: 108605 Result: Up-regulated in Transcription
  misc_feature: MA Experiment 108605 PARAMETER Experiment Name: At_100uM_ABA_cDNA_P Parameter: Timepoint (hr) Value: 6
  misc_feature: MA Experiment 108605 PARAMETER Experiment Name: At_100uM_ABA_cDNA_P Parameter: Tissue Value: Aerial
  misc_feature: MA Experiment 108605 PARAMETER Experiment Name: At_100uM_ABA_cDNA_P Parameter: Treatment Value: 100uM ABA vs. No Treatment
  misc_feature: MA Experiment ID: 108668 Result: Down-regulated in Transcription
  misc_feature: MA Experiment 108668 PARAMETER Experiment Name: At_2mM_SA_cDNA_P Parameter: Plant Line Value: WS
  misc_feature: MA Experiment 108668 PARAMETER Experiment Name: At_2mM_SA_cDNA_P Parameter: Timepoint (hr) Value: 6
  misc_feature: MA Experiment 108668 PARAMETER Experiment Name: At_2mM_SA_cDNA_P Parameter: Treatment Value: 2mM SA vs. No Treatment
  misc_feature: MA Experiment ID: 20000071 Result: Up-regulated in Transcription
  misc_feature: MA Experiment 20000071 PARAMETER Experiment Name: At_100uM_ABA_Mutants_cDNA_P Parameter: Plant Line Value: CS8104
  misc_feature: MA Experiment 20000071 PARAMETER Experiment Name: At_100uM_ABA_Mutants_cDNA_P Parameter: Timepoint (hr) Value: 6
  misc_feature: MA Experiment 20000071 PARAMETER Experiment Name: At_100uM_ABA_Mutants_cDNA_P Parameter: Tissue Value: Aerial
  misc_feature: MA Experiment 20000071 PARAMETER Experiment Name: At_100uM_ABA_Mutants_cDNA_P Parameter: Treatment Value: 100uM ABA vs. No Treatment
  misc_feature: MA Experiment ID: 20000087 Result: Down-regulated in Transcription
  misc_feature: MA Experiment 20000087 PARAMETER Experiment Name: At_100uM_ABA_Mutants_cDNA_P Parameter: Plant Line Value: WS
  misc_feature: MA Experiment 20000087 PARAMETER Experiment Name: At_100uM_ABA_Mutants_cDNA_P Parameter: Timepoint (hr) Value: 6
  misc_feature: MA Experiment 20000087 PARAMETER Experiment Name: At_100uM_ABA_Mutants_cDNA_P Parameter: Tissue Value: Aerial
  misc_feature: MA Experiment 20000087 PARAMETER Experiment Name: At_100uM_ABA_Mutants_cDNA_P Parameter: Treatment Value: 100uM ABA vs. No Treatment
  misc_feature: MA Experiment ID: 20000111 Result: Down-regulated in Transcription
  misc_feature: MA Experiment 20000111 PARAMETER Experiment Name: At_42deg_Heat_cDNA_P Parameter: Temperature (deg C) Value: 42 vs. 22
  misc_feature: MA Experiment 20000111 PARAMETER Experiment Name: At_42deg_Heat_cDNA_P Parameter: Timepoint (hr) Value: 6
  misc_feature: MA Experiment 20000111 PARAMETER Experiment Name: At_42deg_Heat_cDNA_P Parameter: Tissue Value: Aerial
  misc_feature: MA Experiment ID: 20000113 Result: Down-regulated in Transcription
  misc_feature: MA Experiment 20000113 PARAMETER Experiment Name: At_42deg_Heat_cDNA_P Parameter: Temperature (deg C) Value: 42 vs. 22
  misc_feature: MA Experiment 20000113 PARAMETER Experiment Name: At_42deg_Heat_cDNA_P Parameter: Timepoint (hr) Value: 8
  misc_feature: MA Experiment 20000113 PARAMETER Experiment Name: At_42deg_Heat_cDNA_P Parameter: Tissue Value: Aerial
  misc_feature: MA Experiment ID: 20000169 Result: Up-regulated in Transcription
  misc_feature: MA Experiment 20000169 PARAMETER Experiment Name: At_100uM_ABA_P Parameter: Age (day) Value: 14
  misc_feature: MA Experiment 20000169 PARAMETER Experiment Name: At_100uM_ABA_P Parameter: Organism Value: A. thaliana
  misc_feature: MA Experiment 20000169 PARAMETER Experiment Name: At_100uM_ABA_P Parameter: Plant Line Value: WS
  misc_feature: MA Experiment 20000169 PARAMETER Experiment Name: At_100uM_ABA_P Parameter: Timepoint (hr) Value: 6
  misc_feature: MA Experiment 20000169 PARAMETER Experiment Name: At_100uM_ABA_P Parameter: Tissue Value: Aerial
  misc_feature: MA Experiment 20000169 PARAMETER Experiment Name: At_100uM_ABA_P Parameter: Treatment Value: 100uM ABA vs. No Treatment
  misc_feature: MA Experiment ID: 20000173 Result: Down-regulated in Transcription
  misc_feature: MA Experiment 20000173 PARAMETER Experiment Name: At_42deg_Heat_P Parameter: Age (day) Value: 14
  misc_feature: MA Experiment 20000173 PARAMETER Experiment Name: At_42deg_Heat_P Parameter: Organism Value: A. thaliana
  misc_feature: MA Experiment 20000173 PARAMETER Experiment Name: At_42deg_Heat_P Parameter: Plant Line Value: WS
  misc_feature: MA Experiment 20000173 PARAMETER Experiment Name: At_42deg_Heat_P Parameter: Temperature (deg C) Value: 42 vs. 22
  misc_feature: MA Experiment 20000173 PARAMETER Experiment Name: At_42deg_Heat_P Parameter: Timepoint (hr) Value: 6
  misc_feature: MA Experiment 20000173 PARAMETER Experiment Name: At_42deg_Heat_P Parameter: Tissue Value: Aerial
  misc_feature: MA Experiment ID: 20000179 Result: Up-regulated in Transcription
  misc_feature: MA Experiment 20000179 PARAMETER Experiment Name: At_Germinating_Seeds_P Parameter: Age (hr) Value: 6 vs. 0
  misc_feature: MA Experiment 20000179 PARAMETER Experiment Name: At_Germinating_Seeds_P Parameter: Tissue Value: Germinating Seeds
  misc_feature: MA Experiment ID: 20000180 Result: Up-regulated in Transcription
  misc_feature: MA Experiment 20000180 PARAMETER Experiment Name: At_Germinating_Seeds_P Parameter: Age (hr) Value: 24 vs. 0
  misc_feature: MA Experiment 20000180 PARAMETER Experiment Name: At_Germinating_Seeds_P Parameter: Tissue Value: Germinating Seeds
  misc_feature: MA Experiment ID: 20000184 Result: Down-regulated in Transcription
  misc_feature: MA Experiment 20000184 PARAMETER Experiment Name: At_Shoots__P Parameter: Age (day) Value: 7
  misc_feature: MA Experiment 20000184 PARAMETER Experiment Name: At_Shoots__P Parameter: Tissue Value: Shoots vs. Whole Plant
  misc_feature: MA Experiment ID: 20000227 Result: Up-regulated in Transcription
  misc_feature: MA Experiment 20000227 PARAMETER Experiment Name: At_Root-Tips-vs-Tops_P Parameter: Tissue Value: Root Tips vs. Root Tops
  misc_feature: MA Experiment ID: 20000234 Result: Up-regulated in Transcription
  misc_feature: MA Experiment 20000234 PARAMETER Experiment Name: At_Siliques_P Parameter: Age (day) Value: 21
  misc_feature: MA Experiment 20000234 PARAMETER Experiment Name: At_Siliques_P Parameter: Organism Value: A. thaliana
  misc_feature: MA Experiment 20000234 PARAMETER Experiment Name: At_Siliques_P Parameter: Plant Line Value: WS
  misc_feature: MA Experiment 20000234 PARAMETER Experiment Name: At_Siliques_P Parameter: Tissue Value: Less Than 5mm Siliques vs. Whole Plant
  misc_feature: MA Experiment ID: 20000235 Result: Up-regulated in Transcription
  misc_feature: MA Experiment 20000235 PARAMETER Experiment Name: At_Siliques_P Parameter: Age (day) Value: 21
  misc_feature: MA Experiment 20000235 PARAMETER Experiment Name: At_Siliques_P Parameter: Organism Value: A. thaliana
  misc_feature: MA Experiment 20000235 PARAMETER Experiment Name: At_Siliques_P Parameter: Plant Line Value: WS
  misc_feature: MA Experiment 20000235 PARAMETER Experiment Name: At_Siliques_P Parameter: Tissue Value: 5-10mm Siliques vs. Whole Plant
  misc_feature: MA Experiment ID: 20000264 Result: Up-regulated in Transcription
  misc_feature: MA Experiment 20000264 PARAMETER Experiment Name: At_Open_Flower_P Parameter: Age (day) Value: 21
  misc_feature: MA Experiment 20000264 PARAMETER Experiment Name: At_Open_Flower_P Parameter: Plant Line Value: WS
  misc_feature: MA Experiment 20000264 PARAMETER Experiment Name: At_Open_Flower_P Parameter: Tissue Value: Open Flower vs. Whole Plant
  misc_feature: MA Experiment ID: 20000265 Result: Up-regulated in Transcription
  misc_feature: MA Experiment 20000265 PARAMETER Experiment Name: At_Open_Flower_P Parameter: Age (day) Value: 21
  misc_feature: MA Experiment 20000265 PARAMETER Experiment Name: At_Open_Flower_P Parameter: Plant Line Value: WS
  misc_feature: MA Experiment 20000265 PARAMETER Experiment Name: At_Open_Flower_P Parameter: Tissue Value: Closed Flower vs. Whole Plant
  misc_feature: MA Experiment ID: 20000286 Result: Up-regulated in Transcription
  misc_feature: MA Experiment 20000286 PARAMETER Experiment Name: At_Open_Flower_P Parameter: Age (day) Value: 21
  misc_feature: MA Experiment 20000286 PARAMETER Experiment Name: At_Open_Flower_P Parameter: Plant Line Value: WS
  misc_feature: MA Experiment 20000286 PARAMETER Experiment Name: At_Open_Flower_P Parameter: Tissue Value: Half Open vs. Whole Plant
  misc_feature: MA Experiment ID: 20000451 Result: Down-regulated in Transcription
  misc_feature: MA Experiment 20000451 PARAMETER Experiment Name: At_CS6879_Shoots-Roots_P Parameter: Age (day) Value: 14
  misc_feature: MA Experiment 20000451 PARAMETER Experiment Name: At_CS6879_Shoots-Roots_P Parameter: Organism Value: A. thaliana
  misc_feature: MA Experiment 20000451 PARAMETER Experiment Name: At_CS6879_Shoots-Roots_P Parameter: Plant Line Value: CS6879 vs. WS
  misc_feature: MA Experiment 20000451 PARAMETER Experiment Name: At_CS6879_Shoots-Roots_P Parameter: Tissue Value: Roots
  misc_feature: MA Experiment ID: 20000453 Result: Up-regulated in Transcription
  misc_feature: MA Experiment 20000453 PARAMETER Experiment Name: At_100uM_ABA_P Parameter: Age (day) Value: 15
  misc_feature: MA Experiment 20000453 PARAMETER Experiment Name: At_100uM_ABA_P Parameter: Organism Value: A. thaliana
  misc_feature: MA Experiment 20000453 PARAMETER Experiment Name: At_100uM_ABA_P Parameter: Plant Line Value: WS
  misc_feature: MA Experiment 20000453 PARAMETER Experiment Name: At_100uM_ABA_P Parameter: Timepoint (hr) Value: 24
  misc_feature: MA Experiment 20000453 PARAMETER Experiment Name: At_100uM_ABA_P Parameter: Tissue Value: Aerial
  misc_feature: MA Experiment 20000453 PARAMETER Experiment Name: At_100uM_ABA_P Parameter: Treatment Value: 100uM ABA vs. No Treatment
  misc_feature: MA Experiment ID: 20000794 Result: Up-regulated in Transcription
  misc_feature: MA Experiment 20000794 PARAMETER Experiment Name: At_Petals_P Parameter: Age (day) Value: 23-25 days
  misc_feature: MA Experiment 20000794 PARAMETER Experiment Name: At_Petals_P Parameter: Plant Line Value: WS
  misc_feature: MA Experiment 20000794 PARAMETER Experiment Name: At_Petals_P Parameter: Tissue Value: Petals vs. Whole plant
  misc_feature: MA Experiment ID: 20001248 Result: Down-regulated in Transcription
  misc_feature: MA Experiment 20001248 PARAMETER Experiment Name: At_Far-red-induction_P Parameter: Age (day) Value: 7
  misc_feature: MA Experiment 20001248 PARAMETER Experiment Name: At_Far-red-induction_P Parameter: Light Value: Far-red vs. White
  misc_feature: MA Experiment 20001248 PARAMETER Experiment Name: At_Far-red-induction_P Parameter: Organism Value: A. thaliana
  misc_feature: MA Experiment 20001248 PARAMETER Experiment Name: At_Far-red-induction_P Parameter: Plant Line Value: Columbia
  misc_feature: MA Experiment 20001248 PARAMETER Experiment Name: At_Far-red-induction_P Parameter: Timepoint (hr) Value: 4
  misc_feature: MA Experiment 20001248 PARAMETER Experiment Name: At_Far-red-induction_P Parameter: Tissue Value: Whole Plant
  misc_feature: MA Experiment ID: 20001554 Result: Up-regulated in Transcription
  misc_feature: MA Experiment 20001554 PARAMETER Experiment Name: At_Drought_Soil_Dry_P Parameter: Age (day) Value: 21
  misc_feature: MA Experiment 20001554 PARAMETER Experiment Name: At_Drought_Soil_Dry_P Parameter: Organism Value: A. thaliana
  misc_feature: MA Experiment 20001554 PARAMETER Experiment Name: At_Drought_Soil_Dry_P Parameter: Plant Line Value: WS
  misc_feature: MA Experiment 20001554 PARAMETER Experiment Name: At_Drought_Soil_Dry_P Parameter: Post Timepoint (hr) Value: None
  misc_feature: MA Experiment 20001554 PARAMETER Experiment Name: At_Drought_Soil_Dry_P Parameter: Post-Treatment Value: None
  misc_feature: MA Experiment 20001554 PARAMETER Experiment Name: At_Drought_Soil_Dry_P Parameter: Timepoint (day) Value: 7
  misc_feature: MA Experiment 20001554 PARAMETER Experiment Name: At_Drought_Soil_Dry_P Parameter: Treatment Value: Drought vs. No Drought
  misc_feature: MA Experiment ID: 20001555 Result: Up-regulated in Transcription
  misc_feature: MA Experiment 20001555 PARAMETER Experiment Name: At_Drought_Soil_Dry_P Parameter: Age (day) Value: 24
  misc_feature: MA Experiment 20001555 PARAMETER Experiment Name: At_Drought_Soil_Dry_P Parameter: Organism Value: A. thaliana
  misc_feature: MA Experiment 20001555 PARAMETER Experiment Name: At_Drought_Soil_Dry_P Parameter: Plant Line Value: WS
  misc_feature: MA Experiment 20001555 PARAMETER Experiment Name: At_Drought_Soil_Dry_P Parameter: Post Timepoint (hr) Value: None
  misc_feature: MA Experiment 20001555 PARAMETER Experiment Name: At_Drought_Soil_Dry_P Parameter: Post-Treatment Value: None
  misc_feature: MA Experiment 20001555 PARAMETER Experiment Name: At_Drought_Soil_Dry_P Parameter: Timepoint (day) Value: 10
  misc_feature: MA Experiment 20001555 PARAMETER Experiment Name: At_Drought_Soil_Dry_P Parameter: Treatment Value: Drought vs. No Drought
  misc_feature: MA Experiment ID: 20001557 Result: Down-regulated in Transcription
  misc_feature: MA Experiment 20001557 PARAMETER Experiment Name: At_Drought_Soil_Dry_P Parameter: Age (day) Value: 27
  misc_feature: MA Experiment 20001557 PARAMETER Experiment Name: At_Drought_Soil_Dry_P Parameter: Organism Value: A. thaliana
  misc_feature: MA Experiment 20001557 PARAMETER Experiment Name: At_Drought_Soil_Dry_P Parameter: Plant Line Value: WS
  misc_feature: MA Experiment 20001557 PARAMETER Experiment Name: At_Drought_Soil_Dry_P Parameter: Post Timepoint (hr) Value: 3
  misc_feature: MA Experiment 20001557 PARAMETER Experiment Name: At_Drought_Soil_Dry_P Parameter: Post-Treatment Value: Re-Water vs. No Drought
  misc_feature: MA Experiment 20001557 PARAMETER Experiment Name: At_Drought_Soil_Dry_P Parameter: Timepoint (day) Value: 13
  misc_feature: MA Experiment 20001557 PARAMETER Experiment Name: At_Drought_Soil_Dry_P Parameter: Treatment Value: Drought vs. No Drought
aatctttagaaactaagagagaatggaattaacactaaaattgctggttctgcttctgtttatcttaaatcatcatgttggttctggctctatcgtcaagtttcttcccggttttgaaggccctcttcctttcgaacttgaaaccgggtacattggtattggtgaggaagaggaagtgcaattgttctattatttcatcaaatctgagagaaatccaaaagaagaccctcttcttctctggttaagtggaggacctggatgttcttctatcactggccttcttttccagaatggacctttggctttgaagtccgaggtttacaatggaagtgttccttctttggtctctactacatattcgtggactaagacggcgaacataatattcttggatcaacctgttggagctggcttctcctactcaagagctccacttattgatacacctactgacacaggagaagttaagaggattcatgagtttctccaaaagtggctaagcaagcatccacagttttcttccaaccatttttatgctggcggagattcttattccggtatgattgttccggccctcgttcaagaaatctcgaaaggaaattatatatgttgcaaccctcctataaatctaaagggttatgtactcgggaacccgataacgcacgaagacgacccaaactatcgcattccattttctcatggaatggcactaatttcagatgaactatacgagtcaattagggaagcctgcaaaggaaattatttcaatgtggatccacgaaacacaaaatgtttgaaacttgtcgaggaatttcataagtgtaccgacaaactaaatgaattccatatactatcaccagattgcgacacggcatctcctgattgctatttatatccattttatctcattagcttttgggccaatgacgagagcgtccgcgatgctcttcatgttaataagaggagtattggaaaatgggagcgatgtaactatctgagtaaaccatacaacaaagacatcaagagcagcgtaccataccatatgaataacagtgttagtggctaccgatctctcatctacagtggtgatcatgatttggtggttcctttccttgcaacacaagcctggataaaatctctaaattactctatcattgatgaatggagaccttggatgattagagatcaaatcactggatacacgagaacttattccaataagatgacatttgctactgtcaaaggaagtgggcacacagcggagaataaaccacaagagagttttatcatgtttcgaaggtggattaatggccaacctttgtaaaaattacaattatgaattatctactatgtgagctatttgttcctgaggaggtttagaactctaccactagttcgacatgctatagttaccaataaatgaggtcttatttgggtctagggagactacaggccaaagacttggaacttcttggtttattgttatatgttgttaggtaacatttttgtgttattcatagattttaccttttggtacttttatcttctcacagattatattgttctgtgttgtgctgttattttttacaattaaacttagatttttaataaattcttttttgtccc

SEQ ID NO: 25629 - protein, 433 aa, Arabidopsis thaliana; identical to SEQ ID NO: 25004
  peptide (1)..(433): Ceres Seq. ID no. 13491970
  misc_feature (29)..(430): Pfam Name: Serine carboxypeptidase Pfam Description: Serine carboxypeptidase
  misc_feature (1)..(433): Homolog of NCBI NO: 15227772 NR Description: serine carboxypeptidase -related [Arabidopsis
  misc_feature (1)..(433): Homolog of NCBI NO: 25289782 NR Description: probable serine carboxypeptidase I
  misc_feature (1)..(433): Homolog of NCBI NO: 15227773 NR Description: serine carboxypeptidase -related [Arabidopsis
  misc_feature (3)..(433): Homolog of NCBI NO: 18400137 NR Description: serine carboxypeptidase -related [Arabidopsis
  misc_feature (4)..(433): Homolog of NCBI NO: 15219433 NR Description: serine carboxypeptidase -related [Arabidopsis
  misc_feature (4)..(433): Homolog of NCBI NO: 15219429 NR Description: serine carboxypeptidase -related [Arabidopsis
  misc_feature (3)..(433): Homolog of NCBI NO: 30681900 NR Description: serine carboxypeptidase -related [Arabidopsis
  misc_feature (1)..(393): Homolog of NCBI NO: 30681870 NR Description: serine carboxypeptidase -related [Arabidopsis
  misc_feature (1)..(433): Homolog of NCBI NO: 15227765 NR Description: serine carboxypeptidase -related [Arabidopsis
  misc_feature (1)..(433): Homolog of NCBI NO: 15227769 NR Description: serine carboxypeptidase -related [Arabidopsis

SEQ ID NO: 25630 - protein, 254 aa, Arabidopsis thaliana; identical to SEQ ID NO: 25005
  peptide (1)..(254): Ceres Seq. ID no. 13491971
  misc_feature (1)..(251): Pfam Name: Serine carboxypeptidase Pfam Description: Serine carboxypeptidase
  misc_feature (1)..(254): Homolog of NCBI NO: 18400137 NR Description: serine carboxypeptidase -related [Arabidopsis
  misc_feature (1)..(254): Homolog of NCBI NO: 30681900 NR Description: serine carboxypeptidase -related [Arabidopsis
  misc_feature (1)..(254): Homolog of NCBI NO: 15219433 NR Description: serine carboxypeptidase -related [Arabidopsis
  misc_feature (1)..(254): Homolog of NCBI NO: 15219429 NR Description: serine carboxypeptidase -related [Arabidopsis
  misc_feature (1)..(254): Homolog of NCBI NO: 15227772 NR Description: serine carboxypeptidase -related [Arabidopsis
  misc_feature (1)..(254): Homolog of NCBI NO: 25289782 NR Description: probable serine carboxypeptidase I
  misc_feature (1)..(254): Homolog of NCBI NO: 15227773 NR Description: serine carboxypeptidase -related [Arabidopsis
  misc_feature (1)..(214): Homolog of NCBI NO: 30681870 NR Description: serine carboxypeptidase -related [Arabidopsis
  misc_feature (1)..(254): Homolog of NCBI NO: 15227765 NR Description: serine carboxypeptidase -related [Arabidopsis
  misc_feature (1)..(254): Homolog of NCBI NO: 15227769 NR Description: serine carboxypeptidase -related [Arabidopsis

SEQ ID NO: 25631 - DNA, 822 bp, Arabidopsis thaliana
  misc_feature (1)..(822): Ceres Seq. ID no. 12370598
  misc_feature: MA Experiment ID: 108434 Result: Up-regulated in Transcription
  misc_feature: MA Experiment 108434 PARAMETER Experiment Name: At_Root_Tips_cDNA_P Parameter: Tissue Value: Root Tips
attttcagattcaccgttttagaaattaaatcctctctataagaacctctccaaaaaccctaatttgtcatcatcactttcacaatcttcttcatcgatttctctcttccaaatctcccaaaagatgtcgaaccctagagttttcttcgacatgagtctcagcggtactcccatcggacggatcgagatggagcttttcgctgatacaaccccaaacacggcggagaatttccgtgctctctgtaccggcgagaaaggaatgggaaagctaggtaagccacttcacttcaaaggatcgatcttccaccgtgtgattcccggattcatgtgtcaaggaggtgatttcaccgccaagaacggaaccggtggtgaatcgatctacggtgctaagttcaaggacgagaactttatcaagaagcatacaggagctgggattctctcaatggctaactctggtcctaacactaacggatctcagttcttcatctgtaccgataagacgtcgtggttagatggtaagcacgttgtgtttggacaagttgttaaaggcttggacgtcgtgaaggcgattgagaaagttggatctgattctggaaagacttccaaagtcgttaccatcactgattgtggtcagctttcttagatctaagtgagaaagtgagagactttgatctttatgagtaataatggtgtcttttgctttcggttgttcttcctcttaccttaatggattattctgtttagggtttgagttttcgtttcagagtttgtaacaaaacccttttgtgttttctggggtttgaaataattatgagcttactc

SEQ ID NO: 25632 - protein, 172 aa, Arabidopsis thaliana
  peptide (1)..(172): Ceres Seq. ID no. 12370599
  misc_feature (1)..(172): Homolog of NCBI NO: 29124975 NR Description: cyclophilin [Populus tremuloides]
  misc_feature (1)..(172): Homolog of NCBI NO: 1076510 NR Description: peptidylprolyl isomerase (EC 5.2.1.8) Cyp -
  misc_feature (1)..(171): Homolog of NCBI NO: 11270318 NR Description: peptidylprolyl isomerase (EC 5.2.1.8) CYP18
  misc_feature (1)..(172): Homolog of NCBI NO: 18146786 NR Description: CYP1 [Vigna radiata]
  misc_feature (2)..(172): Homolog of NCBI NO: 21886603 NR Description: peptidylprolyl isomerase (cyclophilin) [Betula
  misc_feature (1)..(171): Homolog of NCBI NO: 11270322 NR Description: peptidylprolyl isomerase (EC 5.2.1.8)
  misc_feature (2)..(172): Homolog of NCBI NO: 18076088 NR Description: cyclophilin [Ricinus communis]
  misc_feature (1)..(171): Homolog of NCBI NO: 11270316 NR Description: peptidylprolyl isomerase (EC 5.2.1.8)
  misc_feature (1)..(172): Homolog of NCBI NO: 3334157 NR Description: Peptidyl-prolyl cis-trans isomerase (PPIase)
  misc_feature (1)..(172): Homolog of NCBI NO: 15236211 NR Description: peptidylprolyl isomerase (cyclophilin)
MSNPRVFFDMSLSGTPIGRIEMELFADTTPNTAENFRALCTGEKGMGKLGKPLHFKGSIFHRVIPGFMCQGGDFTAKNGTGGESIYGAKFKDENFIKKHTGAGILSMANSGPNTNGSQFFICTDKTSWLDGKHVVFGQVVKGLDVVKAIEKVGSDSGKTSKVVTITDCGQLS

SEQ ID NO: 25633 - protein, 163 aa, Arabidopsis thaliana
  peptide (1)..(163): Ceres Seq. ID no. 12370600
  misc_feature (1)..(163): Homolog of NCBI NO: 29124975 NR Description: cyclophilin [Populus tremuloides]
  misc_feature (1)..(163): Homolog of NCBI NO: 1076510 NR Description: peptidylprolyl isomerase (EC 5.2.1.8) Cyp -
  misc_feature (1)..(162): Homolog of NCBI NO: 11270318 NR Description: peptidylprolyl isomerase (EC 5.2.1.8) CYP18
  misc_feature (1)..(163): Homolog of NCBI NO: 18146786 NR Description: CYP1 [Vigna radiata]
  misc_feature (1)..(163): Homolog of NCBI NO: 21886603 NR Description: peptidylprolyl isomerase (cyclophilin) [Betula
  misc_feature (1)..(162): Homolog of NCBI NO: 11270322 NR Description: peptidylprolyl isomerase (EC 5.2.1.8)
  misc_feature (1)..(163): Homolog of NCBI NO: 18076088 NR Description: cyclophilin [Ricinus communis]
  misc_feature (1)..(162): Homolog of NCBI NO: 11270316 NR Description: peptidylprolyl isomerase (EC 5.2.1.8)
  misc_feature (1)..(163): Homolog of NCBI NO: 3334157 NR Description: Peptidyl-prolyl cis-trans isomerase (PPIase)
  misc_feature (1)..(163): Homolog of NCBI NO: 15236211 NR Description: peptidylprolyl isomerase (cyclophilin)
MSLSGTPIGRIEMELFADTTPNTAENFRALCTGEKGMGKLGKPLHFKGSIFHRVIPGFMCQGGDFTAKNGTGGESIYGAKFKDENFIKKHTGAGILSMANSGPNTNGSQFFICTDKTSWLDGKHVVFGQVVKGLDVVKAIEKVGSDSGKTSKVVTITDCGQLS

SEQ ID NO: 25634 - protein, 151 aa, Arabidopsis thaliana
  peptide (1)..(151): Ceres Seq. ID no. 12370601
  misc_feature (1)..(151): Homolog of NCBI NO: 29124975 NR Description: cyclophilin [Populus tremuloides]
  misc_feature (1)..(151): Homolog of NCBI NO: 1076510 NR Description: peptidylprolyl isomerase (EC 5.2.1.8) Cyp -
  misc_feature (1)..(150): Homolog of NCBI NO: 11270318 NR Description: peptidylprolyl isomerase (EC 5.2.1.8) CYP18
  misc_feature (1)..(151): Homolog of NCBI NO: 18146786 NR Description: CYP1 [Vigna radiata]
  misc_feature (1)..(151): Homolog of NCBI NO: 21886603 NR Description: peptidylprolyl isomerase (cyclophilin) [Betula
  misc_feature (1)..(150): Homolog of NCBI NO: 11270322 NR Description: peptidylprolyl isomerase (EC 5.2.1.8)
  misc_feature (1)..(151): Homolog of NCBI NO: 18076088 NR Description: cyclophilin [Ricinus communis]
  misc_feature (1)..(150): Homolog of NCBI NO: 11270316 NR Description: peptidylprolyl isomerase (EC 5.2.1.8)
  misc_feature (1)..(151): Homolog of NCBI NO: 3334157 NR Description: Peptidyl-prolyl cis-trans isomerase (PPIase)
  misc_feature (1)..(151): Homolog of NCBI NO: 15236211 NR Description: peptidylprolyl isomerase (cyclophilin)
MELFADTTPNTAENFRALCTGEKGMGKLGKPLHFKGSIFHRVIPGFMCQGGDFTAKNGTGGESIYGAKFKDENFIKKHTGAGILSMANSGPNTNGSQFFICTDKTSWLDGKHVVFGQVVKGLDVVKAIEKVGSDSGKTSKVVTITDCGQLS

SEQ ID NO: 25635 - DNA, 892 bp, Arabidopsis thaliana
  misc_feature (1)..(892): Ceres Seq. ID no. 13499876
  misc_feature: MA Experiment ID: 20000234 Result: Down-regulated in Transcription
  misc_feature: MA Experiment 20000234 PARAMETER Experiment Name: At_Siliques_P Parameter: Age (day) Value: 21
  misc_feature: MA Experiment 20000234 PARAMETER Experiment Name: At_Siliques_P Parameter: Organism Value: A. thaliana
  misc_feature: MA Experiment 20000234 PARAMETER Experiment Name: At_Siliques_P Parameter: Plant Line Value: WS
  misc_feature: MA Experiment 20000234 PARAMETER Experiment Name: At_Siliques_P Parameter: Tissue Value: Less Than 5mm Siliques vs. Whole Plant
  misc_feature: MA Experiment ID: 20000265 Result: Down-regulated in Transcription
  misc_feature: MA Experiment 20000265 PARAMETER Experiment Name: At_Open_Flower_P Parameter: Age (day) Value: 21
  misc_feature: MA Experiment 20000265 PARAMETER Experiment Name: At_Open_Flower_P Parameter: Plant Line Value: WS
  misc_feature: MA Experiment 20000265 PARAMETER Experiment Name: At_Open_Flower_P Parameter: Tissue Value: Closed Flower vs. Whole Plant
  misc_feature: MA Experiment ID: 20000286 Result: Down-regulated in Transcription
  misc_feature: MA Experiment 20000286 PARAMETER Experiment Name: At_Open_Flower_P Parameter: Age (day) Value: 21
  misc_feature: MA Experiment 20000286 PARAMETER Experiment Name: At_Open_Flower_P Parameter: Plant Line Value: WS
  misc_feature: MA Experiment 20000286 PARAMETER Experiment Name: At_Open_Flower_P Parameter: Tissue Value: Half Open vs. Whole Plant
  misc_feature: MA Experiment ID: 20000437 Result: Up-regulated in Transcription
  misc_feature: MA Experiment 20000437 PARAMETER Experiment Name: At_Drought_P Parameter: Age (day) Value: 8
  misc_feature: MA Experiment 20000437 PARAMETER Experiment Name: At_Drought_P Parameter: Organism Value: A. thaliana
  misc_feature: MA Experiment 20000437 PARAMETER Experiment Name: At_Drought_P Parameter: Plant Line Value: WS
  misc_feature: MA Experiment 20000437 PARAMETER Experiment Name: At_Drought_P Parameter: Timepoint (hr) Value: 24
  misc_feature: MA Experiment 20000437 PARAMETER Experiment Name: At_Drought_P Parameter: Tissue Value: Whole Plant
  misc_feature: MA Experiment 20000437 PARAMETER Experiment Name: At_Drought_P Parameter: Treatment Value: Drought vs. No Drought
  misc_feature: MA Experiment ID: 20001451 Result: Up-regulated in Transcription
  misc_feature: MA Experiment 20001451 PARAMETER Experiment Name: At_Far-red-induction_P Parameter: Age (day) Value: 7
  misc_feature: MA Experiment 20001451 PARAMETER Experiment Name: At_Far-red-induction_P Parameter: Light Value: Far-red vs. White
  misc_feature: MA Experiment 20001451 PARAMETER Experiment Name: At_Far-red-induction_P Parameter: Organism Value: A. thaliana
  misc_feature: MA Experiment 20001451 PARAMETER Experiment Name: At_Far-red-induction_P Parameter: Plant Line Value: Columbia
  misc_feature: MA Experiment 20001451 PARAMETER Experiment Name: At_Far-red-induction_P Parameter: Timepoint (hr) Value: 24
  misc_feature: MA Experiment 20001451 PARAMETER Experiment Name: At_Far-red-induction_P Parameter: Tissue Value: Whole Plant
caaccattgttgcgtgtttggttatctcttctttcttctctctcacctaaatcaagggatttgttctgatcaactttgaacagaatttacaacaaatccctagaaaaatctgacccttccttcttcctctggaagatttaagatacttgttgataaggatattcggaagaagcttttgaaatttttggcaaaagtctcatttgatccgacttttctgttgaaggtgaaatagatacaaaaaaaaatgggctcagaggaaaacaacagcacaagctttccaccaacagagccaaagctctgtgataacggatgtggattcttcgggtcaccatccaacatgaatctctgctcgaaatgttacagaagcttaagagccgaggaagatcaaaccgcggtagcgaaagctgcggtgaagaactctttaaagcttccatcttgcagtatcattgcacctggacaaaaacatcctctggaaattaaaccagctcatttggaaaccgttgttgtaaccgctgagccgtcttcggtgcctgtagccgcggaacaggacgaggctgagccgtcgagacctgttagaccgaacaacaggtgtttcagctgtaacaagaaggttggtgtaatggggtttaagtgcaaatgcggtagcacgttttgcgggagtcataggtacccggagaagcatgagtgtagcttcgatttcaaagaagttggacgtgatgcaatcgcaaaggcgaatcctttggttaaggctgataaagttcagaggatttgaagaaaacaaactttgttatttttaagtatttctttgtcttctgcatttgatcagtttctgcctgggatgttcgatgtttggtttccatgaataaaaatgaaaattgctgctcttgctttc

SEQ ID NO: 25636 - protein, 175 aa, Arabidopsis thaliana
  peptide (1)..(175): Ceres Seq. ID no. 13499877
  misc_feature (116)..(156): Pfam Name: AN1-like Zinc finger Pfam Description: AN1-like Zinc finger
  misc_feature (13)..(175): Homolog of NCBI NO: 35187687 NR Description: zinc-finger protein [Oryza sativa (indica
  misc_feature (13)..(175): Homolog of NCBI NO: 15231686 NR Description: zinc finger - like protein [Arabidopsis thaliana]
  misc_feature (13)..(175): Homolog of NCBI NO: 18404102 NR Description: expressed protein [Arabidopsis thaliana]
  misc_feature (12)..(175): Homolog of NCBI NO: 25082726 NR Description: expressed protein [Arabidopsis thaliana]
  misc_feature (12)..(175): Homolog of NCBI NO: 18403408 NR Description: expressed protein [Arabidopsis thaliana]
  misc_feature (15)..(175): Homolog of NCBI NO: 15225894 NR Description: zinc finger protein -related [Arabidopsis
  misc_feature (1)..(175): Homolog of NCBI NO: 15221329 NR Description: expressed protein [Arabidopsis thaliana]
  misc_feature (1)..(175): Homolog of NCBI NO: 8778645 NR Description: F5O11.17 [Arabidopsis thaliana]
  misc_feature (1)..(174): Homolog of NCBI NO: 15235819 NR Description: zinc finger -related protein [Arabidopsis
  misc_feature (1)..(175): Homolog of NCBI NO: 15234402 NR Description: expressed protein [Arabidopsis thaliana]
MGSEENNSTSFPPTEPKLCDNGCGFFGSPSNMNLCSKCYRSLRAEEDQTAVAKAAVKNSLKLPSCSIIAPGQKHPLEIKPAHLETVVVTAEPSSVPVAAEQDEAEPSRPVRPNNRCFSCNKKVGVMGFKCKCGSTFCGSHRYPEKHECSFDFKEVGRDAIAKANPLVKADKVQRI

SEQ ID NO: 25637 - protein, 144 aa, Arabidopsis thaliana
  peptide (1)..(144): Ceres Seq. ID no. 13499878
  misc_feature (85)..(125): Pfam Name: AN1-like Zinc finger Pfam Description: AN1-like Zinc finger
  misc_feature (1)..(144): Homolog of NCBI NO: 35187687 NR Description: zinc-finger protein [Oryza sativa (indica
  misc_feature (1)..(144): Homolog of NCBI NO: 15231686 NR Description: zinc finger - like protein [Arabidopsis thaliana]
  misc_feature (1)..(144): Homolog of NCBI NO: 18404102 NR Description: expressed protein [Arabidopsis thaliana]
  misc_feature (1)..(144): Homolog of NCBI NO: 25082726 NR Description: expressed protein [Arabidopsis thaliana]
  misc_feature (1)..(144): Homolog of NCBI NO: 18403408 NR Description: expressed protein [Arabidopsis thaliana]
  misc_feature (1)..(144): Homolog of NCBI NO: 15225894 NR Description: zinc finger protein -related [Arabidopsis
  misc_feature (1)..(144): Homolog of NCBI NO: 15221329 NR Description: expressed protein [Arabidopsis thaliana]
  misc_feature (1)..(144): Homolog of NCBI NO: 8778645 NR Description: F5O11.17 [Arabidopsis thaliana]
  misc_feature (1)..(143): Homolog of NCBI NO: 15235819 NR Description: zinc finger -related protein [Arabidopsis
  misc_feature (1)..(144): Homolog of NCBI NO: 15234402 NR Description: expressed protein [Arabidopsis thaliana]
MNLCSKCYRSLRAEEDQTAVAKAAVKNSLKLPSCSIIAPGQKHPLEIKPAHLETVVVTAEPSSVPVAAEQDEAEPSRPVRPNNRCFSCNKKVGVMGFKCKCGSTFCGSHRYPEKHECSFDFKEVGRDAIAKANPLVKADKVQRI

SEQ ID NO: 25638 - DNA, 1197 bp, Arabidopsis thaliana
  misc_feature (1)..(1197): Ceres Seq. ID no. 12339651
  misc_feature: MA Experiment ID: 20000184 Result: Up-regulated in Transcription
  misc_feature: MA Experiment 20000184 PARAMETER Experiment Name: At_Shoots__P Parameter: Age (day) Value: 7
  misc_feature: MA Experiment 20000184 PARAMETER Experiment Name: At_Shoots__P Parameter: Tissue Value: Shoots vs. Whole Plant
atcgactactctcactctctttctattctctcttccgccgctttttccatcgttcgaaagtaaagttgctcgctttactcgttcaagcattcaactagaatccgatcgaatcctcctgcaacagcaatgatgaatcggatcctcttgtttatgatcctggcttttgtctcatctctttcagcagttgagccaatttcgttcaagatcacgaatcgttgccggaacacgatatggcccggtttgctctctggtgctaactctgcgccgctccccacaactggctttcgtctctctagaggaaaatctaaaaccgtcgcaataccagagtcgtggtccggtcgtctctgggcacgaaccttgtgttcacaagatcggagttcaggttctttcgtctgcttaaccggagattgcggctcgggaaaagtcgaatgttcaggctccggcagctaaacctccagcaactctcgccgagtttactctcaatggcacaggaggactagatttttacgacgttagcctcgtcgacggttacaatctcccgatgctaatcttgcccaagaaaatcgtcattggaggatgcggagccaccgggtgtctcgtggacttgaacggcgcgtgtcccagagacctaaagctggtgacgcgtgggaatgggaacggtgttgcttgccgtagcgcgtgcgaggcattcggagacccaaggtattgctgcagcgatgcgtacgccacgccggacacgtgtcagccttcggtttactcgctcttctttaagcatgcgtgcccacgagcatacagctacgcctatgacgataagacgagcacttacacttgcgccaccggagccgattacttcatcatcttctgtccgccaccgtatacaagcgagaagcttttaggatcgaggaaagatggtgcaacactgccactagtaaacaagagcatgattcatttgccgcatccgcacagcagctgagccatcttcttattatatgtcttaagtccttcttacatcaggtccgtcttacatgggtactcgcattgtctgttgaggttactatactgttttcatttcctctttcttgttgcaggcagatagaaaattcatgtgtagaaaaatgtcattacggttaataccaaggtagaattactgtaaatctttacttgttttacacttgttacttctttcgaaattgttcc

SEQ ID NO: 25639 - protein, 143 aa, Arabidopsis thaliana
  peptide (1)..(143): Ceres Seq. ID no. 12339652
  misc_feature (1)..(109): Pfam Name: Thaumatin family Pfam Description: Thaumatin family
  misc_feature (1)..(143): Homolog of NCBI NO: 25296204 NR Description: hypothetical protein T20H2.19 [imported] -
  misc_feature (1)..(113): Homolog of NCBI NO: 4105697 NR Description: thaumatin-like protein [Arabidopsis thaliana]
  misc_feature (1)..(116): Homolog of NCBI NO: 15222875 NR Description: thaumatin, putative
  misc_feature (1)..(111): Homolog of NCBI NO: 15227907 NR Description: putative thaumatin-like pathogenesis-related
  misc_feature (1)..(136): Homolog of NCBI NO: 37531042 NR Description: putative thaumatin-like protein
  misc_feature (1)..(116): Homolog of NCBI NO: 15233437 NR Description: thaumatin-like protein
  misc_feature (1)..(113): Homolog of NCBI NO: 4239765 NR Description: putative thaumatin-like protein precursor
  misc_feature (1)..(143): Homolog of NCBI NO: 6273383 NR Description: SCUTL1 [Vitis vinifera]
  misc_feature (1)..(113): Homolog of NCBI NO: 7442169 NR Description: pathogenesis-related protein F20M13.230 -
  misc_feature (1)..(143): Homolog of NCBI NO: 30692042 NR Description: thaumatin family [Arabidopsis thaliana]
MLILPKKIVIGGCGATGCLVDLNGACPRDLKLVTRGNGNGVACRSACEAFGDPRYCCSDAYATPDTCQPSVYSLFFKHACPRAYSYAYDDKTSTYTCATGADYFIIFCPPPYTSEKLLGSRKDGATLPLVNKSMIHLPHPHSS

SEQ ID NO: 25640 - protein, 107 aa, Arabidopsis thaliana
  peptide (1)..(107): Ceres Seq. ID no. 12339653
  misc_feature (29)..(107): Pfam Name: Thaumatin family Pfam Description: Thaumatin family
  misc_feature (1)..(107): Homolog of NCBI NO: 30692042 NR Description: thaumatin family [Arabidopsis thaliana]
  misc_feature (6)..(107): Homolog of NCBI NO: 25296204 NR Description: hypothetical protein T20H2.19 [imported] -
  misc_feature (6)..(107): Homolog of NCBI NO: 4105697 NR Description: thaumatin-like protein [Arabidopsis thaliana]
  misc_feature (6)..(107): Homolog of NCBI NO: 15222875 NR Description: thaumatin, putative
  misc_feature (10)..(107): Homolog of NCBI NO: 15227907 NR Description: putative thaumatin-like pathogenesis-related
  misc_feature (6)..(107): Homolog of NCBI NO: 37531042 NR Description: putative thaumatin-like protein
  misc_feature (5)..(107): Homolog of NCBI NO: 15233437 NR Description: thaumatin-like protein
  misc_feature (6)..(107): Homolog of NCBI NO: 4239765 NR Description: putative thaumatin-like protein precursor
  misc_feature (10)..(107): Homolog of NCBI NO: 6273383 NR Description: SCUTL1 [Vitis vinifera]
  misc_feature (17)..(107): Homolog of NCBI NO: 7442169 NR Description: pathogenesis-related protein F20M13.230 -
MMNRILLFMILAFVSSLSAVEPISFKITNRCRNTIWPGLLSGANSAPLPTTGFRLSRGKSKTVAIPESWSGRLWARTLCSQDRSSGSFVCLTGDCGSGKVECSGSGS

SEQ ID NO: 25641 - protein, 106 aa, Arabidopsis thaliana
  peptide (1)..(106): Ceres Seq. ID no. 12339654
  misc_feature (28)..(106): Pfam Name: Thaumatin family Pfam Description: Thaumatin family
  misc_feature (5)..(106): Homolog of NCBI NO: 25296204 NR Description: hypothetical protein T20H2.19 [imported] -
  misc_feature (5)..(106): Homolog of NCBI NO: 4105697 NR Description: thaumatin-like protein [Arabidopsis thaliana]
  misc_feature (5)..(106): Homolog of NCBI NO: 15222875 NR Description: thaumatin, putative
  misc_feature (9)..(106): Homolog of NCBI NO: 15227907 NR Description: putative thaumatin-like pathogenesis-related
  misc_feature (5)..(106): Homolog of NCBI NO: 37531042 NR Description: putative thaumatin-like protein
  misc_feature (4)..(106): Homolog of NCBI NO: 15233437 NR Description: thaumatin-like protein
  misc_feature (5)..(106): Homolog of NCBI NO: 4239765 NR Description: putative thaumatin-like protein precursor
  misc_feature (9)..(106): Homolog of NCBI NO: 6273383 NR Description: SCUTL1 [Vitis vinifera]
  misc_feature (16)..(106): Homolog of NCBI NO: 7442169 NR Description: pathogenesis-related protein F20M13.230 -
  misc_feature (1)..(106): Homolog of NCBI NO: 30692042 NR Description: thaumatin family [Arabidopsis thaliana]
MNRILLFMILAFVSSLSAVEPISFKITNRCRNTIWPGLLSGANSAPLPTTGFRLSRGKSKTVAIPESWSGRLWARTLCSQDRSSGSFVCLTGDCGSGKVECSGSGS

SEQ ID NO: 25642 - DNA, 1490 bp, Arabidopsis thaliana; identical to SEQ ID NO: 23420
  misc_feature (1)..(1490): Ceres Seq. ID no. 13497463
  misc_feature: MA Experiment ID: 108461 Result: Up-regulated in Transcription
  misc_feature: MA Experiment 108461 PARAMETER Experiment Name: At_Germinating_Seeds_cDNA_P Parameter: Age (day) Value: 1 vs. 0
  misc_feature: MA Experiment 108461 PARAMETER Experiment Name: At_Germinating_Seeds_cDNA_P Parameter: Tissue Value: Germinating Seeds
  misc_feature: MA Experiment ID: 108462 Result: Up-regulated in Transcription
  misc_feature: MA Experiment 108462 PARAMETER Experiment Name: At_Germinating_Seeds_cDNA_P Parameter: Age (day) Value: 2 vs. 0
  misc_feature: MA Experiment 108462 PARAMETER Experiment Name: At_Germinating_Seeds_cDNA_P Parameter: Tissue Value: Germinating Seeds
  misc_feature: MA Experiment ID: 108463 Result: Up-regulated in Transcription
  misc_feature: MA Experiment 108463 PARAMETER Experiment Name: At_Germinating_Seeds_cDNA_P Parameter: Age (day) Value: 3 vs. 0
  misc_feature: MA Experiment 108463 PARAMETER Experiment Name: At_Germinating_Seeds_cDNA_P Parameter: Tissue Value: Germinating Seeds
  misc_feature: MA Experiment ID: 108595 Result: Down-regulated in Transcription
  misc_feature: MA Experiment 108595 PARAMETER Experiment Name: At_Ler-pi_Ovule_cDNA_P Parameter: Plant Line Value: null
  misc_feature: MA Experiment ID: 20000087 Result: Down-regulated in Transcription
  misc_feature: MA Experiment 20000087 PARAMETER Experiment Name: At_100uM_ABA_Mutants_cDNA_P Parameter: Plant Line Value: WS
  misc_feature: MA Experiment 20000087 PARAMETER Experiment Name: At_100uM_ABA_Mutants_cDNA_P Parameter: Timepoint (hr) Value: 6
  misc_feature: MA Experiment 20000087 PARAMETER Experiment Name: At_100uM_ABA_Mutants_cDNA_P Parameter: Tissue Value: Aerial
  misc_feature: MA Experiment 20000087 PARAMETER Experiment Name: At_100uM_ABA_Mutants_cDNA_P Parameter: Treatment Value: 100uM ABA vs. No Treatment
  misc_feature: MA Experiment ID: 20000113 Result: Down-regulated in Transcription
  misc_feature: MA Experiment 20000113 PARAMETER Experiment Name: At_42deg_Heat_cDNA_P Parameter: Temperature (deg C) Value: 42 vs. 22
  misc_feature: MA Experiment 20000113 PARAMETER Experiment Name: At_42deg_Heat_cDNA_P Parameter: Timepoint (hr) Value: 8
  misc_feature: MA Experiment 20000113 PARAMETER Experiment Name: At_42deg_Heat_cDNA_P Parameter: Tissue Value: Aerial
  misc_feature: MA Experiment ID: 20000171 Result: Down-regulated in Transcription
  misc_feature: MA Experiment 20000171 PARAMETER Experiment Name: At_42deg_Heat_P Parameter: Age (day) Value: 14
  misc_feature: MA Experiment 20000171 PARAMETER Experiment Name: At_42deg_Heat_P Parameter: Organism Value: A. thaliana
  misc_feature: MA Experiment 20000171 PARAMETER Experiment Name: At_42deg_Heat_P Parameter: Plant Line Value: WS
  misc_feature: MA Experiment 20000171 PARAMETER Experiment Name: At_42deg_Heat_P Parameter: Temperature (deg C) Value: 42 vs. 22
  misc_feature: MA Experiment 20000171 PARAMETER Experiment Name: At_42deg_Heat_P Parameter: Timepoint (hr) Value: 1
  misc_feature: MA Experiment 20000171 PARAMETER Experiment Name: At_42deg_Heat_P Parameter: Tissue Value: Aerial
  misc_feature: MA Experiment ID: 20000173 Result: Down-regulated in Transcription
  misc_feature: MA Experiment 20000173 PARAMETER Experiment Name: At_42deg_Heat_P Parameter: Age (day) Value: 14
  misc_feature: MA Experiment 20000173 PARAMETER Experiment Name: At_42deg_Heat_P Parameter: Organism Value: A. thaliana
  misc_feature: MA Experiment 20000173 PARAMETER Experiment Name: At_42deg_Heat_P Parameter: Plant Line Value: WS
  misc_feature: MA Experiment 20000173 PARAMETER Experiment Name: At_42deg_Heat_P Parameter: Temperature (deg C) Value: 42 vs. 22
  misc_feature: MA Experiment 20000173 PARAMETER Experiment Name: At_42deg_Heat_P Parameter: Timepoint (hr) Value: 6
  misc_feature: MA Experiment 20000173 PARAMETER Experiment Name: At_42deg_Heat_P Parameter: Tissue Value: Aerial
  misc_feature: MA Experiment ID: 20000227 Result: Up-regulated in Transcription
  misc_feature: MA Experiment 20000227 PARAMETER Experiment Name: At_Root-Tips-vs-Tops_P Parameter: Tissue Value: Root Tips vs. Root Tops

SEQ ID NO: 25643 - protein, 325 aa, Arabidopsis thaliana; identical to SEQ ID NO: 23421
  peptide (1)..(325): Ceres Seq. ID no. 13497464
  misc_feature (135)..(239): Pfam Name: CRAL/TRIO domain Pfam Description: CRAL/TRIO domain
  misc_feature (135)..(239): Pfam Name: CRAL/TRIO domain Pfam Description: CRAL/TRIO domain
  misc_feature (1)..(28): Homolog of NCBI NO: 25295905 NR Description: protein F14J16.8 [imported] - Arabidopsis
  misc_feature (18)..(325): Homolog of NCBI NO: 25295905 NR Description: protein F14J16.8 [imported] - Arabidopsis
  misc_feature (18)..(325): Homolog of NCBI NO: 25295905 NR Description: protein F14J16.8 [imported] - Arabidopsis
  misc_feature (1)..(325): Homolog of NCBI NO: 15222786 NR Description: sec14 cytosolic factor, putative
  misc_feature (1)..(28): Homolog of NCBI NO: 25295905 NR Description: protein F14J16.8 [imported] - Arabidopsis
  misc_feature (1)..(325): Homolog of NCBI NO: 15222786 NR Description: sec14 cytosolic factor, putative

SEQ ID NO: 25644 - protein, 310 aa, Arabidopsis thaliana; identical to SEQ ID NO: 23422
  peptide (1)..(310): Ceres Seq. ID no. 13497465
  misc_feature (120)..(224): Pfam Name: CRAL/TRIO domain Pfam Description: CRAL/TRIO domain
  misc_feature (120)..(224): Pfam Name: CRAL/TRIO domain Pfam Description: CRAL/TRIO domain
  misc_feature (1)..(13): Homolog of NCBI NO: 25295905 NR Description: protein F14J16.8 [imported] - Arabidopsis
  misc_feature (3)..(310): Homolog of NCBI NO: 25295905 NR Description: protein F14J16.8 [imported] - Arabidopsis
  misc_feature (3)..(310): Homolog of NCBI NO: 25295905 NR Description: protein F14J16.8 [imported] - Arabidopsis
  misc_feature (1)..(310): Homolog of NCBI NO: 15222786 NR Description: sec14 cytosolic factor, putative
  misc_feature (1)..(13): Homolog of NCBI NO: 25295905 NR Description: protein F14J16.8 [imported] - Arabidopsis
  misc_feature (1)..(310): Homolog of NCBI NO: 15222786 NR Description: sec14 cytosolic factor, putative

SEQ ID NO: 25645 - protein, 270 aa, Arabidopsis thaliana; identical to SEQ ID NO: 23423
  peptide (1)..(270): Ceres Seq. ID no. 13497466
  misc_feature (80)..(184): Pfam Name: CRAL/TRIO domain Pfam Description: CRAL/TRIO domain
  misc_feature (80)..(184): Pfam Name: CRAL/TRIO domain Pfam Description: CRAL/TRIO domain
  misc_feature (1)..(270): Homolog of NCBI NO: 25295905 NR Description: protein F14J16.8 [imported] - Arabidopsis
  misc_feature (1)..(270): Homolog of NCBI NO: 25295905 NR Description: protein F14J16.8 [imported] - Arabidopsis
  misc_feature (1)..(270): Homolog of NCBI NO: 15222786 NR Description: sec14 cytosolic factor, putative
  misc_feature (1)..(270): Homolog of NCBI NO: 15222786 NR Description: sec14 cytosolic factor, putative

SEQ ID NO: 25646 - DNA, 1242 bp, Arabidopsis thaliana
  misc_feature (1)..(1242): Ceres Seq. ID no. 12331564
  misc_feature: MA Experiment ID: 108434 Result: Down-regulated in Transcription
  misc_feature: MA Experiment 108434 PARAMETER Experiment Name: At_Root_Tips_cDNA_P Parameter: Tissue Value: Root Tips
  misc_feature: MA Experiment ID: 108501 Result: Up-regulated in Transcription
  misc_feature: MA Experiment 108501 PARAMETER Experiment Name: At_ap2_floral_buds_cDNA_P Parameter: Plant Line Value: ap2 (Ler.)
  misc_feature: MA Experiment 108501 PARAMETER Experiment Name: At_ap2_floral_buds_cDNA_P Parameter: Tissue Value: Closed Flower
  misc_feature: MA Experiment ID: 108668 Result: Up-regulated in Transcription
  misc_feature: MA Experiment 108668 PARAMETER Experiment Name: At_2mM_SA_cDNA_P Parameter: Plant Line Value: WS
  misc_feature: MA Experiment 108668 PARAMETER Experiment Name: At_2mM_SA_cDNA_P Parameter: Timepoint (hr) Value: 6
  misc_feature: MA Experiment 108668 PARAMETER Experiment Name: At_2mM_SA_cDNA_P Parameter: Treatment Value: 2mM SA vs. No Treatment
  misc_feature: MA Experiment ID: 20000265 Result: Down-regulated in Transcription
  misc_feature: MA Experiment 20000265 PARAMETER Experiment Name: At_Open_Flower_P Parameter: Age (day) Value: 21
  misc_feature: MA Experiment 20000265 PARAMETER Experiment Name: At_Open_Flower_P Parameter: Plant Line Value: WS
  misc_feature: MA Experiment 20000265 PARAMETER Experiment Name: At_Open_Flower_P Parameter: Tissue Value: Closed Flower vs. Whole Plant
  misc_feature: MA Experiment ID: 20001451 Result: Up-regulated in Transcription
  misc_feature: MA Experiment 20001451 PARAMETER Experiment Name: At_Far-red-induction_P Parameter: Age (day) Value: 7
  misc_feature: MA Experiment 20001451 PARAMETER Experiment Name: At_Far-red-induction_P Parameter: Light Value: Far-red vs. White
  misc_feature: MA Experiment 20001451 PARAMETER Experiment Name: At_Far-red-induction_P Parameter: Organism Value: A. thaliana
  misc_feature: MA Experiment 20001451 PARAMETER Experiment Name: At_Far-red-induction_P Parameter: Plant Line Value: Columbia
  misc_feature: MA Experiment 20001451 PARAMETER Experiment Name: At_Far-red-induction_P Parameter: Timepoint (hr) Value: 24
  misc_feature: MA Experiment 20001451 PARAMETER Experiment Name: At_Far-red-induction_P Parameter: Tissue Value: Whole Plant
agatttgagactatctatttacattctgattatttcttaagaagaaacggccatggaagtcaaaggagccacccggagctctatcatagttccttctgttcaagagatggtgaaggagaagatgatcacgacggttcctccgaggtatgtacggtctgatcaagacgtagctgagatagccgttgattctggtctaagaaaccagatcccaatcatagacttcagtcttctgtgttcttcaacctccatggattccgagattgacaagcttgactctgcttgcaaagagtggggattttttcagcttgtaaaccatggaatggagtcaagtttcttgaacaaagtaaagtcagaggttcaagacttcttcaaccttcccatggaagagaagaagaatttgtggcaacaacccgatgagatcgaagggtttagacaagtatttgtggtttcagaagagcagaaactcgattgggcagatatgttcttccttacaatgcaacctgttcgattacgcaagcctcacttgttccccaagttacctctgccctttagagatacactagacatgtattcgactgaagtgaaaagcattgctaagatcttacttgggaaaatagcggtagcactgaagatcaaacccgaggaaatggataggttgtttgatgatgagttagggcagagaattaggctgaattactacccgccttgtccagagcccgataaggttattggtctaactccgcattctgattctacaggactcaccatactgttgcaggctaatgaagttgaaggtctccaaatcaagaaaaatggcaagtgggtttctgtcaaacctctcccaaatgctttggttgtcaatgtcggagacatcttagagatcataacgaatagcacataccgaagtatagagcatcgtggagttgtgaactcagagaaagagagactttcggtggcggcattccacaatattggattgggtaaagaaattggtccgatgagaagtctcgtggaaaggcacaaggctgcatttttcaaaagcgtgactactgaagagtatttccatggcttgttttcccgtgagctcgatggaaaagcttaccttgatgttatgagactctaaaggaaacaattcataaaattattggcttgtgccccaagaaaacaatcacattttctgacccttcctattgtagtgtatatactctgtttctcctctgtttcatgcttttgcaaataggc

SEQ ID NO: 25647 - protein, 356 aa, Arabidopsis thaliana
  peptide (1)..(356): Ceres Seq. ID no. 12331565
  misc_feature (207)..(307): Pfam Name: 2OG-Fe(II) oxygenase superfamily Pfam Description: 2OG-Fe(II) oxygenase superfamily
  misc_feature (13)..(356): Homolog of NCBI NO: 15224472 NR Description: putative anthocyanidin synthase
  misc_feature (10)..(356): Homolog of NCBI NO: 40736992 NR Description: putative oxidoreductase [Oryza sativa (japonica
  misc_feature (28)..(356): Homolog of NCBI NO: 37536820 NR Description: putative ethylene-forming enzyme
  misc_feature (1)..(356): Homolog of NCBI NO: 15218400 NR Description: flavanone 3-hydroxylase, putative
  misc_feature (1)..(356): Homolog of NCBI NO: 25285681 NR Description: SRG1 homolog [imported] - Arabidopsis thaliana
  misc_feature (1)..(356): Homolog of NCBI NO: 26451337 NR Description: SRG1 like protein [Arabidopsis thaliana]
  misc_feature (1)..(356): Homolog of NCBI NO: 15219986 NR Description: SRG1-like protein; protein id: At1g17010.1
  misc_feature (1)..(356): Homolog of NCBI NO: 15219988 NR Description: SRG1-like protein
  misc_feature (1)..(356): Homolog of NCBI NO: 15235017 NR Description: SRG1-like protein; protein id: At4g25310.1
  misc_feature (1)..(356): Homolog of NCBI NO: 15235014 NR Description: SRG1-like protein; protein id: At4g25300.1
MEVKGATRSSIIVPSVQEMVKEKMITTVPPRYVRSDQDVAEIAVDSGLRNQIPIIDFSLLCSSTSMDSEIDKLDSACKEWGFFQLVNHGMESSFLNKVKSEVQDFFNLPMEEKKNLWQQPDEIEGFRQVFVVSEEQKLDWADMFFLTMQPVRLRKPHLFPKLPLPFRDTLDMYSTEVKSIAKILLGKIAVALKIKPEEMDRLFDDELGQRIRLNYYPPCPEPDKVIGLTPHSDSTGLTILLQANEVEGLQIKKNGKWVSVKPLPNALVVNVGDILEIITNSTYRSIEHRGVVNSEKERLSVAAFHNIGLGKEIGPMRSLVERHKAAFFKSVTTEEYFHGLFSRELDGKAYLDVMRL

SEQ ID NO: 25648 - protein, 338 aa, Arabidopsis thaliana
  peptide (1)..(338): Ceres Seq. ID no. 12331566
  misc_feature (189)..(289): Pfam Name: 2OG-Fe(II) oxygenase superfamily Pfam Description: 2OG-Fe(II) oxygenase superfamily
  misc_feature (1)..(338): Homolog of NCBI NO: 15224472 NR Description: putative anthocyanidin synthase
  misc_feature (1)..(338): Homolog of NCBI NO: 40736992 NR Description: putative oxidoreductase [Oryza sativa (japonica
  misc_feature (10)..(338): Homolog of NCBI NO: 37536820 NR Description: putative ethylene-forming enzyme
  misc_feature (1)..(338): Homolog of NCBI NO: 15218400 NR Description: flavanone 3-hydroxylase, putative
  misc_feature (1)..(338): Homolog of NCBI NO: 25285681 NR Description: SRG1 homolog [imported] - Arabidopsis thaliana
  misc_feature (1)..(338): Homolog of NCBI NO: 26451337 NR Description: SRG1 like protein [Arabidopsis thaliana]
  misc_feature (1)..(338): Homolog of NCBI NO: 15219986 NR Description: SRG1-like protein; protein id: At1g17010.1
  misc_feature (1)..(338): Homolog of NCBI NO: 15219988 NR Description: SRG1-like protein
  misc_feature (1)..(338): Homolog of NCBI NO: 15235017 NR Description: SRG1-like protein; protein id: At4g25310.1
  misc_feature (1)..(338): Homolog of NCBI NO: 15235014 NR Description: SRG1-like protein; protein id: At4g25300.1
MVKEKMITTVPPRYVRSDQDVAEIAVDSGLRNQIPIIDFSLLCSSTSMDSEIDKLDSACKEWGFFQLVNHGMESSFLNKVKSEVQDFFNLPMEEKKNLWQQPDEIEGFRQVFVVSEEQKLDWADMFFLTMQPVRLRKPHLFPKLPLPFRDTLDMYSTEVKSIAKILLGKIAVALKIKPEEMDRLFDDELGQRIRLNYYPPCPEPDKVIGLTPHSDSTGLTILLQANEVEGLQIKKNGKWVSVKPLPNALVVNVGDILEIITNSTYRSIEHRGVVNSEKERLSVAAFHNIGLGKEIGPMRSLVERHKAAFFKSVTTEEYFHGLFSRELDGKAYLDVMRL

SEQ ID NO: 25649 - protein, 333 aa, Arabidopsis thaliana
  peptide (1)..(333): Ceres Seq. ID no. 12331567
  misc_feature (184)..(284): Pfam Name: 2OG-Fe(II) oxygenase superfamily Pfam Description: 2OG-Fe(II) oxygenase superfamily
  misc_feature (1)..(333): Homolog of NCBI NO: 15224472 NR Description: putative anthocyanidin synthase
  misc_feature (1)..(333): Homolog of NCBI NO: 40736992 NR Description: putative oxidoreductase [Oryza sativa (japonica
  misc_feature (5)..(333): Homolog of NCBI NO: 37536820 NR Description: putative ethylene-forming enzyme
  misc_feature (1)..(333): Homolog of NCBI NO: 15218400 NR Description: flavanone 3-hydroxylase, putative
  misc_feature (1)..(333): Homolog of NCBI NO: 25285681 NR Description: SRG1 homolog [imported] - Arabidopsis thaliana
  misc_feature (1)..(333): Homolog of NCBI NO: 26451337 NR Description: SRG1 like protein [Arabidopsis thaliana]
  misc_feature (1)..(333): Homolog of NCBI NO: 15219986 NR Description: SRG1-like protein; protein id: At1g17010.1
  misc_feature (1)..(333): Homolog of NCBI NO: 15219988 NR Description: SRG1-like protein
  misc_feature (1)..(333): Homolog of NCBI NO: 15235017 NR Description: SRG1-like protein; protein id: At4g25310.1
  misc_feature (1)..(333): Homolog of NCBI NO: 15235014 NR Description: SRG1-like protein; protein id: At4g25300.1
MITTVPPRYVRSDQDVAEIAVDSGLRNQIPIIDFSLLCSSTSMDSEIDKLDSACKEWGFFQLVNHGMESSFLNKVKSEVQDFFNLPMEEKKNLWQQPDEIEGFRQVFVVSEEQKLDWADMFFLTMQPVRLRKPHLFPKLPLPFRDTLDMYSTEVKSIAKILLGKIAVALKIKPEEMDRLFDDELGQRIRLNYYPPCPEPDKVIGLTPHSDSTGLTILLQANEVEGLQIKKNGKWVSVKPLPNALVVNVGDILEIITNSTYRSIEHRGVVNSEKERLSVAAFHNIGLGKEIGPMRSLVERHKAAFFKSVTTEEYFHGLFSRELDGKAYLDVMRL

SEQ ID NO: 25650 - DNA, 1046 bp, Arabidopsis thaliana
  misc_feature (1)..(1046): Ceres Seq. ID no. 13488537
  misc_feature: MA Experiment ID: 108434 Result: Up-regulated in Transcription
  misc_feature: MA Experiment 108434 PARAMETER Experiment Name: At_Root_Tips_cDNA_P Parameter: Tissue Value: Root Tips
  misc_feature: MA Experiment ID: 108462 Result: Down-regulated in Transcription
  misc_feature: MA Experiment 108462 PARAMETER Experiment Name: At_Germinating_Seeds_cDNA_P Parameter: Age (day) Value: 2 vs. 0
  misc_feature: MA Experiment 108462 PARAMETER Experiment Name: At_Germinating_Seeds_cDNA_P Parameter: Tissue Value: Germinating Seeds
  misc_feature: MA Experiment ID: 108463 Result: Down-regulated in Transcription
  misc_feature: MA Experiment 108463 PARAMETER Experiment Name: At_Germinating_Seeds_cDNA_P Parameter: Age (day) Value: 3 vs. 0
  misc_feature: MA Experiment 108463 PARAMETER Experiment Name: At_Germinating_Seeds_cDNA_P Parameter: Tissue Value: Germinating Seeds
  misc_feature: MA Experiment ID: 108464 Result: Down-regulated in Transcription
  misc_feature: MA Experiment 108464 PARAMETER Experiment Name: At_Germinating_Seeds_cDNA_P Parameter: Age (day) Value: 4 vs. 0
  misc_feature: MA Experiment 108464 PARAMETER Experiment Name: At_Germinating_Seeds_cDNA_P Parameter: Tissue Value: Germinating Seeds
  misc_feature: MA Experiment ID: 20000179 Result: Down-regulated in Transcription
  misc_feature: MA Experiment 20000179 PARAMETER Experiment Name: At_Germinating_Seeds_P Parameter: Age (hr) Value: 6 vs. 0
  misc_feature: MA Experiment 20000179 PARAMETER Experiment Name: At_Germinating_Seeds_P Parameter: Tissue Value: Germinating Seeds
  misc_feature: MA Experiment ID: 20000180 Result: Down-regulated in Transcription
  misc_feature: MA Experiment 20000180 PARAMETER Experiment Name: At_Germinating_Seeds_P Parameter: Age (hr) Value: 24 vs. 0
  misc_feature: MA Experiment 20000180 PARAMETER Experiment Name: At_Germinating_Seeds_P Parameter: Tissue Value: Germinating Seeds
  misc_feature: MA Experiment ID: 20000224 Result: Down-regulated in Transcription
  misc_feature: MA Experiment ID: 20000227 Result: Up-regulated in Transcription
  misc_feature: MA Experiment 20000227 PARAMETER Experiment Name: At_Root-Tips-vs-Tops_P Parameter: Tissue Value: Root Tips vs. Root Tops
  misc_feature: Phenotype: FERTILITY Fertility-Reduced
  misc_feature: Phenotype: SENESCENCE TIME Senescence Time-Early Senescence
  misc_feature: Phenotype: FERTILITY Fertility-Reduced
  misc_feature: Phenotype: FERTILITY Fertility-Reduced
tgaacgcaggcagagattcttcgaacttgatatttgggaaacttgcaatccgattctgtcaccagtgttttgccttcataaatggagtttgttgttgaagaaggaaagctagtgaatgaagattgctcgactttagttctcccagcattgtcaattgggaatgtaggacagctcgctgttgatcttctagtgtcatctactggtgcagagagagttggttatcttgatgatccaaatctgcttccttgtgttggaaatgatgcttatggccctcttccttgtggcgagatcgcccttcctctcgaggtttatgagtcatcttcaattgctactacccttgctcagcaacggtctccagttgcaaagggaatgatgattaaatttgcggagaatatagccaattttgctgcttcaagtggaaagaagcacatcattgtgttatcgagtttagacttccaaaggctgcataacttggatatgtcgagaggcccacaggtgtattatctgtctaacgctgaatctgatggaagagatggtcactgtgaaaggcttgggtttggaagattgcacgagtatgattcagaaggaagatgttggaagtaccttagctctgtctttgaaaagaacagtgtagaagagctggcgttgccttcagaagatgaacttgaagacatggactactatccaagcttgccatttgcagctcttttctcagcttttaaggcaagaggcttgaagatgacatgcctgctatgttactgttctgaaggagacaacattcctgaagcatttcttctagctgaggcttcatctaagcttatgggtctgactcctgacaagttccatggggaagaaggtgggaaatgggagataccgtattcatggaagagtatgtatggagctcctccggatatgtctatgttttaagactgttgttggagctcacagtgtcagacaccgaggttgttgtagtggtacaattatgatccaatgagaagtttatgaacatttgagatggtttaatccgatagagacaccttttcttt

SEQ ID NO: 25651 - protein, 281 aa, Arabidopsis thaliana
  peptide (1)..(281): Ceres Seq. ID no. 13488538
  misc_feature (17)..(143): Homolog of NCBI NO: 27680767 NR Description: similar to Clast3 protein; expressed sequence
  misc_feature (17)..(143): Homolog of NCBI NO: 19527372 NR Description: Clast3 protein [Mus musculus]
  misc_feature (11)..(143): Homolog of NCBI NO: 7634785 NR Description: HDCMC29P [Homo sapiens]
  misc_feature (17)..(143): Homolog of NCBI NO: 22726189 NR Description: hepatocellular carcinoma susceptibility protein
  misc_feature (11)..(143): Homolog of NCBI NO: 6841170 NR Description: HSPC260 [Homo sapiens]
  misc_feature (17)..(164): Homolog of NCBI NO: 37589726 NR Description: Unknown (protein for MGC:73278) [Danio rerio]
  misc_feature (17)..(148): Homolog of NCBI NO: 28829982 NR Description: similar to Arabidopsis thaliana (Mouse-ear
  misc_feature (100)..(281): Homolog of NCBI NO: 30794081 NR Description: unknown protein [Arabidopsis thaliana]
  misc_feature (1)..(281): Homolog of NCBI NO: 21594933 NR Description: unknown [Arabidopsis thaliana]
  misc_feature (1)..(281): Homolog of NCBI NO: 18402055 NR Description: expressed protein [Arabidopsis thaliana]
MEFVVEEGKLVNEDCSTLVLPALSIGNVGQLAVDLLVSSTGAERVGYLDDPNLLPCVGNDAYGPLPCGEIALPLEVYESSSIATTLAQQRSPVAKGMMIKFAENIANFAASSGKKHIIVLSSLDFQRLHNLDMSRGPQVYYLSNAESDGRDGHCERLGFGRLHEYDSEGRCWKYLSSVFEKNSVEELALPSEDELEDMDYYPSLPFAALFSAFKARGLKMTCLLCYCSEGDNIPEAFLLAEASSKLMGLTPDKFHGEEGGKWEIPYSWKSMYGAPPDMSMF

SEQ ID NO: 25652 - protein, 185 aa, Arabidopsis thaliana
  peptide (1)..(185): Ceres Seq. ID no. 13488539
  misc_feature (1)..(47): Homolog of NCBI NO: 27680767 NR Description: similar to Clast3 protein; expressed sequence
  misc_feature (1)..(47): Homolog of NCBI NO: 19527372 NR Description: Clast3 protein [Mus musculus]
  misc_feature (1)..(47): Homolog of NCBI NO: 7634785 NR Description: HDCMC29P [Homo sapiens]
  misc_feature (1)..(47): Homolog of NCBI NO: 22726189 NR Description: hepatocellular carcinoma susceptibility protein
  misc_feature (1)..(47): Homolog of NCBI NO: 6841170 NR Description: HSPC260 [Homo sapiens]
  misc_feature (1)..(68): Homolog of NCBI NO: 37589726 NR Description: Unknown (protein for MGC:73278) [Danio rerio]
  misc_feature (1)..(52): Homolog of NCBI NO: 28829982 NR Description: similar to Arabidopsis thaliana (Mouse-ear
  misc_feature (4)..(185): Homolog of NCBI NO: 30794081 NR Description: unknown protein [Arabidopsis thaliana]
  misc_feature (1)..(185): Homolog of NCBI NO: 21594933 NR Description: unknown [Arabidopsis thaliana]
  misc_feature (1)..(185): Homolog of NCBI NO: 18402055 NR Description: expressed protein [Arabidopsis thaliana]
MMIKFAENIANFAASSGKKHIIVLSSLDFQRLHNLDMSRGPQVYYLSNAESDGRDGHCERLGFGRLHEYDSEGRCWKYLSSVFEKNSVEELALPSEDELEDMDYYPSLPFAALFSAFKARGLKMTCLLCYCSEGDNIPEAFLLAEASSKLMGLTPDKFHGEEGGKWEIPYSWKSMYGAPPDMSMF

SEQ ID NO: 25653 - protein, 184 aa, Arabidopsis thaliana
  peptide (1)..(184): Ceres Seq. ID no. 13488540
  misc_feature (1)..(46): Homolog of NCBI NO: 27680767 NR Description: similar to Clast3 protein; expressed sequence
  misc_feature (1)..(46): Homolog of NCBI NO: 19527372 NR Description: Clast3 protein [Mus musculus]
  misc_feature (1)..(46): Homolog of NCBI NO: 7634785 NR Description: HDCMC29P [Homo sapiens]
  misc_feature (1)..(46): Homolog of NCBI NO: 22726189 NR Description: hepatocellular carcinoma susceptibility protein
  misc_feature (1)..(46): Homolog of NCBI NO: 6841170 NR Description: HSPC260 [Homo sapiens]
  misc_feature (1)..(67): Homolog of NCBI NO: 37589726 NR Description: Unknown (protein for MGC:73278) [Danio rerio]
  misc_feature (1)..(51): Homolog of NCBI NO: 28829982 NR Description: similar to Arabidopsis thaliana (Mouse-ear
  misc_feature (3)..(184): Homolog of NCBI NO: 30794081 NR Description: unknown protein [Arabidopsis thaliana]
  misc_feature (1)..(184): Homolog of NCBI NO: 21594933 NR Description: unknown [Arabidopsis thaliana]
  misc_feature (1)..(184): Homolog of NCBI NO: 18402055 NR Description: expressed protein [Arabidopsis thaliana]
MIKFAENIANFAASSGKKHIIVLSSLDFQRLHNLDMSRGPQVYYLSNAESDGRDGHCERLGFGRLHEYDSEGRCWKYLSSVFEKNSVEELALPSEDELEDMDYYPSLPFAALFSAFKARGLKMTCLLCYCSEGDNIPEAFLLAEASSKLMGLTPDKFHGEEGGKWEIPYSWKSMYGAPPDMSMF

SEQ ID NO: 25654 - DNA, 806 bp, Arabidopsis thaliana
  misc_feature (1)..(806): Ceres Seq. ID no. 12323422
  misc_feature: MA Experiment ID: 108434 Result: Up-regulated in Transcription
  misc_feature: MA Experiment 108434 PARAMETER Experiment Name: At_Root_Tips_cDNA_P Parameter: Tissue Value: Root Tips
  misc_feature: MA Experiment ID: 108435 Result: Down-regulated in Transcription
  misc_feature: MA Experiment 108435 PARAMETER Experiment Name: At_stm_Mutants_cDNA_P Parameter: Plant Line Value: wt Landsburg vs stm
  misc_feature: MA Experiment 108435 PARAMETER Experiment Name: At_stm_Mutants_cDNA_P Parameter: Tissue Value: Shoot Apical Meristem Region
  misc_feature: MA Experiment ID: 108463 Result: Up-regulated in Transcription
  misc_feature: MA Experiment 108463 PARAMETER Experiment Name: At_Germinating_Seeds_cDNA_P Parameter: Age (day) Value: 3 vs. 0
  misc_feature: MA Experiment 108463 PARAMETER Experiment Name: At_Germinating_Seeds_cDNA_P Parameter: Tissue Value: Germinating Seeds
  misc_feature: MA Experiment ID: 108473 Result: Up-regulated in Transcription
  misc_feature: MA Experiment 108473 PARAMETER Experiment Name: At_Drought_Flowers_cDNA_P Parameter: Timepoint (hr) Value: 7 d
  misc_feature: MA Experiment 108473 PARAMETER Experiment Name: At_Drought_Flowers_cDNA_P Parameter: Tissue Value: Flower
  misc_feature: MA Experiment 108473 PARAMETER Experiment Name: At_Drought_Flowers_cDNA_P Parameter: Treatment Value: Drought vs. No Drought
  misc_feature: MA Experiment ID: 108561 Result: Up-regulated in Transcription
  misc_feature: MA Experiment 108561 PARAMETER Experiment Name: At_100uM_ABA_cDNA_P Parameter: Timepoint (hr) Value: 6
  misc_feature: MA Experiment 108561 PARAMETER Experiment Name: At_100uM_ABA_cDNA_P Parameter: Tissue Value: Aerial
  misc_feature: MA Experiment 108561 PARAMETER Experiment Name: At_100uM_ABA_cDNA_P Parameter: Treatment Value: 100uM ABA vs. No Treatment
  misc_feature: MA Experiment ID: 108574 Result: Down-regulated in Transcription
  misc_feature: MA Experiment 108574 PARAMETER Experiment Name: At_Wounding__cDNA_P Parameter: Timepoint (hr) Value: 1
  misc_feature: MA Experiment 108574 PARAMETER Experiment Name: At_Wounding__cDNA_P Parameter: Tissue Value: Aerial
  misc_feature: MA Experiment 108574 PARAMETER Experiment Name: At_Wounding__cDNA_P Parameter: Treatment Value: Wounding vs. No Wounding
  misc_feature: MA Experiment ID: 108576 Result: Up-regulated in Transcription
  misc_feature: MA Experiment 108576 PARAMETER Experiment Name: At_42deg_Heat_cDNA_P Parameter: Temperature (deg C) Value: 42 vs. 22
  misc_feature: MA Experiment 108576 PARAMETER Experiment Name: At_42deg_Heat_cDNA_P Parameter: Timepoint (hr) Value: 1
  misc_feature: MA Experiment 108576 PARAMETER Experiment Name: At_42deg_Heat_cDNA_P Parameter: Tissue Value: Aerial
  misc_feature: MA Experiment ID: 108579 Result: Down-regulated in Transcription
  misc_feature: MA Experiment 108579 PARAMETER Experiment Name: At_4deg_Cold_cDNA_P Parameter: Temperature (deg C) Value: 4 vs. 22
  misc_feature: MA Experiment 108579 PARAMETER Experiment Name: At_4deg_Cold_cDNA_P Parameter: Timepoint (hr) Value: 6
  misc_feature: MA Experiment 108579 PARAMETER Experiment Name: At_4deg_Cold_cDNA_P Parameter: Tissue Value: Aerial
  misc_feature: MA Experiment ID: 108595 Result: Up-regulated in Transcription
  misc_feature: MA Experiment 108595 PARAMETER Experiment Name: At_Ler-pi_Ovule_cDNA_P Parameter: Plant Line Value: null
  misc_feature: MA Experiment ID: 108605 Result: Up-regulated in Transcription
  misc_feature: MA Experiment 108605 PARAMETER Experiment Name: At_100uM_ABA_cDNA_P Parameter: Timepoint (hr) Value: 6
  misc_feature: MA Experiment 108605 PARAMETER Experiment Name: At_100uM_ABA_cDNA_P Parameter: Tissue Value: Aerial
  misc_feature: MA Experiment 108605 PARAMETER Experiment Name: At_100uM_ABA_cDNA_P Parameter: Treatment Value: 100uM ABA vs. No Treatment
  misc_feature: MA Experiment ID: 108607 Result: Up-regulated in Transcription
  misc_feature: MA Experiment 108607 PARAMETER Experiment Name: At_100uM_ABA_cDNA_P Parameter: Timepoint (hr) Value: 4
  misc_feature: MA Experiment 108607 PARAMETER Experiment Name: At_100uM_ABA_cDNA_P Parameter: Tissue Value: Aerial
  misc_feature: MA Experiment 108607 PARAMETER Experiment Name: At_100uM_ABA_cDNA_P Parameter: Treatment Value: 100uM ABA vs. No Treatment
  misc_feature: MA Experiment ID: 108608 Result: Up-regulated in Transcription
  misc_feature: MA Experiment 108608 PARAMETER Experiment Name: At_100uM_ABA_cDNA_P Parameter: Timepoint (hr) Value: 1
  misc_feature: MA Experiment 108608 PARAMETER Experiment Name: At_100uM_ABA_cDNA_P Parameter: Tissue Value: Aerial
  misc_feature: MA Experiment 108608 PARAMETER Experiment Name: At_100uM_ABA_cDNA_P Parameter: Treatment Value: 100uM ABA vs. No Treatment
  misc_feature: MA Experiment ID: 108609 Result: Up-regulated in Transcription
  misc_feature: MA Experiment 108609 PARAMETER Experiment Name: At_100uM_ABA_cDNA_P Parameter: Timepoint (hr) Value: 24
  misc_feature: MA Experiment 108609 PARAMETER Experiment Name: At_100uM_ABA_cDNA_P Parameter: Tissue Value: Aerial
  misc_feature: MA Experiment 108609 PARAMETER Experiment Name: At_100uM_ABA_cDNA_P Parameter: Treatment Value: 100uM ABA vs. No Treatment
  misc_feature: MA Experiment ID: 20000069 Result: Up-regulated in Transcription
  misc_feature: MA Experiment 20000069 PARAMETER Experiment Name: At_100uM_ABA_Mutants_cDNA_P Parameter: Plant Line Value: CS23
  misc_feature: MA Experiment 20000069 PARAMETER Experiment Name: At_100uM_ABA_Mutants_cDNA_P Parameter: Timepoint (hr) Value: 6
  misc_feature: MA Experiment 20000069 PARAMETER Experiment Name: At_100uM_ABA_Mutants_cDNA_P Parameter: Tissue Value: Aerial
  misc_feature: MA Experiment 20000069 PARAMETER Experiment Name: At_100uM_ABA_Mutants_cDNA_P Parameter: Treatment Value: 100uM ABA vs. No Treatment
  misc_feature: MA Experiment ID: 20000070 Result: Up-regulated in Transcription
  misc_feature: MA Experiment 20000070 PARAMETER Experiment Name: At_100uM_ABA_Mutants_cDNA_P Parameter: Plant Line Value: CS24
  misc_feature: MA Experiment 20000070 PARAMETER Experiment Name: At_100uM_ABA_Mutants_cDNA_P Parameter: Timepoint (hr) Value: 6
  misc_feature: MA Experiment 20000070 PARAMETER Experiment Name: At_100uM_ABA_Mutants_cDNA_P Parameter: Tissue Value: Aerial
  misc_feature: MA Experiment 20000070 PARAMETER Experiment Name: At_100uM_ABA_Mutants_cDNA_P Parameter: Treatment Value: 100uM ABA vs. No Treatment
  misc_feature: MA Experiment ID: 20000071 Result: Up-regulated in Transcription
  misc_feature: MA Experiment 20000071 PARAMETER Experiment Name: At_100uM_ABA_Mutants_cDNA_P Parameter: Plant Line Value: CS8104
  misc_feature: MA Experiment 20000071 PARAMETER Experiment Name: At_100uM_ABA_Mutants_cDNA_P Parameter: Timepoint (hr) Value: 6
  misc_feature: MA Experiment 20000071 PARAMETER Experiment Name: At_100uM_ABA_Mutants_cDNA_P Parameter: Tissue Value: Aerial
  misc_feature: MA Experiment 20000071 PARAMETER Experiment Name: At_100uM_ABA_Mutants_cDNA_P Parameter: Treatment Value: 100uM ABA vs. No Treatment
  misc_feature: MA Experiment ID: 20000072 Result: Up-regulated in Transcription
  misc_feature: MA Experiment 20000072 PARAMETER Experiment Name: At_100uM_ABA_Mutants_cDNA_P Parameter: Plant Line Value: CS8105
  misc_feature: MA Experiment 20000072 PARAMETER Experiment Name: At_100uM_ABA_Mutants_cDNA_P Parameter: Timepoint (hr) Value: 6
  misc_feature: MA Experiment 20000072 PARAMETER Experiment Name: At_100uM_ABA_Mutants_cDNA_P Parameter: Tissue Value: Aerial
  misc_feature: MA Experiment 20000072 PARAMETER Experiment Name: At_100uM_ABA_Mutants_cDNA_P Parameter: Treatment Value: 100uM ABA vs. No Treatment
  misc_feature: MA Experiment ID: 20000086 Result: Up-regulated in Transcription
  misc_feature: MA Experiment 20000086 PARAMETER Experiment Name: At_100uM_ABA_Mutants_cDNA_P Parameter: Plant Line Value: CS22
  misc_feature: MA Experiment 20000086 PARAMETER Experiment Name: At_100uM_ABA_Mutants_cDNA_P Parameter: Timepoint (hr) Value: 6
  misc_feature: MA Experiment 20000086 PARAMETER Experiment Name: At_100uM_ABA_Mutants_cDNA_P Parameter: Tissue Value: Aerial
  misc_feature: MA Experiment 20000086 PARAMETER Experiment Name: At_100uM_ABA_Mutants_cDNA_P Parameter: Treatment Value: 100uM ABA vs. No Treatment
  misc_feature: MA Experiment ID: 20000087 Result: Up-regulated in Transcription
  misc_feature: MA Experiment 20000087 PARAMETER Experiment Name: At_100uM_ABA_Mutants_cDNA_P Parameter: Plant Line Value: WS
  misc_feature: MA Experiment 20000087 PARAMETER Experiment Name: At_100uM_ABA_Mutants_cDNA_P Parameter: Timepoint (hr) Value: 6
  misc_feature: MA Experiment 20000087 PARAMETER Experiment Name: At_100uM_ABA_Mutants_cDNA_P Parameter: Tissue Value: Aerial
  misc_feature: MA Experiment 20000087 PARAMETER Experiment Name: At_100uM_ABA_Mutants_cDNA_P Parameter: Treatment Value: 100uM ABA vs. No Treatment
  misc_feature: MA Experiment ID: 20000088 Result: Up-regulated in Transcription
  misc_feature: MA Experiment 20000088 PARAMETER Experiment Name: At_100uM_ABA_Mutants_cDNA_P Parameter: Plant Line Value: Landsberg
  misc_feature: MA Experiment 20000088 PARAMETER Experiment Name: At_100uM_ABA_Mutants_cDNA_P Parameter: Timepoint (hr) Value: 6
  misc_feature: MA Experiment 20000088 PARAMETER Experiment Name: At_100uM_ABA_Mutants_cDNA_P Parameter: Tissue Value: Aerial
  misc_feature: MA Experiment 20000088 PARAMETER Experiment Name: At_100uM_ABA_Mutants_cDNA_P Parameter: Treatment Value: 100uM ABA vs. No Treatment
  misc_feature: MA Experiment ID: 20000089 Result: Up-regulated in Transcription
  misc_feature: MA Experiment ID: 20000090 Result: Up-regulated in Transcription
  misc_feature: MA Experiment ID: 20000093 Result: Up-regulated in Transcription
  misc_feature: MA Experiment 20000093 PARAMETER Experiment Name: At_42deg_Heat_cDNA_P Parameter: Temperature (deg C) Value: 42 vs. 22
  misc_feature: MA Experiment 20000093 PARAMETER Experiment Name: At_42deg_Heat_cDNA_P Parameter: Timepoint (hr) Value: 0.5
  misc_feature: MA Experiment 20000093 PARAMETER Experiment Name: At_42deg_Heat_cDNA_P Parameter: Tissue Value: Aerial
  misc_feature: MA Experiment ID: 20000112 Result: Up-regulated in Transcription
  misc_feature: MA Experiment 20000112 PARAMETER Experiment Name: At_42deg_Heat_cDNA_P Parameter: Temperature (deg C) Value: 42 vs. 22
  misc_feature: MA Experiment 20000112 PARAMETER Experiment Name: At_42deg_Heat_cDNA_P Parameter: Timepoint (hr) Value: 2
  misc_feature: MA Experiment 20000112 PARAMETER Experiment Name: At_42deg_Heat_cDNA_P Parameter: Tissue Value: Aerial
  misc_feature: MA Experiment ID: 20000117 Result: Up-regulated in Transcription
  misc_feature: MA Experiment 20000117 PARAMETER Experiment Name: At_100uM_ABA_Mutants_cDNA_P Parameter: Plant Line Value: Columbia
  misc_feature: MA Experiment 20000117 PARAMETER Experiment Name: At_100uM_ABA_Mutants_cDNA_P Parameter: Timepoint (hr) Value: 6
  misc_feature: MA Experiment 20000117 PARAMETER Experiment Name: At_100uM_ABA_Mutants_cDNA_P Parameter: Tissue Value: Aerial
  misc_feature: MA Experiment 20000117 PARAMETER Experiment Name: At_100uM_ABA_Mutants_cDNA_P Parameter: Treatment Value: 100uM ABA vs. No Treatment
  misc_feature: MA Experiment ID: 20000144 Result: Up-regulated in Transcription
  misc_feature: MA Experiment 20000144 PARAMETER Experiment Name: At_42deg_Heat_cDNA_P Parameter: Temperature (deg C) Value: 42 vs. 22
  misc_feature: MA Experiment 20000144 PARAMETER Experiment Name: At_42deg_Heat_cDNA_P Parameter: Timepoint (hr) Value: 1
  misc_feature: MA Experiment 20000144 PARAMETER Experiment Name: At_42deg_Heat_cDNA_P Parameter: Tissue Value: Aerial
  misc_feature: MA Experiment ID: 20000169 Result: Up-regulated in Transcription
  misc_feature: MA Experiment 20000169 PARAMETER Experiment Name: At_100uM_ABA_P Parameter: Age (day) Value: 14
  misc_feature: MA Experiment 20000169 PARAMETER Experiment Name: At_100uM_ABA_P Parameter: Organism Value: A. thaliana
  misc_feature: MA Experiment 20000169 PARAMETER Experiment Name: At_100uM_ABA_P Parameter: Plant Line Value: WS
  misc_feature: MA Experiment 20000169 PARAMETER Experiment Name: At_100uM_ABA_P Parameter: Timepoint (hr) Value: 6
  misc_feature: MA Experiment 20000169 PARAMETER Experiment Name: At_100uM_ABA_P Parameter: Tissue Value: Aerial
  misc_feature: MA Experiment 20000169 PARAMETER Experiment Name: At_100uM_ABA_P Parameter: Treatment Value: 100uM ABA vs. No Treatment
  misc_feature: MA Experiment ID: 20000171 Result: Up-regulated in Transcription
  misc_feature: MA Experiment 20000171 PARAMETER Experiment Name: At_42deg_Heat_P Parameter: Age (day) Value: 14
  misc_feature: MA Experiment 20000171 PARAMETER Experiment Name: At_42deg_Heat_P Parameter: Organism Value: A. thaliana
  misc_feature: MA Experiment 20000171 PARAMETER Experiment Name: At_42deg_Heat_P Parameter: Plant Line Value: WS
  misc_feature: MA Experiment 20000171 PARAMETER Experiment Name: At_42deg_Heat_P Parameter: Temperature (deg C) Value: 42 vs. 22
  misc_feature: MA Experiment 20000171 PARAMETER Experiment Name: At_42deg_Heat_P Parameter: Timepoint (hr) Value: 1
  misc_feature: MA Experiment 20000171 PARAMETER Experiment Name: At_42deg_Heat_P Parameter: Tissue Value: Aerial
  misc_feature: MA Experiment ID: 20000179 Result: Up-regulated in Transcription
  misc_feature: MA Experiment 20000179 PARAMETER Experiment Name: At_Germinating_Seeds_P Parameter: Age (hr) Value: 6 vs. 0
  misc_feature: MA Experiment 20000179 PARAMETER Experiment Name: At_Germinating_Seeds_P Parameter: Tissue Value: Germinating Seeds
  misc_feature: MA Experiment ID: 20000214 Result: Down-regulated in Transcription
  misc_feature: MA Experiment 20000214 PARAMETER Experiment Name: At_4deg_Cold_P Parameter: Timepoint (hr) Value: 6
  misc_feature: MA Experiment ID: 20000224 Result: Down-regulated in Transcription
  misc_feature: MA Experiment ID: 20000227 Result: Down-regulated in Transcription
  misc_feature: MA Experiment 20000227 PARAMETER Experiment Name: At_Root-Tips-vs-Tops_P Parameter: Tissue Value: Root Tips vs. Root Tops
  misc_feature: MA Experiment ID: 20000234 Result: Down-regulated in Transcription
  misc_feature: MA Experiment 20000234 PARAMETER Experiment Name: At_Siliques_P Parameter: Age (day) Value: 21
  misc_feature: MA Experiment 20000234 PARAMETER Experiment Name: At_Siliques_P Parameter: Organism Value: A. thaliana
  misc_feature: MA Experiment 20000234 PARAMETER Experiment Name: At_Siliques_P Parameter: Plant Line Value: WS
  misc_feature: MA Experiment 20000234 PARAMETER Experiment Name: At_Siliques_P Parameter: Tissue Value: Less Than 5mm Siliques vs. Whole Plant
  misc_feature: MA Experiment ID: 20000267 Result: Up-regulated in Transcription
  misc_feature: MA Experiment 20000267 PARAMETER Experiment Name: At_Drought_P Parameter: Age (day) Value: 7
  misc_feature: MA Experiment 20000267 PARAMETER Experiment Name: At_Drought_P Parameter: Organism Value: A. thaliana
  misc_feature: MA Experiment 20000267 PARAMETER Experiment Name: At_Drought_P Parameter: Plant Line Value: WS
  misc_feature: MA Experiment 20000267 PARAMETER Experiment Name: At_Drought_P Parameter: Timepoint (hr) Value: 6
  misc_feature: MA Experiment 20000267 PARAMETER Experiment Name: At_Drought_P Parameter: Tissue Value: Whole Plant
  misc_feature: MA Experiment 20000267 PARAMETER Experiment Name: At_Drought_P Parameter: Treatment Value: Drought vs. No Drought
  misc_feature: MA Experiment ID: 20000286 Result: Down-regulated in Transcription
  misc_feature: MA Experiment 20000286 PARAMETER Experiment Name: At_Open_Flower_P Parameter: Age (day) Value: 21
  misc_feature: MA Experiment 20000286 PARAMETER Experiment Name: At_Open_Flower_P Parameter: Plant Line Value: WS
  misc_feature: MA Experiment 20000286 PARAMETER Experiment Name: At_Open_Flower_P Parameter: Tissue Value: Half Open vs. Whole Plant
  misc_feature: MA Experiment ID: 20000437 Result: Up-regulated in Transcription
  misc_feature: MA Experiment 20000437 PARAMETER Experiment Name: At_Drought_P Parameter: Age (day) Value: 8
  misc_feature: MA Experiment 20000437 PARAMETER Experiment Name: At_Drought_P Parameter: Organism Value: A. thaliana
  misc_feature: MA Experiment 20000437 PARAMETER Experiment Name: At_Drought_P Parameter: Plant Line Value: WS
  misc_feature: MA Experiment 20000437 PARAMETER Experiment Name: At_Drought_P Parameter: Timepoint (hr) Value: 24
  misc_feature: MA Experiment 20000437 PARAMETER Experiment Name: At_Drought_P Parameter: Tissue Value: Whole Plant
  misc_feature: MA Experiment 20000437 PARAMETER Experiment Name: At_Drought_P Parameter: Treatment Value: Drought vs. No Drought
  misc_feature: MA Experiment ID: 20000453 Result: Up-regulated in Transcription
  misc_feature: MA Experiment 20000453 PARAMETER Experiment Name: At_100uM_ABA_P Parameter: Age (day) Value: 15
  misc_feature: MA Experiment 20000453 PARAMETER Experiment Name: At_100uM_ABA_P Parameter: Organism Value: A. thaliana
  misc_feature: MA Experiment 20000453 PARAMETER Experiment Name: At_100uM_ABA_P Parameter: Plant Line Value: WS
  misc_feature: MA Experiment 20000453 PARAMETER Experiment Name: At_100uM_ABA_P Parameter: Timepoint (hr) Value: 24
  misc_feature: MA Experiment 20000453 PARAMETER Experiment Name: At_100uM_ABA_P Parameter: Tissue Value: Aerial
  misc_feature: MA Experiment 20000453 PARAMETER Experiment Name: At_100uM_ABA_P Parameter: Treatment Value: 100uM ABA vs. No Treatment
  misc_feature: MA Experiment ID: 20000794 Result: Down-regulated in Transcription
  misc_feature: MA Experiment 20000794 PARAMETER Experiment Name: At_Petals_P Parameter: Age (day) Value: 23-25 days
  misc_feature: MA Experiment 20000794 PARAMETER Experiment Name: At_Petals_P Parameter: Plant Line Value: WS
  misc_feature: MA Experiment 20000794 PARAMETER Experiment Name: At_Petals_P Parameter: Tissue Value: Petals vs. Whole plant
  misc_feature: MA Experiment ID: 20001459 Result: Down-regulated in Transcription
  misc_feature: MA Experiment 20001459 PARAMETER Experiment Name: At_50mM_NH4NO3_L-to-H_P Parameter: Age (day) Value: Undefined
  misc_feature: MA Experiment 20001459 PARAMETER Experiment Name: At_50mM_NH4NO3_L-to-H_P Parameter: Organism Value: Undefined
  misc_feature: MA Experiment 20001459 PARAMETER Experiment Name: At_50mM_NH4NO3_L-to-H_P Parameter: Plant Line Value: Undefined
  misc_feature: MA Experiment 20001459 PARAMETER Experiment Name: At_50mM_NH4NO3_L-to-H_P Parameter: Timepoint (hr) Value: 4
  misc_feature: MA Experiment 20001459 PARAMETER Experiment Name: At_50mM_NH4NO3_L-to-H_P Parameter: Tissue Value: Siliques
  misc_feature: MA Experiment 20001459 PARAMETER Experiment Name: At_50mM_NH4NO3_L-to-H_P Parameter: Treatment Value: 50mM NH4NO3 vs. 100mM Manitol
  misc_feature: MA Experiment ID: 20001554 Result: Up-regulated in Transcription
  misc_feature: MA Experiment 20001554 PARAMETER Experiment Name: At_Drought_Soil_Dry_P Parameter: Age (day) Value: 21
  misc_feature: MA Experiment 20001554 PARAMETER Experiment Name: At_Drought_Soil_Dry_P Parameter: Organism Value: A. thaliana
  misc_feature: MA Experiment 20001554 PARAMETER Experiment Name: At_Drought_Soil_Dry_P Parameter: Plant Line Value: WS
  misc_feature: MA Experiment 20001554 PARAMETER Experiment Name: At_Drought_Soil_Dry_P Parameter: Post Timepoint (hr) Value: None
  misc_feature: MA Experiment 20001554 PARAMETER Experiment Name: At_Drought_Soil_Dry_P Parameter: Post-Treatment Value: None
  misc_feature: MA Experiment 20001554 PARAMETER Experiment Name: At_Drought_Soil_Dry_P Parameter: Timepoint (day) Value: 7
  misc_feature: MA Experiment 20001554 PARAMETER Experiment Name: At_Drought_Soil_Dry_P Parameter: Treatment Value: Drought vs. No Drought
  misc_feature: MA Experiment ID: 20001555 Result: Up-regulated in Transcription
  misc_feature: MA Experiment 20001555 PARAMETER Experiment Name: At_Drought_Soil_Dry_P Parameter: Age (day) Value: 24
  misc_feature: MA Experiment 20001555 PARAMETER Experiment Name: At_Drought_Soil_Dry_P Parameter: Organism Value: A. thaliana
  misc_feature: MA Experiment 20001555 PARAMETER Experiment Name: At_Drought_Soil_Dry_P Parameter: Plant Line Value: WS
  misc_feature: MA Experiment 20001555 PARAMETER Experiment Name: At_Drought_Soil_Dry_P Parameter: Post Timepoint (hr) Value: None
  misc_feature: MA Experiment 20001555 PARAMETER Experiment Name: At_Drought_Soil_Dry_P Parameter: Post-Treatment Value: None
  misc_feature: MA Experiment 20001555 PARAMETER Experiment Name: At_Drought_Soil_Dry_P Parameter: Timepoint (day) Value: 10
  misc_feature: MA Experiment 20001555 PARAMETER Experiment Name: At_Drought_Soil_Dry_P Parameter: Treatment Value: Drought vs. No Drought
  misc_feature: MA Experiment ID: 20001556 Result: Up-regulated in Transcription
  misc_feature: MA Experiment 20001556 PARAMETER Experiment Name: At_Drought_Soil_Dry_P Parameter: Age (day) Value: 26
  misc_feature: MA Experiment 20001556 PARAMETER Experiment Name: At_Drought_Soil_Dry_P Parameter: Organism Value: A. thaliana
  misc_feature: MA Experiment 20001556 PARAMETER Experiment Name: At_Drought_Soil_Dry_P Parameter: Plant Line Value: WS
  misc_feature: MA Experiment 20001556 PARAMETER Experiment Name: At_Drought_Soil_Dry_P Parameter: Post Timepoint (hr) Value: None
  misc_feature: MA Experiment 20001556 PARAMETER Experiment Name: At_Drought_Soil_Dry_P Parameter: Post-Treatment Value: None
  misc_feature: MA Experiment 20001556 PARAMETER Experiment Name: At_Drought_Soil_Dry_P Parameter: Timepoint (day) Value: 12
  misc_feature: MA Experiment 20001556 PARAMETER Experiment Name: At_Drought_Soil_Dry_P Parameter: Treatment Value: Drought vs. No Drought
  misc_feature: MA Experiment ID: 20001557 Result: Down-regulated in Transcription
  misc_feature: MA Experiment 20001557 PARAMETER Experiment Name: At_Drought_Soil_Dry_P Parameter: Age (day) Value: 27
  misc_feature: MA Experiment 20001557 PARAMETER Experiment Name: At_Drought_Soil_Dry_P Parameter: Organism Value: A. thaliana
  misc_feature: MA Experiment 20001557 PARAMETER Experiment Name: At_Drought_Soil_Dry_P Parameter: Plant Line Value: WS
  misc_feature: MA Experiment 20001557 PARAMETER Experiment Name: At_Drought_Soil_Dry_P Parameter: Post Timepoint (hr) Value: 3
  misc_feature: MA Experiment 20001557 PARAMETER Experiment Name: At_Drought_Soil_Dry_P Parameter: Post-Treatment Value: Re-Water vs. No Drought
  misc_feature: MA Experiment 20001557 PARAMETER Experiment Name: At_Drought_Soil_Dry_P Parameter: Timepoint (day) Value: 13
  misc_feature: MA Experiment 20001557 PARAMETER Experiment Name: At_Drought_Soil_Dry_P Parameter: Treatment Value: Drought vs. No Drought
  misc_feature: MA Experiment ID: 20001558 Result: Down-regulated in Transcription
  misc_feature: MA Experiment 20001558 PARAMETER Experiment Name: At_Drought_Soil_Dry_P Parameter: Age (day) Value: 27
  misc_feature: MA Experiment 20001558 PARAMETER Experiment Name: At_Drought_Soil_Dry_P Parameter: Organism Value: A. thaliana
  misc_feature: MA Experiment 20001558 PARAMETER Experiment Name: At_Drought_Soil_Dry_P Parameter: Plant Line Value: WS
  misc_feature: MA Experiment 20001558 PARAMETER Experiment Name: At_Drought_Soil_Dry_P Parameter: Post Timepoint (hr) Value: 6
  misc_feature: MA Experiment 20001558 PARAMETER Experiment Name: At_Drought_Soil_Dry_P Parameter: Post-Treatment Value: Re-Water vs. No Drought
  misc_feature: MA Experiment 20001558 PARAMETER Experiment Name: At_Drought_Soil_Dry_P Parameter: Timepoint (day) Value: 13
  misc_feature: MA Experiment 20001558 PARAMETER Experiment Name: At_Drought_Soil_Dry_P Parameter: Treatment Value: Drought vs. No Drought
  misc_feature: MA Experiment ID: 20001560 Result: Down-regulated in Transcription
  misc_feature: MA Experiment 20001560 PARAMETER Experiment Name: At_Drought_Soil_Dry_P Parameter: Age (day) Value: 28
  misc_feature: MA Experiment 20001560 PARAMETER Experiment Name: At_Drought_Soil_Dry_P Parameter: Organism Value: A. thaliana
  misc_feature: MA Experiment 20001560 PARAMETER Experiment Name: At_Drought_Soil_Dry_P Parameter: Plant Line Value: WS
  misc_feature: MA Experiment 20001560 PARAMETER Experiment Name: At_Drought_Soil_Dry_P Parameter: Post Timepoint (hr) Value: None
  misc_feature: MA Experiment 20001560 PARAMETER Experiment Name: At_Drought_Soil_Dry_P Parameter: Post-Treatment Value: None
  misc_feature: MA Experiment 20001560 PARAMETER Experiment Name: At_Drought_Soil_Dry_P Parameter: Timepoint (day) Value: 14
  misc_feature: MA Experiment 20001560 PARAMETER Experiment Name: At_Drought_Soil_Dry_P Parameter: Treatment Value: Drought vs. No Drought
gctctaagacccagtttgactcgttgatcaacgaaaggtaacgacaaaactcagatttccgatttcattactatgaatcgattcgaatttctgagtttctgactttgtttcagtgtgagtttgaggtgaaagatgacggcgacgatagatcggaggttatcaacgctgaatccaaacgcgccggtgtttgatccggtggaatttcgtgaggtggaggatttttcaccgaaatggtgggatctagtaacgacttcgaaatggttccgtgacttttggctcagtgctaactctgagtatgagttcctcggcggcgacgatttctcagttatggaagaagagttcgaggagatgatcgcatcgtctgatggtggatccatggctgatacagttacaggtaacgatttgtttactgttttaaaattagttgagatttagggattcgaaacattcagatctgaggatttttgtgtgttttaatggcagaagcagatgtggctagttatttgaagatgcttttgaatatagcggagtctacgaaagagaagatttatagatcgaaggtttcgtcttgttcaccaaagtataatcagaagaagtacatgaatccgaactttaattgtcgccggaatcatcatatctatcagccacggtgaagcttctagaaggaacaaagctcttcttcttcttctttcgagatgataatcagagtcgtgtctgtgtttatggctgaatctgatcttttctgctttcttgttttttgtaattctgtgaatattcctactttctataataacatcactttatgc

SEQ ID NO: 25655 - protein, 100 aa, Arabidopsis thaliana
  peptide (1)..(100): Ceres Seq. ID no. 12323423
  misc_feature (3)..(63): Homolog of NCBI NO: 21592689 NR Description: ERD15 protein [Arabidopsis thaliana]
  misc_feature (3)..(63): Homolog of NCBI NO: 15227351 NR Description: ERD15 protein
  misc_feature (9)..(92): Homolog of NCBI NO: 34899128 NR Description: P0496C02.30 [Oryza sativa (japonica
  misc_feature (9)..(92): Homolog of NCBI NO: 34395186 NR Description: unknown protein [Oryza sativa (japonica
  misc_feature (10)..(78): Homolog of NCBI NO: 8489786 NR Description: dehydration-induced protein ERD15 [Lycopersicon
  misc_feature (1)..(98): Homolog of NCBI NO: 7485087 NR Description: hypothetical protein - Arabidopsis thaliana
  misc_feature (1)..(98): Homolog of NCBI NO: 21592596 NR Description: unknown [Arabidopsis thaliana]
  misc_feature (1)..(98): Homolog of NCBI NO: 18414176 NR Description: Expressed protein
MTATIDRRLSTLNPNAPVFDPVEFREVEDFSPKWWDLVTTSKWFRDFWLSANSEYEFLGGDDFSVMEEEFEEMIASSDGGSMADTVTGNDLFTVLKLVEI

SEQ ID NO: 25656 - protein, 58 aa, Arabidopsis thaliana
  peptide (1)..(58): Ceres Seq. ID no. 12323424
  misc_feature (1)..(39): Homolog of NCBI NO: 7485087 NR Description: hypothetical protein - Arabidopsis thaliana
  misc_feature (1)..(58): Homolog of NCBI NO: 21592596 NR Description: unknown [Arabidopsis thaliana]
  misc_feature (1)..(58): Homolog of NCBI NO: 18414176 NR Description: Expressed protein
MAEADVASYLKMLLNIAESTKEKIYRSKVSSCSPKYNQKKYMNPNFNCRRNHHIYQPR

SEQ ID NO: 25657 - DNA, 975 bp, Arabidopsis thaliana
  misc_feature (1)..(975): Ceres Seq. ID no. 12481710
  misc_feature: MA Experiment ID: 20000234 Result: Down-regulated in Transcription
  misc_feature: MA Experiment 20000234 PARAMETER Experiment Name: At_Siliques_P Parameter: Age (day) Value: 21
  misc_feature: MA Experiment 20000234 PARAMETER Experiment Name: At_Siliques_P Parameter: Organism Value: A. thaliana
  misc_feature: MA Experiment 20000234 PARAMETER Experiment Name: At_Siliques_P Parameter: Plant Line Value: WS
  misc_feature: MA Experiment 20000234 PARAMETER Experiment Name: At_Siliques_P Parameter: Tissue Value: Less Than 5mm Siliques vs. Whole Plant
  misc_feature: MA Experiment ID: 20000235 Result: Down-regulated in Transcription
  misc_feature: MA Experiment 20000235 PARAMETER Experiment Name: At_Siliques_P Parameter: Age (day) Value: 21
  misc_feature: MA Experiment 20000235 PARAMETER Experiment Name: At_Siliques_P Parameter: Organism Value: A. thaliana
  misc_feature: MA Experiment 20000235 PARAMETER Experiment Name: At_Siliques_P Parameter: Plant Line Value: WS
  misc_feature: MA Experiment 20000235 PARAMETER Experiment Name: At_Siliques_P Parameter: Tissue Value: 5-10mm Siliques vs. Whole Plant
  misc_feature: MA Experiment ID: 20000264 Result: Down-regulated in Transcription
  misc_feature: MA Experiment 20000264 PARAMETER Experiment Name: At_Open_Flower_P Parameter: Age (day) Value: 21
  misc_feature: MA Experiment 20000264 PARAMETER Experiment Name: At_Open_Flower_P Parameter: Plant Line Value: WS
  misc_feature: MA Experiment 20000264 PARAMETER Experiment Name: At_Open_Flower_P Parameter: Tissue Value: Open Flower vs. Whole Plant
  misc_feature: MA Experiment ID: 20000265 Result: Down-regulated in Transcription
  misc_feature: MA Experiment 20000265 PARAMETER Experiment Name: At_Open_Flower_P Parameter: Age (day) Value: 21
  misc_feature: MA Experiment 20000265 PARAMETER Experiment Name: At_Open_Flower_P Parameter: Plant Line Value: WS
  misc_feature: MA Experiment 20000265 PARAMETER Experiment Name: At_Open_Flower_P Parameter: Tissue Value: Closed Flower vs. Whole Plant
  misc_feature: MA Experiment ID: 20000286 Result: Down-regulated in Transcription
  misc_feature: MA Experiment 20000286 PARAMETER Experiment Name: At_Open_Flower_P Parameter: Age (day) Value: 21
  misc_feature: MA Experiment 20000286 PARAMETER Experiment Name: At_Open_Flower_P Parameter: Plant Line Value: WS
  misc_feature: MA Experiment 20000286 PARAMETER Experiment Name: At_Open_Flower_P Parameter: Tissue Value: Half Open vs. Whole Plant
  misc_feature: MA Experiment ID: 20000438 Result: Down-regulated in Transcription
  misc_feature: MA Experiment 20000438 PARAMETER Experiment Name: At_Shoots__P Parameter: Age (day) Value: 14
  misc_feature: MA Experiment 20000438 PARAMETER Experiment Name: At_Shoots__P Parameter: Tissue Value: Shoots vs. Whole Plant
  misc_feature: MA Experiment ID: 20001248 Result: Up-regulated in Transcription
  misc_feature: MA Experiment 20001248 PARAMETER Experiment Name: At_Far-red-induction_P Parameter: Age (day) Value: 7
  misc_feature: MA Experiment 20001248 PARAMETER Experiment Name: At_Far-red-induction_P Parameter: Light Value: Far-red vs. White
  misc_feature: MA Experiment 20001248 PARAMETER Experiment Name: At_Far-red-induction_P Parameter: Organism Value: A. thaliana
  misc_feature: MA Experiment 20001248 PARAMETER Experiment Name: At_Far-red-induction_P Parameter: Plant Line Value: Columbia
  misc_feature: MA Experiment 20001248 PARAMETER Experiment Name: At_Far-red-induction_P Parameter: Timepoint (hr) Value: 4
  misc_feature: MA Experiment 20001248 PARAMETER Experiment Name: At_Far-red-induction_P Parameter: Tissue Value: Whole Plant
  misc_feature: MA Experiment ID: 20001450 Result: Up-regulated in Transcription
  misc_feature: MA Experiment 20001450 PARAMETER Experiment Name: At_Far-red-induction_P Parameter: Age (day) Value: 7
  misc_feature: MA Experiment 20001450 PARAMETER Experiment Name: At_Far-red-induction_P Parameter: Light Value: Far-red vs. White
  misc_feature: MA Experiment 20001450 PARAMETER Experiment Name: At_Far-red-induction_P Parameter: Organism Value: A. thaliana
  misc_feature: MA Experiment 20001450 PARAMETER Experiment Name: At_Far-red-induction_P Parameter: Plant Line Value: Columbia
  misc_feature: MA Experiment 20001450 PARAMETER Experiment Name: At_Far-red-induction_P Parameter: Timepoint (hr) Value: 8
  misc_feature: MA Experiment 20001450 PARAMETER Experiment Name: At_Far-red-induction_P Parameter: Tissue Value: Whole Plant
  misc_feature: MA Experiment ID: 20001451 Result: Up-regulated in Transcription
  misc_feature: MA Experiment 20001451 PARAMETER Experiment Name: At_Far-red-induction_P Parameter: Age (day) Value: 7
  misc_feature: MA Experiment 20001451 PARAMETER Experiment Name: At_Far-red-induction_P Parameter: Light Value: Far-red vs. White
  misc_feature: MA Experiment 20001451 PARAMETER Experiment Name: At_Far-red-induction_P Parameter: Organism Value: A. thaliana
  misc_feature: MA Experiment 20001451 PARAMETER Experiment Name: At_Far-red-induction_P Parameter: Plant Line Value: Columbia
  misc_feature: MA Experiment 20001451 PARAMETER Experiment Name: At_Far-red-induction_P Parameter: Timepoint (hr) Value: 24
  misc_feature: MA Experiment 20001451 PARAMETER Experiment Name: At_Far-red-induction_P Parameter: Tissue Value: Whole Plant
  misc_feature: MA Experiment ID: 20001905 Result: Down-regulated in Transcription
  misc_feature: MA Experiment 20001905 PARAMETER Experiment Name: At_Drought_Reproduction_P Parameter: Age (day) Value: 40
  misc_feature: MA Experiment 20001905 PARAMETER Experiment Name: At_Drought_Reproduction_P Parameter: Organism Value: A. thaliana
  misc_feature: MA Experiment 20001905 PARAMETER Experiment Name: At_Drought_Reproduction_P Parameter: Plant Line Value: WS
  misc_feature: MA Experiment 20001905 PARAMETER Experiment Name: At_Drought_Reproduction_P Parameter: Timepoint (day) Value: 10
  misc_feature: MA Experiment 20001905 PARAMETER Experiment Name: At_Drought_Reproduction_P Parameter: Tissue Value: Rosettes
  misc_feature: MA Experiment 20001905 PARAMETER Experiment Name: At_Drought_Reproduction_P Parameter: Treatment Value: Drought vs. No Drought
cttcaaaaaactctccactcaactctctctggtcagctgtctcttccccattctctagggttttcaagctcaacctcaagctccactacgatctcttcttcttctctaatctcagttgaaagatgcaaggtgtgattcgatccttcgtctccggtggaaatgttgtgaaaggctctgtgctgcaacatctccgtgtgattaacccggcgattcagccttctgtgttttgttcacgctctgaatcaactcaacctgcacgtatggaggaatctggattcgagagcacaactatttccgatgtcatgaaatccaaaggcaaaagtgctgatggatcttggctttggtgtactactgatgacactgtttatgatgctgttaaatccatgacacaacacaatgttggtgccttggtggttgtgaaacctggtgagcaacaagctcttgctggtatcattacagagagagattatctacggaagatcattgtgcaagggagatcatccaaatcaacaaaagttggagacattatgactgaagagaataagcttatcactgtgacaccggagaccaaggtcttgcgtgctatgcaactgatgacagataaccgaatcaggcatattccggtaatcaaagacaagggcatgattggaatggtgtccataggagatgttgtccgtgcagtggttcatgagcatagagaggagcttcaacgcctaaatgcgtatattcagggaggttactagatcttgaataatggaaagaaaagagttccctgttgtgtcgtctggtcttgtgctgctgaatctgaaaagcttccagatcagtgtaaatatgcagtcctcgttgttattgttgttgttgttgtgtttgatgttttgtgttgtttcgttgtttaacttgtcaaaactaaggccttgtgctgcttctcttcttgcgcttacttagcaagagaataaaaccaaaaactctgatctc

SEQ ID NO: 25658 - protein, 206 aa, Arabidopsis thaliana
  peptide (1)..(206): Ceres Seq. ID no. 12481711
  misc_feature (66)..(121): Pfam Name: CBS domain Pfam Description: CBS domain
  misc_feature (78)..(204): Homolog of NCBI NO: 15595447 NR Description: conserved hypothetical protein [Pseudomonas
  misc_feature (56)..(204): Homolog of NCBI NO: 26986946 NR Description: CBS domain protein [Pseudomonas putida KT2440]
  misc_feature (66)..(206): Homolog of NCBI NO: 22988916 NR Description: hypothetical protein [Burkholderia fungorum]
  misc_feature (48)..(202): Homolog of NCBI NO: 28850322 NR Description: similar to putative protein
  misc_feature (36)..(204): Homolog of NCBI NO: 22984734 NR Description: hypothetical protein [Burkholderia fungorum]
  misc_feature (56)..(203): Homolog of NCBI NO: 34499375 NR Description: conserved hypothetical protein
  misc_feature (1)..(110): Homolog of NCBI NO: 18266206 NR Description: senescence-associated putative protein [Narcissus
  misc_feature (1)..(206): Homolog of NCBI NO: 34913008 NR Description: P0663E10.18 [Oryza sativa (japonica
  misc_feature (1)..(206): Homolog of NCBI NO: 29788876 NR Description: unknown protein [Oryza sativa (japonica
  misc_feature (1)..(206): Homolog of NCBI NO: 15238284 NR Description: putative protein
MQGVIRSFVSGGNVVKGSVLQHLRVINPAIQPSVFCSRSESTQPARMEESGFESTTISDVMKSKGKSADGSWLWCTTDDTVYDAVKSMTQHNVGALVVVKPGEQQALAGIITERDYLRKIIVQGRSSKSTKVGDIMTEENKLITVTPETKVLRAMQLMTDNRIRHIPVIKDKGMIGMVSIGDVVRAVVHEHREELQRLNAYIQGGY

SEQ ID NO: 25659 - protein, 160 aa, Arabidopsis thaliana
  peptide (1)..(160): Ceres Seq. ID no. 12481712
  misc_feature (20)..(75): Pfam Name: CBS domain Pfam Description: CBS domain
  misc_feature (32)..(158): Homolog of NCBI NO: 15595447 NR Description: conserved hypothetical protein [Pseudomonas
  misc_feature (10)..(158): Homolog of NCBI NO: 26986946 NR Description: CBS domain protein [Pseudomonas putida KT2440]
  misc_feature (20)..(160): Homolog of NCBI NO: 22988916 NR Description: hypothetical protein [Burkholderia fungorum]
  misc_feature (2)..(156): Homolog of NCBI NO: 28850322 NR Description: similar to putative protein
  misc_feature (1)..(158): Homolog of NCBI NO: 22984734 NR Description: hypothetical protein [Burkholderia fungorum]
  misc_feature (10)..(157): Homolog of NCBI NO: 34499375 NR Description: conserved hypothetical protein
  misc_feature (1)..(64): Homolog of NCBI NO: 18266206 NR Description: senescence-associated putative protein [Narcissus
  misc_feature (1)..(160): Homolog of NCBI NO: 34913008 NR Description: P0663E10.18 [Oryza sativa (japonica
  misc_feature (1)..(160): Homolog of NCBI NO: 29788876 NR Description: unknown protein [Oryza sativa (japonica
  misc_feature (1)..(160): Homolog of NCBI NO: 15238284 NR Description: putative protein
MEESGFESTTISDVMKSKGKSADGSWLWCTTDDTVYDAVKSMTQHNVGALVVVKPGEQQALAGIITERDYLRKIIVQGRSSKSTKVGDIMTEENKLITVTPETKVLRAMQLMTDNRIRHIPVIKDKGMIGMVSIGDVVRAVVHEHREELQRLNAYIQGGY

SEQ ID NO: 25660 - protein, 146 aa, Arabidopsis thaliana
  peptide (1)..(146): Ceres Seq. ID no. 12481713
  misc_feature (6)..(61): Pfam Name: CBS domain Pfam Description: CBS domain
  misc_feature (18)..(144): Homolog of NCBI NO: 15595447 NR Description: conserved hypothetical protein [Pseudomonas
  misc_feature (1)..(144): Homolog of NCBI NO: 26986946 NR Description: CBS domain protein [Pseudomonas putida KT2440]
  misc_feature (6)..(146): Homolog of NCBI NO: 22988916 NR Description: hypothetical protein [Burkholderia fungorum]
  misc_feature (1)..(142): Homolog of NCBI NO: 28850322 NR Description: similar to putative protein
  misc_feature (1)..(144): Homolog of NCBI NO: 22984734 NR Description: hypothetical protein [Burkholderia fungorum]
  misc_feature (1)..(143): Homolog of NCBI NO: 34499375 NR Description: conserved hypothetical protein
  misc_feature (1)..(50): Homolog of NCBI NO: 18266206 NR Description: senescence-associated putative protein [Narcissus
  misc_feature (1)..(146): Homolog of NCBI NO: 34913008 NR Description: P0663E10.18 [Oryza sativa (japonica
  misc_feature (1)..(146): Homolog of NCBI NO: 29788876 NR Description: unknown protein [Oryza sativa (japonica
  misc_feature (1)..(146): Homolog of NCBI NO: 15238284 NR Description: putative protein
MKSKGKSADGSWLWCTTDDTVYDAVKSMTQHNVGALVVVKPGEQQALAGIITERDYLRKIIVQGRSSKSTKVGDIMTEENKLITVTPETKVLRAMQLMTDNRIRHIPVIKDKGMIGMVSIGDVVRAVVHEHREELQRLNAYIQGGY

SEQ ID NO: 25661 - DNA, 1045 bp, Arabidopsis thaliana
  misc_feature (1)..(1045): Ceres Seq. ID no. 13487337
  misc_feature: MA Experiment ID: 108434 Result: Up-regulated in Transcription
  misc_feature: MA Experiment 108434 PARAMETER Experiment Name: At_Root_Tips_cDNA_P Parameter: Tissue Value: Root Tips
  misc_feature: MA Experiment ID: 108461 Result: Down-regulated in Transcription
  misc_feature: MA Experiment 108461 PARAMETER Experiment Name: At_Germinating_Seeds_cDNA_P Parameter: Age (day) Value: 1 vs. 0
  misc_feature: MA Experiment 108461 PARAMETER Experiment Name: At_Germinating_Seeds_cDNA_P Parameter: Tissue Value: Germinating Seeds
  misc_feature: MA Experiment ID: 108462 Result: Down-regulated in Transcription
  misc_feature: MA Experiment 108462 PARAMETER Experiment Name: At_Germinating_Seeds_cDNA_P Parameter: Age (day) Value: 2 vs. 0
  misc_feature: MA Experiment 108462 PARAMETER Experiment Name: At_Germinating_Seeds_cDNA_P Parameter: Tissue Value: Germinating Seeds
  misc_feature: MA Experiment ID: 108463 Result: Down-regulated in Transcription
  misc_feature: MA Experiment 108463 PARAMETER Experiment Name: At_Germinating_Seeds_cDNA_P Parameter: Age (day) Value: 3 vs. 0
  misc_feature: MA Experiment 108463 PARAMETER Experiment Name: At_Germinating_Seeds_cDNA_P Parameter: Tissue Value: Germinating Seeds
  misc_feature: MA Experiment ID: 108464 Result: Down-regulated in Transcription
  misc_feature: MA Experiment 108464 PARAMETER Experiment Name: At_Germinating_Seeds_cDNA_P Parameter: Age (day) Value: 4 vs. 0
  misc_feature: MA Experiment 108464 PARAMETER Experiment Name: At_Germinating_Seeds_cDNA_P Parameter: Tissue Value: Germinating Seeds
  misc_feature: MA Experiment ID: 108573 Result: Up-regulated in Transcription
  misc_feature: MA Experiment 108573 PARAMETER Experiment Name: At_Drought_cDNA_P Parameter: Timepoint (hr) Value: 6
  misc_feature: MA Experiment 108573 PARAMETER Experiment Name: At_Drought_cDNA_P Parameter: Tissue Value: Aerial
  misc_feature: MA Experiment 108573 PARAMETER Experiment Name: At_Drought_cDNA_P Parameter: Treatment Value: Drought vs. No Drought
  misc_feature: MA Experiment ID: 108585 Result: Up-regulated in Transcription
  misc_feature: MA Experiment 108585 PARAMETER Experiment Name: At_5mM_NaNP_cDNA_P Parameter: Timepoint (hr) Value: 6
  misc_feature: MA Experiment 108585 PARAMETER Experiment Name: At_5mM_NaNP_cDNA_P Parameter: Tissue Value: Aerial
  misc_feature: MA Experiment 108585 PARAMETER Experiment Name: At_5mM_NaNP_cDNA_P Parameter: Treatment Value: null
aaaaaaccaaaaaaaagaaaggagagaggccgacttggggtataagccagagttcttcttctttttcaagcttcttcttctcatcagtcatcaccggaatctaatttatactcgcaaaactcagcgattcgtttcgtttctgacaagtttccaattctacagcaatggatctcaatctcgatgcacctcactccatgggaacgaccatcatcggcgtcacttacaatggaggtgtcgtcctcggagccgactcacgtaccagcaccggtatgtacgtagcgaatcgagcttctgataagattacacaactgacagataatgtctacgtctgccgctctggatcggctgctgattctcaagttgtatctgactatgtccgctacttccttcaccagcatacaattcagcatggacaacccgcaactgttaaggtttctgccaaccttatcaggatgctcgcatataataacaagaacatgctccaaactggtctcatcgttggaggatgggataaatatgagggtgggaagatctacgggatcccactcggtggaactgtagtcgagcaaccgtttgccattggaggctctggttcgagctatctctacgggttcttcgaccaggcttggaaagataacatgaccaaagaagaagcagagcaacttgttgtgaaggcggtttcactagccatcgcccgtgatggagccagtggtggtgtcgtacggactgtcataatcaactcagagggagtgacgagaaacttttaccctggagataagttgcagctttggcacgaagaattggagccccaaaactcactcttagacattctgaacgctgctggtcctgaaccaatggccatgtgatctgcaaacaacgatcattatcttactctgttgggcaaacattttagatatttcattacagtttccagtgtctttaagactttaaactctgtttgaggttctgttgtaatgaatgacccgatctttctgttttaaacggatatcgtgtttcttatggctatggttttaattcctctgtc

SEQ ID NO: 25662 - protein, 233 aa, Arabidopsis thaliana
  peptide (1)..(233): Ceres Seq. ID no. 13487338
  misc_feature (9)..(191): Pfam Name: Proteasome A-type and B-type Pfam Description: Proteasome A-type and B-type
  misc_feature (9)..(191): Pfam Name: Proteasome A-type and B-type Pfam Description: Proteasome A-type and B-type
  misc_feature (10)..(206): Homolog of NCBI NO: 26347247 NR Description: unnamed protein product [Mus musculus]
  misc_feature (10)..(206): Homolog of NCBI NO: 17380261 NR Description: Proteasome subunit beta type 6 precursor delta chain) (Macropain delta chain) (Multicatalytic
  misc_feature (1)..(209): Homolog of NCBI NO: 5823090 NR Description: proteasome delta [Oncorhynchus mykiss]
  misc_feature (11)..(204): Homolog of NCBI NO: 19113087 NR Description: proteasome component precursor
  misc_feature (5)..(209): Homolog of NCBI NO: 7435894 NR Description: proteasome subunit 1 - slime mold (Dictyostelium
  misc_feature (10)..(206): Homolog of NCBI NO: 26347247 NR Description: unnamed protein product [Mus musculus]
  misc_feature (1)..(209): Homolog of NCBI NO: 5823090 NR Description: proteasome delta [Oncorhynchus mykiss]
  misc_feature (5)..(209): Homolog of NCBI NO: 7435894 NR Description: proteasome subunit 1 - slime mold (Dictyostelium
  misc_feature (1)..(233): Homolog of NCBI NO: 15235889 NR Description: 20S proteasome beta subunit A (PBA1) [Arabidopsis
  misc_feature (11)..(233): Homolog of NCBI NO: 21592365 NR Description: multicatalytic endopeptidase complex, proteasome
  misc_feature (4)..(231): Homolog of NCBI NO: 3024440 NR Description: Proteasome subunit beta type 6 precursor
  misc_feature (1)..(231): Homolog of NCBI NO: 8671502 NR Description: beta 1 subunit of 20S proteasome
  misc_feature (2)..(209): Homolog of NCBI NO: 32400975 NR Description: proteasome subunit [Griffithsia japonica]
  misc_feature (11)..(204): Homolog of NCBI NO: 19113087 NR Description: proteasome component precursor
  misc_feature (10)..(206): Homolog of NCBI NO: 17380261 NR Description: Proteasome subunit beta type 6 precursor delta chain) (Macropain delta chain) (Multicatalytic
  misc_feature (2)..(209): Homolog of NCBI NO: 32400975 NR Description: proteasome subunit [Griffithsia japonica]
  misc_feature (1)..(231): Homolog of NCBI NO: 8671502 NR Description: beta 1 subunit of 20S proteasome
  misc_feature (4)..(231): Homolog of NCBI NO: 3024440 NR Description: Proteasome subunit beta type 6 precursor
  misc_feature (11)..(233): Homolog of NCBI NO: 21592365 NR Description: multicatalytic endopeptidase complex, proteasome
  misc_feature (1)..(233): Homolog of NCBI NO: 15235889 NR Description: 20S proteasome beta subunit A (PBA1) [Arabidopsis
MDLNLDAPHSMGTTIIGVTYNGGVVLGADSRTSTGMYVANRASDKITQLTDNVYVCRSGSAADSQVVSDYVRYFLHQHTIQHGQPATVKVSANLIRMLAYNNKNMLQTGLIVGGWDKYEGGKIYGIPLGGTVVEQPFAIGGSGSSYLYGFFDQAWKDNMTKEEAEQLVVKAVSLAIARDGASGGVVRTVIINSEGVTRNFYPGDKLQLWHEELEPQNSLLDILNAAGPEPMAM

SEQ ID NO: 25663 - protein, 223 aa, Arabidopsis thaliana
  peptide (1)..(223): Ceres Seq. ID no. 13487339
  misc_feature (1)..(181): Pfam Name: Proteasome A-type and B-type Pfam Description: Proteasome A-type and B-type
  misc_feature (1)..(181): Pfam Name: Proteasome A-type and B-type Pfam Description: Proteasome A-type and B-type
  misc_feature (1)..(196): Homolog of NCBI NO: 26347247 NR Description: unnamed protein product [Mus musculus]
  misc_feature (1)..(196): Homolog of NCBI NO: 17380261 NR Description: Proteasome subunit beta type 6 precursor delta chain) (Macropain delta chain) (Multicatalytic
  misc_feature (1)..(199): Homolog of NCBI NO: 5823090 NR Description: proteasome delta [Oncorhynchus mykiss]
  misc_feature (1)..(194): Homolog of NCBI NO: 19113087 NR Description: proteasome component precursor
  misc_feature (1)..(199): Homolog of NCBI NO: 7435894 NR Description: proteasome subunit 1 - slime mold (Dictyostelium
  misc_feature (1)..(196): Homolog of NCBI NO: 26347247 NR Description: unnamed protein product [Mus musculus]
  misc_feature (1)..(199): Homolog of NCBI NO: 5823090 NR Description: proteasome delta [Oncorhynchus mykiss]
  misc_feature (1)..(199): Homolog of NCBI NO: 7435894 NR Description: proteasome subunit 1 - slime mold (Dictyostelium
  misc_feature (1)..(223): Homolog of NCBI NO: 15235889 NR Description: 20S proteasome beta subunit A (PBA1) [Arabidopsis
  misc_feature (1)..(223): Homolog of NCBI NO: 21592365 NR Description: multicatalytic endopeptidase complex, proteasome
  misc_feature (1)..(221): Homolog of NCBI NO: 3024440 NR Description: Proteasome subunit beta type 6 precursor
  misc_feature (1)..(221): Homolog of NCBI NO: 8671502 NR Description: beta 1 subunit of 20S proteasome
  misc_feature (1)..(199): Homolog of NCBI NO: 32400975 NR Description: proteasome subunit [Griffithsia japonica]
  misc_feature (1)..(194): Homolog of NCBI NO: 19113087 NR Description: proteasome component precursor
  misc_feature (1)..(196): Homolog of NCBI NO: 17380261 NR Description: Proteasome subunit beta type 6 precursor delta chain) (Macropain delta chain) (Multicatalytic
  misc_feature (1)..(199): Homolog of NCBI NO: 32400975 NR Description: proteasome subunit [Griffithsia japonica]
  misc_feature (1)..(221): Homolog of NCBI NO: 8671502 NR Description: beta 1 subunit of 20S proteasome
  misc_feature (1)..(221): Homolog of NCBI NO: 3024440 NR Description: Proteasome subunit beta type 6 precursor
  misc_feature (1)..(223): Homolog of NCBI NO: 21592365 NR Description: multicatalytic endopeptidase complex, proteasome
  misc_feature (1)..(223): Homolog of NCBI NO: 15235889 NR Description: 20S proteasome beta subunit A (PBA1) [Arabidopsis
MGTTIIGVTYNGGVVLGADSRTSTGMYVANRASDKITQLTDNVYVCRSGSAADSQVVSDYVRYFLHQHTIQHGQPATVKVSANLIRMLAYNNKNMLQTGLIVGGWDKYEGGKIYGIPLGGTVVEQPFAIGGSGSSYLYGFFDQAWKDNMTKEEAEQLVVKAVSLAIARDGASGGVVRTVIINSEGVTRNFYPGDKLQLWHEELEPQNSLLDILNAAGPEPMAM

SEQ ID NO: 25664 - protein, 198 aa, Arabidopsis thaliana
  peptide (1)..(198): Ceres Seq. ID no. 13487340
  misc_feature (1)..(156): Pfam Name: Proteasome A-type and B-type Pfam Description: Proteasome A-type and B-type
  misc_feature (1)..(156): Pfam Name: Proteasome A-type and B-type Pfam Description: Proteasome A-type and B-type
  misc_feature (1)..(171): Homolog of NCBI NO: 26347247 NR Description: unnamed protein product [Mus musculus]
  misc_feature (1)..(171): Homolog of NCBI NO: 17380261 NR Description: Proteasome subunit beta type 6 precursor delta chain) (Macropain delta chain) (Multicatalytic
  misc_feature (1)..(174): Homolog of NCBI NO: 5823090 NR Description: proteasome delta [Oncorhynchus mykiss]
  misc_feature (1)..(169): Homolog of NCBI NO: 19113087 NR Description: proteasome component precursor
  misc_feature (1)..(174): Homolog of NCBI NO: 7435894 NR Description: proteasome subunit 1 - slime mold (Dictyostelium
  misc_feature (1)..(171): Homolog of NCBI NO: 26347247 NR Description: unnamed protein product [Mus musculus]
  misc_feature (1)..(174): Homolog of NCBI NO: 5823090 NR Description: proteasome delta [Oncorhynchus mykiss]
  misc_feature (1)..(174): Homolog of NCBI NO: 7435894 NR Description: proteasome subunit 1 - slime mold (Dictyostelium
  misc_feature (1)..(198): Homolog of NCBI NO: 15235889 NR Description: 20S proteasome beta subunit A (PBA1) [Arabidopsis
  misc_feature (1)..(198): Homolog of NCBI NO: 21592365 NR Description: multicatalytic endopeptidase complex, proteasome
  misc_feature (1)..(196): Homolog of NCBI NO: 3024440 NR Description: Proteasome subunit beta type 6 precursor
  misc_feature (1)..(196): Homolog of NCBI NO: 8671502 NR Description: beta 1 subunit of 20S proteasome
  misc_feature (1)..(174): Homolog of NCBI NO: 32400975 NR Description: proteasome subunit [Griffithsia japonica]
  misc_feature (1)..(169): Homolog of NCBI NO: 19113087 NR Description: proteasome component precursor
  misc_feature (1)..(171): Homolog of NCBI NO: 17380261 NR Description: Proteasome subunit beta type 6 precursor delta chain) (Macropain delta chain) (Multicatalytic
  misc_feature (1)..(174): Homolog of NCBI NO: 32400975 NR Description: proteasome subunit [Griffithsia japonica]
  misc_feature (1)..(196): Homolog of NCBI NO: 8671502 NR Description: beta 1 subunit of 20S proteasome
  misc_feature (1)..(196): Homolog of NCBI NO: 3024440 NR Description: Proteasome subunit beta type 6 precursor
  misc_feature (1)..(198): Homolog of NCBI NO: 21592365 NR Description: multicatalytic endopeptidase complex, proteasome
  misc_feature (1)..(198): Homolog of NCBI NO: 15235889 NR Description: 20S proteasome beta subunit A (PBA1) [Arabidopsis
MYVANRASDKITQLTDNVYVCRSGSAADSQVVSDYVRYFLHQHTIQHGQPATVKVSANLIRMLAYNNKNMLQTGLIVGGWDKYEGGKIYGIPLGGTVVEQPFAIGGSGSSYLYGFFDQAWKDNMTKEEAEQLVVKAVSLAIARDGASGGVVRTVIINSEGVTRNFYPGDKLQLWHEELEPQNSLLDILNAAGPEPMAM

SEQ ID NO: 25665 - DNA, 683 bp, Arabidopsis thaliana
  misc_feature (1)..(683): Ceres Seq. ID no. 12395746
  misc_feature: MA Experiment ID: 20000086 Result: Up-regulated in Transcription
  misc_feature: MA Experiment 20000086 PARAMETER Experiment Name: At_100uM_ABA_Mutants_cDNA_P Parameter: Plant Line Value: CS22
  misc_feature: MA Experiment 20000086 PARAMETER Experiment Name: At_100uM_ABA_Mutants_cDNA_P Parameter: Timepoint (hr) Value: 6
  misc_feature: MA Experiment 20000086 PARAMETER Experiment Name: At_100uM_ABA_Mutants_cDNA_P Parameter: Tissue Value: Aerial
  misc_feature: MA Experiment 20000086 PARAMETER Experiment Name: At_100uM_ABA_Mutants_cDNA_P Parameter: Treatment Value: 100uM ABA vs. No Treatment
  misc_feature: MA Experiment ID: 20000213 Result: Up-regulated in Transcription
  misc_feature: MA Experiment 20000213 PARAMETER Experiment Name: At_4deg_Cold_P Parameter: Timepoint (hr) Value: 2
  misc_feature: MA Experiment ID: 20000437 Result: Up-regulated in Transcription
  misc_feature: MA Experiment 20000437 PARAMETER Experiment Name: At_Drought_P Parameter: Age (day) Value: 8
  misc_feature: MA Experiment 20000437 PARAMETER Experiment Name: At_Drought_P Parameter: Organism Value: A. thaliana
  misc_feature: MA Experiment 20000437 PARAMETER Experiment Name: At_Drought_P Parameter: Plant Line Value: WS
  misc_feature: MA Experiment 20000437 PARAMETER Experiment Name: At_Drought_P Parameter: Timepoint (hr) Value: 24
  misc_feature: MA Experiment 20000437 PARAMETER Experiment Name: At_Drought_P Parameter: Tissue Value: Whole Plant
  misc_feature: MA Experiment 20000437 PARAMETER Experiment Name: At_Drought_P Parameter: Treatment Value: Drought vs. No Drought
  misc_feature: MA Experiment ID: 20000438 Result: Down-regulated in Transcription
  misc_feature: MA Experiment 20000438 PARAMETER Experiment Name: At_Shoots__P Parameter: Age (day) Value: 14
  misc_feature: MA Experiment 20000438 PARAMETER Experiment Name: At_Shoots__P Parameter: Tissue Value: Shoots vs. Whole Plant
  misc_feature: MA Experiment ID: 20001451 Result: Up-regulated in Transcription
  misc_feature: MA Experiment 20001451 PARAMETER Experiment Name: At_Far-red-induction_P Parameter: Age (day) Value: 7
  misc_feature: MA Experiment 20001451 PARAMETER Experiment Name: At_Far-red-induction_P Parameter: Light Value: Far-red vs. White
  misc_feature: MA Experiment 20001451 PARAMETER Experiment Name: At_Far-red-induction_P Parameter: Organism Value: A. thaliana
  misc_feature: MA Experiment 20001451 PARAMETER Experiment Name: At_Far-red-induction_P Parameter: Plant Line Value: Columbia
  misc_feature: MA Experiment 20001451 PARAMETER Experiment Name: At_Far-red-induction_P Parameter: Timepoint (hr) Value: 24
  misc_feature: MA Experiment 20001451 PARAMETER Experiment Name: At_Far-red-induction_P Parameter: Tissue Value: Whole Plant
  misc_feature: MA Experiment ID: 20001557 Result: Up-regulated in Transcription
  misc_feature: MA Experiment 20001557 PARAMETER Experiment Name: At_Drought_Soil_Dry_P Parameter: Age (day) Value: 27
  misc_feature: MA Experiment 20001557 PARAMETER Experiment Name: At_Drought_Soil_Dry_P Parameter: Organism Value: A. thaliana
  misc_feature: MA Experiment 20001557 PARAMETER Experiment Name: At_Drought_Soil_Dry_P Parameter: Plant Line Value: WS
  misc_feature: MA Experiment 20001557 PARAMETER Experiment Name: At_Drought_Soil_Dry_P Parameter: Post Timepoint (hr) Value: 3
  misc_feature: MA Experiment 20001557 PARAMETER Experiment Name: At_Drought_Soil_Dry_P Parameter: Post-Treatment Value: Re-Water vs. No Drought
  misc_feature: MA Experiment 20001557 PARAMETER Experiment Name: At_Drought_Soil_Dry_P Parameter: Timepoint (day) Value: 13
  misc_feature: MA Experiment 20001557 PARAMETER Experiment Name: At_Drought_Soil_Dry_P Parameter: Treatment Value: Drought vs. No Drought
acatctcactgctcactactctcactgtaatcccttagatcttcttttcaaatttcaatggcgtccggtgatgttgagtatcggtgcttcgttggaggtctagcatgggccactgatgacagagctcttgagactgccttcgctcaatacggcgacgttattgattccaagatcattaacgatcgtgagactggaagatcaaggggattcggattcgtcaccttcaaggatgagaaagccatgaaggatgcgattgagggaatgaacggacaagatctcgatggccgtagcatcactgttaacgaggctcagtcacgaggaagcggtggcggcggaggccaccgtggaggtggtggcggtggataccgcagcggcggtggtggaagacgtgagggaggaggaggatacggtggtggtgaaggaggaggttacggaggaagcggtggtggtggaggatggtaattcctttaattaggtttgggattaccaatgaatgttctctctctcgcttgttatgcttctacttggttttgtgtgttctctattttgttctggttctgctttagatttgatgtaacagttcgtgattaggtattttggtatctggaaacgtaatgttaagtcacttgtcattctctaaataacaaatttcttcggagatattatctctgttgattgattct

SEQ ID NO: 25666 - protein, 134 aa, Arabidopsis thaliana
  peptide (1)..(134): Ceres Seq. ID no. 12395747
  misc_feature (10)..(81): Pfam Name: RNA recognition motif. (a.k.a. RRM, RBD, or RNP domain) Pfam Description: RNA recognition motif. (a.k.a. RRM, RBD, or RNP
  misc_feature (1)..(132): Homolog of NCBI NO: 21553354 NR Description: glycine-rich RNA binding protein 7 [Arabidopsis
  misc_feature (1)..(134): Homolog of NCBI NO: 15226605 NR Description: glycine-rich RNA binding protein AtGRP7
  misc_feature (5)..(133): Homolog of NCBI NO: 20152613 NR Description: putative glycine rich protein [Rumex obtusifolius]
  misc_feature (5)..(133): Homolog of NCBI NO: 544426 NR Description: Glycine-rich RNA-binding protein
  misc_feature (1)..(134): Homolog of NCBI NO: 1346181 NR Description: Glycine-rich RNA-binding protein GRP2A
  misc_feature (1)..(134): Homolog of NCBI NO: 1346180 NR Description: Glycine-rich RNA-binding protein GRP1A
  misc_feature (1)..(132): Homolog of NCBI NO: 2267567 NR Description: glycine-rich RNA binding protein 1 [Pelargonium x
  misc_feature (5)..(132): Homolog of NCBI NO: 2119042 NR Description: glycine-rich RNA-binding protein RGP-1a - wood
  misc_feature (5)..(134): Homolog of NCBI NO: 2226370 NR Description: RNA-binding protein [Nicotiana glutinosa]
  misc_feature (1)..(134): Homolog of NCBI NO: 30681492 NR Description: glycine-rich RNA-binding protein (AtGRP7)
MASGDVEYRCFVGGLAWATDDRALETAFAQYGDVIDSKIINDRETGRSRGFGFVTFKDEKAMKDAIEGMNGQDLDGRSITVNEAQSRGSGGGGGHRGGGGGGYRSGGGGRREGGGGYGGGEGGGYGGSGGGGGW

SEQ ID NO: 25667 - protein, 73 aa, Arabidopsis thaliana
  peptide (1)..(73): Ceres Seq. ID no. 12395748
  misc_feature (7)..(72): Pfam Name: Herpesvirus large structural phosphoprotein UL32 Pfam Description: Herpesvirus large structural phosphoprotein UL32
  misc_feature (1)..(73): Homolog of NCBI NO: 2226370 NR Description: RNA-binding protein [Nicotiana glutinosa]
  misc_feature (1)..(72): Homolog of NCBI NO: 20152613 NR Description: putative glycine rich protein [Rumex obtusifolius]
  misc_feature (1)..(71): Homolog of NCBI NO: 2119042 NR Description: glycine-rich RNA-binding protein RGP-1a - wood
  misc_feature (1)..(72): Homolog of NCBI NO: 544426 NR Description: Glycine-rich RNA-binding protein
  misc_feature (1)..(71): Homolog of NCBI NO: 2267567 NR Description: glycine-rich RNA binding protein 1 [Pelargonium x
  misc_feature (1)..(73): Homolog of NCBI NO: 1346181 NR Description: Glycine-rich RNA-binding protein GRP2A
  misc_feature (1)..(73): Homolog of NCBI NO: 1346180 NR Description: Glycine-rich RNA-binding protein GRP1A
  misc_feature (1)..(71): Homolog of NCBI NO: 21553354 NR Description: glycine-rich RNA binding protein 7 [Arabidopsis
  misc_feature (1)..(73): Homolog of NCBI NO: 15226605 NR Description: glycine-rich RNA binding protein AtGRP7
  misc_feature (1)..(73): Homolog of NCBI NO: 30681492 NR Description: glycine-rich RNA-binding protein (AtGRP7)
MKDAIEGMNGQDLDGRSITVNEAQSRGSGGGGGHRGGGGGGYRSGGGGRREGGGGYGGGEGGGYGGSGGGGGW

SEQ ID NO: 25668 - DNA, 766 bp, Arabidopsis thaliana
  misc_feature (1)..(766): Ceres Seq. ID no. 12369971
  misc_feature: MA Experiment ID: 108462 Result: Up-regulated in Transcription
  misc_feature: MA Experiment 108462 PARAMETER Experiment Name: At_Germinating_Seeds_cDNA_P Parameter: Age (day) Value: 2 vs. 0
  misc_feature: MA Experiment 108462 PARAMETER Experiment Name: At_Germinating_Seeds_cDNA_P Parameter: Tissue Value: Germinating Seeds
  misc_feature: MA Experiment ID: 108463 Result: Up-regulated in Transcription
  misc_feature: MA Experiment 108463 PARAMETER Experiment Name: At_Germinating_Seeds_cDNA_P Parameter: Age (day) Value: 3 vs. 0
  misc_feature: MA Experiment 108463 PARAMETER Experiment Name: At_Germinating_Seeds_cDNA_P Parameter: Tissue Value: Germinating Seeds
  misc_feature: MA Experiment ID: 108464 Result: Up-regulated in Transcription
  misc_feature: MA Experiment 108464 PARAMETER Experiment Name: At_Germinating_Seeds_cDNA_P Parameter: Age (day) Value: 4 vs. 0
  misc_feature: MA Experiment 108464 PARAMETER Experiment Name: At_Germinating_Seeds_cDNA_P Parameter: Tissue Value: Germinating Seeds
  misc_feature: MA Experiment ID: 108607 Result: Up-regulated in Transcription
  misc_feature: MA Experiment 108607 PARAMETER Experiment Name: At_100uM_ABA_cDNA_P Parameter: Timepoint (hr) Value: 4
  misc_feature: MA Experiment 108607 PARAMETER Experiment Name: At_100uM_ABA_cDNA_P Parameter: Tissue Value: Aerial
  misc_feature: MA Experiment 108607 PARAMETER Experiment Name: At_100uM_ABA_cDNA_P Parameter: Treatment Value: 100uM ABA vs. No Treatment
  misc_feature: MA Experiment ID: 20000071 Result: Up-regulated in Transcription
  misc_feature: MA Experiment 20000071 PARAMETER Experiment Name: At_100uM_ABA_Mutants_cDNA_P Parameter: Plant Line Value: CS8104
  misc_feature: MA Experiment 20000071 PARAMETER Experiment Name: At_100uM_ABA_Mutants_cDNA_P Parameter: Timepoint (hr) Value: 6
  misc_feature: MA Experiment 20000071 PARAMETER Experiment Name: At_100uM_ABA_Mutants_cDNA_P Parameter: Tissue Value: Aerial
  misc_feature: MA Experiment 20000071 PARAMETER Experiment Name: At_100uM_ABA_Mutants_cDNA_P Parameter: Treatment Value: 100uM ABA vs. No Treatment
  misc_feature: MA Experiment ID: 20000117 Result: Up-regulated in Transcription
  misc_feature: MA Experiment 20000117 PARAMETER Experiment Name: At_100uM_ABA_Mutants_cDNA_P Parameter: Plant Line Value: Columbia
  misc_feature: MA Experiment 20000117 PARAMETER Experiment Name: At_100uM_ABA_Mutants_cDNA_P Parameter: Timepoint (hr) Value: 6
  misc_feature: MA Experiment 20000117 PARAMETER Experiment Name: At_100uM_ABA_Mutants_cDNA_P Parameter: Tissue Value: Aerial
  misc_feature: MA Experiment 20000117 PARAMETER Experiment Name: At_100uM_ABA_Mutants_cDNA_P Parameter: Treatment Value: 100uM ABA vs. No Treatment
  misc_feature: MA Experiment ID: 20000314 Result: Up-regulated in Transcription
  misc_feature: MA Experiment 20000314 PARAMETER Experiment Name: At_14day_Shoots-Roots_Sub_P Parameter: Age (day) Value: 14
  misc_feature: MA Experiment 20000314 PARAMETER Experiment Name: At_14day_Shoots-Roots_Sub_P Parameter: Organism Value: A. thaliana
  misc_feature: MA Experiment 20000314 PARAMETER Experiment Name: At_14day_Shoots-Roots_Sub_P Parameter: Plant Line Value: WS
  misc_feature: MA Experiment 20000314 PARAMETER Experiment Name: At_14day_Shoots-Roots_Sub_P Parameter: Tissue Value: Roots vs. Whole Plant
  misc_feature: MA Experiment ID: 20000355 Result: Down-regulated in Transcription
  misc_feature: MA Experiment 20000355 PARAMETER Experiment Name: At_Siliques_Sub_P Parameter: Age (day) Value: 21
  misc_feature: MA Experiment 20000355 PARAMETER Experiment Name: At_Siliques_Sub_P Parameter: Organism Value: A. thaliana
  misc_feature: MA Experiment 20000355 PARAMETER Experiment Name: At_Siliques_Sub_P Parameter: Plant Line Value: WS
  misc_feature: MA Experiment 20000355 PARAMETER Experiment Name: At_Siliques_Sub_P Parameter: Tissue Value: Less Than 5mm Siliques vs. Whole Plant
  misc_feature: MA Experiment ID: 20000440 Result: Down-regulated in Transcription
  misc_feature: MA Experiment 20000440 PARAMETER Experiment Name: At_Closed-Flower__Sub_P Parameter: Tissue Value: Closed Flower vs. Whole Plant
atagagtttggtaggtcgtattttcaacattttaaactcaatttttatgttgacaataacaaaaaaagaaaatcatatcatatatctcaacatatagagtctaactttttttcgccaaaccaaaagaaagaagaaacaaagaaacaagaaaaatgggtgttcttgatcacgtctctgaatatttcgattgttctcatggaagctccaagagacacaaaagtctacagacggtggatgtgagggttttgatagattgtgaaggatgcgagaggaaagtaaggagagctttagaaggaatgagaggaataagagatgtaaccatcgagccaaatgctcagaaagtgacagtggttgggtacgttgaaccaaacaaagtggtggctcgtatcattcaccgaaccggtaaaagagcagagctatatcctttcgttccttacgacgttgtggctcatccttacgcgtctggtgtttacgataacagagccccgactgggtacgttaggaacaccgagtatgatccacatgtgtcacgtctcgcacgtgctagctccactgaggttcgttatactacggcgtttagcgacgagaacgcctccgcttgtgttgttatgtgatgttttttttttttggtttaatttttttttactgggattattttttgtgtttggatgttgatgtttgtttatgtttccatcacgaatgtatttaagataagaacgagtgaaaaaaatgtaaattgcatggtgatgaattggtggttaaaacg

SEQ ID NO: 25669 - protein, 153 aa, Arabidopsis thaliana
  peptide (1)..(153): Ceres Seq. ID no. 12369972
  misc_feature (28)..(89): Pfam Name: Heavy-metal-associated domain Pfam Description: Heavy-metal-associated domain
  misc_feature (1)..(153): Homolog of NCBI NO: 21536547 NR Description: farnesylated protein (ATFP6) [Arabidopsis
  misc_feature (1)..(153): Homolog of NCBI NO: 15233937 NR Description: copper chaperone (CCH)-related
  misc_feature (1)..(153): Homolog of NCBI NO: 18418567 NR Description: copper chaperone (CCH)-related
MGVLDHVSEYFDCSHGSSKRHKSLQTVDVRVLIDCEGCERKVRRALEGMRGIRDVTIEPNAQKVTVVGYVEPNKVVARIIHRTGKRAELYPFVPYDVVAHPYASGVYDNRAPTGYVRNTEYDPHVSRLARASSTEVRYTTAFSDENASACVVM

SEQ ID NO: 25670 - protein, 105 aa, Arabidopsis thaliana
  peptide (1)..(105): Ceres Seq. ID no. 12369973
  misc_feature (1)..(105): Homolog of NCBI NO: 21536547 NR Description: farnesylated protein (ATFP6) [Arabidopsis
  misc_feature (1)..(105): Homolog of NCBI NO: 15233937 NR Description: copper chaperone (CCH)-related
  misc_feature (1)..(105): Homolog of NCBI NO: 18418567 NR Description: copper chaperone (CCH)-related
MRGIRDVTIEPNAQKVTVVGYVEPNKVVARIIHRTGKRAELYPFVPYDVVAHPYASGVYDNRAPTGYVRNTEYDPHVSRLARASSTEVRYTTAFSDENASACVVM

SEQ ID NO: 25671 - protein, 79 aa, Arabidopsis thaliana
  peptide (1)..(79): Ceres Seq. ID no. 12369974
IEFGRSYFQHFKLNFYVDNNKKRKSYHISQHIESNFFSPNQKKEETKKQEKWVFLITSLNISIVLMEAPRDTKVYRRWM

SEQ ID NO: 25672 - DNA, 1005 bp, Arabidopsis thaliana
  misc_feature (1)..(1005): Ceres Seq. ID no. 12323588
aaaccctttaaattaaaaaaaaaacaattacttctctttccttcgatcatcgtcttcctctggttctcagatctttgaatcgagcagaagcaattttaaatctcctatcagtgaatttttattactggagaagtaataaggcaaagatggtgaaaatgacattgatagctcgtgttactgatgggttacctctagctgaggggctcgatgatggacgtgacttaccggattcagatatgtataaacaacaggtcaaagctttgtttaagaatctgtccagaggtcaaaatgacgcttcaagaatgtccgttgaaactggcccctatgttttccattacatcatagaaggacgtgtttgctacttgacaatgtgtgaccgctcttacccaaagaaactcgctttccaatacctggaagatctcaagaatgaatttgaacgtgtcaatgggcctaacattgaaacagctgctcggccttatgcctttattaaatttgatacattcatacagaaaaccaagaaactgtaccaagacactcgtacgcaacgaaacatcgccaagttgaatgatgaactctatgaggttcatcaaataatgacccggaatgtgcaagaagtcttaggtgttggtgaaaagctggaccaggtgagcgagatgtcgagccggttaacatctgaatctcgtatatatgctgataaggctaaagatttgaaccgtcaggctttgatccgaaaatgggcaccagtcgcaattgtgttcggtgtagtcttcctccttttctgggtcaagaacaagctatggtaaaaaaaaaaggaggaatctaaggctattttcgtaatttagcggacttctccagacatatgtcgacctcccctaccggactcaagtctcagattccggcacccaaaatatcttctttctttcaaagagaaactttgacacattttgtacttctgtagtatgcaaactttatgagactggtcatagtatcatccattatactctc

SEQ ID NO: 25673 - protein, 218 aa, Arabidopsis thaliana
  peptide (1)..(218): Ceres Seq. ID no. 12323589
  misc_feature (1)..(212): Homolog of NCBI NO: 1927215 NR Description: ERS-24 [Cricetulus griseus]
  misc_feature (1)..(212): Homolog of NCBI NO: 14290512 NR Description: SEC22 vesicle trafficking protein-like 1 (S.
  misc_feature (1)..(212): Homolog of NCBI NO: 4759086 NR Description: vesicle trafficking protein sec22b [Homo sapiens]
  misc_feature (1)..(121): Homolog of NCBI NO: 35215218 NR Description: putative vesicle trafficking protein
  misc_feature (1)..(121): Homolog of NCBI NO: 34015230 NR Description: putative vesicle trafficking protein
  misc_feature (1)..(218): Homolog of NCBI NO: 34904386 NR Description: unnamed protein product [Oryza sativa (japonica
  misc_feature (1)..(218): Homolog of NCBI NO: 28269424 NR Description: putative vesicle trafficking protein
  misc_feature (1)..(64): Homolog of NCBI NO: 25402691 NR Description: hypothetical protein [imported] - Arabidopsis
  misc_feature (62)..(218): Homolog of NCBI NO: 25402691 NR Description: hypothetical protein [imported] - Arabidopsis
  misc_feature (1)..(218): Homolog of NCBI NO: 15221123 NR Description: putative vesicle transport protein
MVKMTLIARVTDGLPLAEGLDDGRDLPDSDMYKQQVKALFKNLSRGQNDASRMSVETGPYVFHYIIEGRVCYLTMCDRSYPKKLAFQYLEDLKNEFERVNGPNIETAARPYAFIKFDTFIQKTKKLYQDTRTQRNIAKLNDELYEVHQIMTRNVQEVLGVGEKLDQVSEMSSRLTSESRIYADKAKDLNRQALIRKWAPVAIVFGVVFLLFWVKNKLW

SEQ ID NO: 25674 - protein, 215 aa, Arabidopsis thaliana
  peptide (1)..(215): Ceres Seq. ID no. 12323590
  misc_feature (1)..(209): Homolog of NCBI NO: 1927215 NR Description: ERS-24 [Cricetulus griseus]
  misc_feature (1)..(209): Homolog of NCBI NO: 14290512 NR Description: SEC22 vesicle trafficking protein-like 1 (S.
  misc_feature (1)..(209): Homolog of NCBI NO: 4759086 NR Description: vesicle trafficking protein sec22b [Homo sapiens]
  misc_feature (1)..(118): Homolog of NCBI NO: 35215218 NR Description: putative vesicle trafficking protein
  misc_feature (1)..(118): Homolog of NCBI NO: 34015230 NR Description: putative vesicle trafficking protein
  misc_feature (1)..(215): Homolog of NCBI NO: 34904386 NR Description: unnamed protein product [Oryza sativa (japonica
  misc_feature (1)..(215): Homolog of NCBI NO: 28269424 NR Description: putative vesicle trafficking protein
  misc_feature (1)..(61): Homolog of NCBI NO: 25402691 NR Description: hypothetical protein [imported] - Arabidopsis
  misc_feature (59)..(215): Homolog of NCBI NO: 25402691 NR Description: hypothetical protein [imported] - Arabidopsis
  misc_feature (1)..(215): Homolog of NCBI NO: 15221123 NR Description: putative vesicle transport protein
MTLIARVTDGLPLAEGLDDGRDLPDSDMYKQQVKALFKNLSRGQNDASRMSVETGPYVFHYIIEGRVCYLTMCDRSYPKKLAFQYLEDLKNEFERVNGPNIETAARPYAFIKFDTFIQKTKKLYQDTRTQRNIAKLNDELYEVHQIMTRNVQEVLGVGEKLDQVSEMSSRLTSESRIYADKAKDLNRQALIRKWAPVAIVFGVVFLLFWVKNKLW

SEQ ID NO: 25675 - protein, 188 aa, Arabidopsis thaliana
  peptide (1)..(188): Ceres Seq. ID no. 12323591
  misc_feature (1)..(182): Homolog of NCBI NO: 1927215 NR Description: ERS-24 [Cricetulus griseus]
  misc_feature (1)..(182): Homolog of NCBI NO: 14290512 NR Description: SEC22 vesicle trafficking protein-like 1 (S.
  misc_feature (1)..(182): Homolog of NCBI NO: 4759086 NR Description: vesicle trafficking protein sec22b [Homo sapiens]
  misc_feature (1)..(91): Homolog of NCBI NO: 35215218 NR Description: putative vesicle trafficking protein
  misc_feature (1)..(91): Homolog of NCBI NO: 34015230 NR Description: putative vesicle trafficking protein
  misc_feature (1)..(188): Homolog of NCBI NO: 34904386 NR Description: unnamed protein product [Oryza sativa (japonica
  misc_feature (1)..(188): Homolog of NCBI NO: 28269424 NR Description: putative vesicle trafficking protein
  misc_feature (1)..(34): Homolog of NCBI NO: 25402691 NR Description: hypothetical protein [imported] - Arabidopsis
  misc_feature (32)..(188): Homolog of NCBI NO: 25402691 NR Description: hypothetical protein [imported] - Arabidopsis
  misc_feature (1)..(188): Homolog of NCBI NO: 15221123 NR Description: putative vesicle transport protein
MYKQQVKALFKNLSRGQNDASRMSVETGPYVFHYIIEGRVCYLTMCDRSYPKKLAFQYLEDLKNEFERVNGPNIETAARPYAFIKFDTFIQKTKKLYQDTRTQRNIAKLNDELYEVHQIMTRNVQEVLGVGEKLDQVSEMSSRLTSESRIYADKAKDLNRQALIRKWAPVAIVFGVVFLLFWVKNKLW

SEQ ID NO: 25676 - DNA, 1692 bp, Arabidopsis thaliana; identical to SEQ ID NO: 24488
  misc_feature (1)..(1692): Ceres Seq. ID no. 13580675
  misc_feature: MA Experiment ID: 108576 Result: Down-regulated in Transcription
  misc_feature: MA Experiment 108576 PARAMETER Experiment Name: At_42deg_Heat_cDNA_P Parameter: Temperature (deg C) Value: 42 vs. 22
  misc_feature: MA Experiment 108576 PARAMETER Experiment Name: At_42deg_Heat_cDNA_P Parameter: Timepoint (hr) Value: 1
  misc_feature: MA Experiment 108576 PARAMETER Experiment Name: At_42deg_Heat_cDNA_P Parameter: Tissue Value: Aerial
  misc_feature: MA Experiment ID: 20000179 Result: Up-regulated in Transcription
  misc_feature: MA Experiment 20000179 PARAMETER Experiment Name: At_Germinating_Seeds_P Parameter: Age (hr) Value: 6 vs. 0
  misc_feature: MA Experiment 20000179 PARAMETER Experiment Name: At_Germinating_Seeds_P Parameter: Tissue Value: Germinating Seeds
  misc_feature: MA Experiment ID: 20000180 Result: Up-regulated in Transcription
  misc_feature: MA Experiment 20000180 PARAMETER Experiment Name: At_Germinating_Seeds_P Parameter: Age (hr) Value: 24 vs. 0
  misc_feature: MA Experiment 20000180 PARAMETER Experiment Name: At_Germinating_Seeds_P Parameter: Tissue Value: Germinating Seeds
  misc_feature: MA Experiment ID: 20000794 Result: Down-regulated in Transcription
  misc_feature: MA Experiment 20000794 PARAMETER Experiment Name: At_Petals_P Parameter: Age (day) Value: 23-25 days
  misc_feature: MA Experiment 20000794 PARAMETER Experiment Name: At_Petals_P Parameter: Plant Line Value: WS
  misc_feature: MA Experiment 20000794 PARAMETER Experiment Name: At_Petals_P Parameter: Tissue Value: Petals vs. Whole plant
  misc_feature: MA Experiment ID: 20001554 Result: Down-regulated in Transcription
  misc_feature: MA Experiment 20001554 PARAMETER Experiment Name: At_Drought_Soil_Dry_P Parameter: Age (day) Value: 21
  misc_feature: MA Experiment 20001554 PARAMETER Experiment Name: At_Drought_Soil_Dry_P Parameter: Organism Value: A. thaliana
  misc_feature: MA Experiment 20001554 PARAMETER Experiment Name: At_Drought_Soil_Dry_P Parameter: Plant Line Value: WS
  misc_feature: MA Experiment 20001554 PARAMETER Experiment Name: At_Drought_Soil_Dry_P Parameter: Post Timepoint (hr) Value: None
  misc_feature: MA Experiment 20001554 PARAMETER Experiment Name: At_Drought_Soil_Dry_P Parameter: Post-Treatment Value: None
  misc_feature: MA Experiment 20001554 PARAMETER Experiment Name: At_Drought_Soil_Dry_P Parameter: Timepoint (day) Value: 7
  misc_feature: MA Experiment 20001554 PARAMETER Experiment Name: At_Drought_Soil_Dry_P Parameter: Treatment Value: Drought vs. No Drought
  misc_feature: MA Experiment ID: 20001555 Result: Down-regulated in Transcription
  misc_feature: MA Experiment 20001555 PARAMETER Experiment Name: At_Drought_Soil_Dry_P Parameter: Age (day) Value: 24
  misc_feature: MA Experiment 20001555 PARAMETER Experiment Name: At_Drought_Soil_Dry_P Parameter: Organism Value: A. thaliana
  misc_feature: MA Experiment 20001555 PARAMETER Experiment Name: At_Drought_Soil_Dry_P Parameter: Plant Line Value: WS
  misc_feature: MA Experiment 20001555 PARAMETER Experiment Name: At_Drought_Soil_Dry_P Parameter: Post Timepoint (hr) Value: None
  misc_feature: MA Experiment 20001555 PARAMETER Experiment Name: At_Drought_Soil_Dry_P Parameter: Post-Treatment Value: None
  misc_feature: MA Experiment 20001555 PARAMETER Experiment Name: At_Drought_Soil_Dry_P Parameter: Timepoint (day) Value: 10
  misc_feature: MA Experiment 20001555 PARAMETER Experiment Name: At_Drought_Soil_Dry_P Parameter: Treatment Value: Drought vs. No Drought
  misc_feature: MA Experiment ID: 20001556 Result: Down-regulated in Transcription
  misc_feature: MA Experiment 20001556 PARAMETER Experiment Name: At_Drought_Soil_Dry_P Parameter: Age (day) Value: 26
  misc_feature: MA Experiment 20001556 PARAMETER Experiment Name: At_Drought_Soil_Dry_P Parameter: Organism Value: A. thaliana
  misc_feature: MA Experiment 20001556 PARAMETER Experiment Name: At_Drought_Soil_Dry_P Parameter: Plant Line Value: WS
  misc_feature: MA Experiment 20001556 PARAMETER Experiment Name: At_Drought_Soil_Dry_P Parameter: Post Timepoint (hr) Value: None
  misc_feature: MA Experiment 20001556 PARAMETER Experiment Name: At_Drought_Soil_Dry_P Parameter: Post-Treatment Value: None
  misc_feature: MA Experiment 20001556 PARAMETER Experiment Name: At_Drought_Soil_Dry_P Parameter: Timepoint (day) Value: 12
  misc_feature: MA Experiment 20001556 PARAMETER Experiment Name: At_Drought_Soil_Dry_P Parameter: Treatment Value: Drought vs. No Drought
  misc_feature: MA Experiment ID: 20001559 Result: Down-regulated in Transcription
  misc_feature: MA Experiment 20001559 PARAMETER Experiment Name: At_Drought_Soil_Dry_P Parameter: Age (day) Value: 28
  misc_feature: MA Experiment 20001559 PARAMETER Experiment Name: At_Drought_Soil_Dry_P Parameter: Organism Value: A. thaliana
  misc_feature: MA Experiment 20001559 PARAMETER Experiment Name: At_Drought_Soil_Dry_P Parameter: Plant Line Value: WS
  misc_feature: MA Experiment 20001559 PARAMETER Experiment Name: At_Drought_Soil_Dry_P Parameter: Post Timepoint (hr) Value: 29
  misc_feature: MA Experiment 20001559 PARAMETER Experiment Name: At_Drought_Soil_Dry_P Parameter: Post-Treatment Value: Re-Water vs. No Drought
  misc_feature: MA Experiment 20001559 PARAMETER Experiment Name: At_Drought_Soil_Dry_P Parameter: Timepoint (day) Value: 14
  misc_feature: MA Experiment 20001559 PARAMETER Experiment Name: At_Drought_Soil_Dry_P Parameter: Treatment Value: Drought vs. No Drought
  misc_feature: MA Experiment ID: 20001560 Result: Up-regulated in Transcription
  misc_feature: MA Experiment 20001560 PARAMETER Experiment Name: At_Drought_Soil_Dry_P Parameter: Age (day) Value: 28
  misc_feature: MA Experiment 20001560 PARAMETER Experiment Name: At_Drought_Soil_Dry_P Parameter: Organism Value: A. thaliana
  misc_feature: MA Experiment 20001560 PARAMETER Experiment Name: At_Drought_Soil_Dry_P Parameter: Plant Line Value: WS
  misc_feature: MA Experiment 20001560 PARAMETER Experiment Name: At_Drought_Soil_Dry_P Parameter: Post Timepoint (hr) Value: None
  misc_feature: MA Experiment 20001560 PARAMETER Experiment Name: At_Drought_Soil_Dry_P Parameter: Post-Treatment Value: None
  misc_feature: MA Experiment 20001560 PARAMETER Experiment Name: At_Drought_Soil_Dry_P Parameter: Timepoint (day) Value: 14
  misc_feature: MA Experiment 20001560 PARAMETER Experiment Name: At_Drought_Soil_Dry_P Parameter: Treatment Value: Drought vs. No Drought
  misc_feature: MA Experiment ID: 20001911 Result: Down-regulated in Transcription
  misc_feature: MA Experiment 20001911 PARAMETER Experiment Name: At_Drought_Reproduction_P Parameter: Age (day) Value: 40
  misc_feature: MA Experiment 20001911 PARAMETER Experiment Name: At_Drought_Reproduction_P Parameter: Organism Value: A. thaliana
  misc_feature: MA Experiment 20001911 PARAMETER Experiment Name: At_Drought_Reproduction_P Parameter: Plant Line Value: WS
  misc_feature: MA Experiment 20001911 PARAMETER Experiment Name: At_Drought_Reproduction_P Parameter: Timepoint (day) Value: 10
  misc_feature: MA Experiment 20001911 PARAMETER Experiment Name: At_Drought_Reproduction_P Parameter: Tissue Value: Flowers
  misc_feature: MA Experiment 20001911 PARAMETER Experiment Name: At_Drought_Reproduction_P Parameter: Treatment Value: Drought vs. No Drought

SEQ ID NO: 25677 - protein, 450 aa, Arabidopsis thaliana; identical to SEQ ID NO: 24489
  peptide (1)..(450): Ceres Seq. ID no. 13580676
  misc_feature (49)..(246): Pfam Name: Tubulin/FtsZ family, GTPase domain Pfam Description: Tubulin/FtsZ family, GTPase domain
  misc_feature (49)..(246): Pfam Name: Tubulin/FtsZ family, GTPase domain Pfam Description: Tubulin/FtsZ family, GTPase domain
  misc_feature (1)..(450): Homolog of NCBI NO: 25396550 NR Description: alpha tubulin [Physcomitrella patens]
  misc_feature (1)..(450): Homolog of NCBI NO: 6723478 NR Description: alpha-tubulin [Betula pendula]
  misc_feature (1)..(450): Homolog of NCBI NO: 464840 NR Description: Tubulin alpha-1 chain
  misc_feature (1)..(449): Homolog of NCBI NO: 1174592 NR Description: TUBULIN ALPHA-1 CHAIN
  misc_feature (1)..(450): Homolog of NCBI NO: 15029368 NR Description: alpha tubulin subunit [Rosa hybrid cultivar]
  misc_feature (1)..(450): Homolog of NCBI NO: 25396550 NR Description: alpha tubulin [Physcomitrella patens]
  misc_feature (1)..(450): Homolog of NCBI NO: 464840 NR Description: Tubulin alpha-1 chain
  misc_feature (1)..(450): Homolog of NCBI NO: 15029368 NR Description: alpha tubulin subunit [Rosa hybrid cultivar]
  misc_feature (1)..(450): Homolog of NCBI NO: 15220329 NR Description: tubulin alpha-2/alpha-4 chain (TUA4) [Arabidopsis
  misc_feature (1)..(450): Homolog of NCBI NO: 15233627 NR Description: tubulin alpha-6 chain (TUA6) [Arabidopsis
  misc_feature (1)..(450): Homolog of NCBI NO: 16226462 NR Description: AT4g14960/dl3520c [Arabidopsis thaliana]
  misc_feature (1)..(450): Homolog of NCBI NO: 464849 NR Description: TUBULIN ALPHA CHAIN
  misc_feature (1)..(450): Homolog of NCBI NO: 29124983 NR Description: alpha-tubulin 1 [Populus tremuloides]
  misc_feature (1)..(449): Homolog of NCBI NO: 1174592 NR Description: TUBULIN ALPHA-1 CHAIN
  misc_feature (1)..(450): Homolog of NCBI NO: 6723478 NR Description: alpha-tubulin [Betula pendula]
  misc_feature (1)..(450): Homolog of NCBI NO: 29124983 NR Description: alpha-tubulin 1 [Populus tremuloides]
  misc_feature (1)..(450): Homolog of NCBI NO: 464849 NR Description: TUBULIN ALPHA CHAIN
  misc_feature (1)..(450): Homolog of NCBI NO: 16226462 NR Description: AT4g14960/dl3520c [Arabidopsis thaliana]
  misc_feature (1)..(450): Homolog of NCBI NO: 15233627 NR Description: tubulin alpha-6 chain (TUA6) [Arabidopsis
  misc_feature (1)..(450): Homolog of NCBI NO: 15220329 NR Description: tubulin alpha-2/alpha-4 chain (TUA4) [Arabidopsis

SEQ ID NO: 25678 - protein, 415 aa, Arabidopsis thaliana; identical to SEQ ID NO: 24490
  peptide (1)..(415): Ceres Seq. ID no. 13580677
  misc_feature (14)..(211): Pfam Name: Tubulin/FtsZ family, GTPase domain Pfam Description: Tubulin/FtsZ family, GTPase domain
  misc_feature (14)..(211): Pfam Name: Tubulin/FtsZ family, GTPase domain Pfam Description: Tubulin/FtsZ family, GTPase domain
  misc_feature (1)..(415): Homolog of NCBI NO: 25396550 NR Description: alpha tubulin [Physcomitrella patens]
  misc_feature (1)..(415): Homolog of NCBI NO: 6723478 NR Description: alpha-tubulin [Betula pendula]
  misc_feature (1)..(415): Homolog of NCBI NO: 464840 NR Description: Tubulin alpha-1 chain
  misc_feature (1)..(414): Homolog of NCBI NO: 1174592 NR Description: TUBULIN ALPHA-1 CHAIN
  misc_feature (1)..(415): Homolog of NCBI NO: 15029368 NR Description: alpha tubulin subunit [Rosa hybrid cultivar]
  misc_feature (1)..(415): Homolog of NCBI NO: 25396550 NR Description: alpha tubulin [Physcomitrella patens]
  misc_feature (1)..(415): Homolog of NCBI NO: 464840 NR Description: Tubulin alpha-1 chain
  misc_feature (1)..(415): Homolog of NCBI NO: 15029368 NR Description: alpha tubulin subunit [Rosa hybrid cultivar]
  misc_feature (1)..(415): Homolog of NCBI NO: 15220329 NR Description: tubulin alpha-2/alpha-4 chain (TUA4) [Arabidopsis
  misc_feature (1)..(415): Homolog of NCBI NO: 15233627 NR Description: tubulin alpha-6 chain (TUA6) [Arabidopsis
  misc_feature (1)..(415): Homolog of NCBI NO: 16226462 NR Description: AT4g14960/dl3520c [Arabidopsis thaliana]
  misc_feature (1)..(415): Homolog of NCBI NO: 464849 NR Description: TUBULIN ALPHA CHAIN
  misc_feature (1)..(415): Homolog of NCBI NO: 29124983 NR Description: alpha-tubulin 1 [Populus tremuloides]
  misc_feature (1)..(414): Homolog of NCBI NO: 1174592 NR Description: TUBULIN ALPHA-1 CHAIN
  misc_feature (1)..(415): Homolog of NCBI NO: 6723478 NR Description: alpha-tubulin [Betula pendula]
  misc_feature (1)..(415): Homolog of NCBI NO: 29124983 NR Description: alpha-tubulin 1 [Populus tremuloides]
  misc_feature (1)..(415): Homolog of NCBI NO: 464849 NR Description: TUBULIN ALPHA CHAIN
  misc_feature (1)..(415): Homolog of NCBI NO: 16226462 NR Description: AT4g14960/dl3520c [Arabidopsis thaliana]
  misc_feature (1)..(415): Homolog of NCBI NO: 15233627 NR Description: tubulin alpha-6 chain (TUA6) [Arabidopsis
  misc_feature (1)..(415): Homolog of NCBI NO: 15220329 NR Description: tubulin alpha-2/alpha-4 chain (TUA4) [Arabidopsis

SEQ ID NO: 25679 - DNA, 1120 bp, Arabidopsis thaliana
  misc_feature (1)..(1120): Ceres Seq. ID no. 12327098
  misc_feature: MA Experiment ID: 20000265 Result: Up-regulated in Transcription
  misc_feature: MA Experiment 20000265 PARAMETER Experiment Name: At_Open_Flower_P Parameter: Age (day) Value: 21
  misc_feature: MA Experiment 20000265 PARAMETER Experiment Name: At_Open_Flower_P Parameter: Plant Line Value: WS
  misc_feature: MA Experiment 20000265 PARAMETER Experiment Name: At_Open_Flower_P Parameter: Tissue Value: Closed Flower vs. Whole Plant
  misc_feature: MA Experiment ID: 20000286 Result: Up-regulated in Transcription
  misc_feature: MA Experiment 20000286 PARAMETER Experiment Name: At_Open_Flower_P Parameter: Age (day) Value: 21
  misc_feature: MA Experiment 20000286 PARAMETER Experiment Name: At_Open_Flower_P Parameter: Plant Line Value: WS
  misc_feature: MA Experiment 20000286 PARAMETER Experiment Name: At_Open_Flower_P Parameter: Tissue Value: Half Open vs. Whole Plant
  misc_feature: MA Experiment ID: 20001910 Result: Down-regulated in Transcription
  misc_feature: MA Experiment 20001910 PARAMETER Experiment Name: At_Drought_Reproduction_P Parameter: Age (day) Value: 37
  misc_feature: MA Experiment 20001910 PARAMETER Experiment Name: At_Drought_Reproduction_P Parameter: Organism Value: A. thaliana
  misc_feature: MA Experiment 20001910 PARAMETER Experiment Name: At_Drought_Reproduction_P Parameter: Plant Line Value: WS
  misc_feature: MA Experiment 20001910 PARAMETER Experiment Name: At_Drought_Reproduction_P Parameter: Timepoint (day) Value: 7
  misc_feature: MA Experiment 20001910 PARAMETER Experiment Name: At_Drought_Reproduction_P Parameter: Tissue Value: Flowers
  misc_feature: MA Experiment 20001910 PARAMETER Experiment Name: At_Drought_Reproduction_P Parameter: Treatment Value: Drought vs. No Drought
atgaacttaattagggttctatatgtttagaaaaaaaatgttggtgttagcattattttccatttacttcttatcaatagaaggtgtccggaatgaatcatttcctgcgctattagcttttggagattcaatggtcgatactggtaacaacaattacctcctgactctaatgaaaggaaattactggccatatgggtggaatttcgactcaaaaataccgaccggaagatttggaaacggaagagttttctccgatgtagttgctgaaggtttggggatcaaaagaattgtaccagcttatcgtaagttatacattgctccaagcgaccttaaaacgggtgtttcttttgcatcaggtggtgcaggagtcgaccctgttacatccaaattgctgagagttttatcgccagctgaccaagtaaaagatttcaaaggctacaaaagaaagctaaaaggtgtagtaggcaggtcaaaagcaaaagaaatagttgcaaattcagtgattcttgtttctgaaggaaataatgatattggaatcacatatgcgattcatgatgctggtatgcgattaatgactccgaatatatacaccagtaaattggttggttggaacaaaatttttataaaagatttatatgatcaaggagcacgaaaatttgcggtgatgggagtgataccattgggatgtttgcctatgtcaagacttatttttggtgggttcttcgtgtggtgcaatttcttggcaaacacaatctctgaagattacaacaaaaaattgaaaagcggaattaaaagttggagaggagcatcagattttaggggtgctaagtttgtctatgtcgacatgtacaactctcttatggatgttatcaacaatcataggaaatacggatttacccatgagaagaatggatgttgttgtatgcttacggcaatagtaccatgctccaacccagataaatatgtcttctatgactttgctcatccctccgagaaagcctacaaaacaattgctaaaaagcttgtcgaggatatcaagacaggacttgcctgatttcttacaatgctattttcatcttggaattaccataattaattatatacgtacttcttctgttcc

SEQ ID NO: 25680 - protein, 343 aa, Arabidopsis thaliana
  peptide (1)..(343): Ceres Seq. ID no. 12327099
  misc_feature (30)..(334): Pfam Name: GDSL-like Lipase/Acylhydrolase Pfam Description: GDSL-like Lipase/Acylhydrolase
  misc_feature (1)..(343): Homolog of NCBI NO: 15219505 NR Description: putative lipase/acylhydrolase; protein id:
  misc_feature (1)..(328): Homolog of NCBI NO: 25404995 NR Description: protein T4O12.15 [imported] - Arabidopsis
  misc_feature (1)..(343): Homolog of NCBI NO: 15222904 NR Description: family II extracellular lipase 6 (EXL6)
  misc_feature (24)..(343): Homolog of NCBI NO: 25404994 NR Description: protein T4O12.13 [imported] - Arabidopsis
  misc_feature (9)..(343): Homolog of NCBI NO: 15242657 NR Description: lipase/acylhydrolase-like protein; protein id:
  misc_feature (1)..(343): Homolog of NCBI NO: 15220775 NR Description: hypothetical protein; protein id: At1g23500.1
  misc_feature (1)..(343): Homolog of NCBI NO: 15054388 NR Description: family II lipase EXL4 [Arabidopsis thaliana]
  misc_feature (1)..(343): Homolog of NCBI NO: 15222902 NR Description: family II extracellular lipase 4 (EXL4)
  misc_feature (6)..(343): Homolog of NCBI NO: 18410967 NR Description: family II extracellular lipase 5 (EXL5)
  misc_feature (1)..(343): Homolog of NCBI NO: 8778809 NR Description: T4O12.14 [Arabidopsis thaliana]
MFRKKMLVLALFSIYFLSIEGVRNESFPALLAFGDSMVDTGNNNYLLTLMKGNYWPYGWNFDSKIPTGRFGNGRVFSDVVAEGLGIKRIVPAYRKLYIAPSDLKTGVSFASGGAGVDPVTSKLLRVLSPADQVKDFKGYKRKLKGVVGRSKAKEIVANSVILVSEGNNDIGITYAIHDAGMRLMTPNIYTSKLVGWNKIFIKDLYDQGARKFAVMGVIPLGCLPMSRLIFGGFFVWCNFLANTISEDYNKKLKSGIKSWRGASDFRGAKFVYVDMYNSLMDVINNHRKYGFTHEKNGCCCMLTAIVPCSNPDKYVFYDFAHPSEKAYKTIAKKLVEDIKTGLA

SEQ ID NO: 25681 - protein, 338 aa, Arabidopsis thaliana
  peptide (1)..(338): Ceres Seq. ID no. 12327100
  misc_feature (25)..(329): Pfam Name: GDSL-like Lipase/Acylhydrolase Pfam Description: GDSL-like Lipase/Acylhydrolase
  misc_feature (4)..(338): Homolog of NCBI NO: 15242657 NR Description: lipase/acylhydrolase-like protein; protein id:
  misc_feature (1)..(338): Homolog of NCBI NO: 15220775 NR Description: hypothetical protein; protein id: At1g23500.1
  misc_feature (1)..(338): Homolog of NCBI NO: 15219505 NR Description: putative lipase/acylhydrolase; protein id:
  misc_feature (1)..(323): Homolog of NCBI NO: 25404995 NR Description: protein T4O12.15 [imported] - Arabidopsis
  misc_feature (1)..(338): Homolog of NCBI NO: 15222904 NR Description: family II extracellular lipase 6 (EXL6)
  misc_feature (19)..(338): Homolog of NCBI NO: 25404994 NR Description: protein T4O12.13 [imported] - Arabidopsis
  misc_feature (1)..(338): Homolog of NCBI NO: 15054388 NR Description: family II lipase EXL4 [Arabidopsis thaliana]
  misc_feature (1)..(338): Homolog of NCBI NO: 15222902 NR Description: family II extracellular lipase 4 (EXL4)
  misc_feature (1)..(338): Homolog of NCBI NO: 18410967 NR Description: family II extracellular lipase 5 (EXL5)
  misc_feature (1)..(338): Homolog of NCBI NO: 8778809 NR Description: T4O12.14 [Arabidopsis thaliana]
MLVLALFSIYFLSIEGVRNESFPALLAFGDSMVDTGNNNYLLTLMKGNYWPYGWNFDSKIPTGRFGNGRVFSDVVAEGLGIKRIVPAYRKLYIAPSDLKTGVSFASGGAGVDPVTSKLLRVLSPADQVKDFKGYKRKLKGVVGRSKAKEIVANSVILVSEGNNDIGITYAIHDAGMRLMTPNIYTSKLVGWNKIFIKDLYDQGARKFAVMGVIPLGCLPMSRLIFGGFFVWCNFLANTISEDYNKKLKSGIKSWRGASDFRGAKFVYVDMYNSLMDVINNHRKYGFTHEKNGCCCMLTAIVPCSNPDKYVFYDFAHPSEKAYKTIAKKLVEDIKTGLA

SEQ ID NO: 25682 - protein, 307 aa, Arabidopsis thaliana
  peptide (1)..(307): Ceres Seq. ID no. 12327101
  misc_feature (1)..(298): Pfam Name: GDSL-like Lipase/Acylhydrolase Pfam Description: GDSL-like Lipase/Acylhydrolase
  misc_feature (1)..(307): Homolog of NCBI NO: 15242657 NR Description: lipase/acylhydrolase-like protein; protein id:
  misc_feature (1)..(307): Homolog of NCBI NO: 15220775 NR Description: hypothetical protein; protein id: At1g23500.1
  misc_feature (1)..(307): Homolog of NCBI NO: 15219505 NR Description: putative lipase/acylhydrolase; protein id:
  misc_feature (1)..(292): Homolog of NCBI NO: 25404995 NR Description: protein T4O12.15 [imported] - Arabidopsis
  misc_feature (1)..(307): Homolog of NCBI NO: 15222904 NR Description: family II extracellular lipase 6 (EXL6)
  misc_feature (1)..(307): Homolog of NCBI NO: 25404994 NR Description: protein T4O12.13 [imported] - Arabidopsis
  misc_feature (1)..(307): Homolog of NCBI NO: 15054388 NR Description: family II lipase EXL4 [Arabidopsis thaliana]
  misc_feature (1)..(307): Homolog of NCBI NO: 15222902 NR Description: family II extracellular lipase 4 (EXL4)
  misc_feature (1)..(307): Homolog of NCBI NO: 18410967 NR Description: family II extracellular lipase 5 (EXL5)
  misc_feature (1)..(307): Homolog of NCBI NO: 8778809 NR Description: T4O12.14 [Arabidopsis thaliana]
MVDTGNNNYLLTLMKGNYWPYGWNFDSKIPTGRFGNGRVFSDVVAEGLGIKRIVPAYRKLYIAPSDLKTGVSFASGGAGVDPVTSKLLRVLSPADQVKDFKGYKRKLKGVVGRSKAKEIVANSVILVSEGNNDIGITYAIHDAGMRLMTPNIYTSKLVGWNKIFIKDLYDQGARKFAVMGVIPLGCLPMSRLIFGGFFVWCNFLANTISEDYNKKLKSGIKSWRGASDFRGAKFVYVDMYNSLMDVINNHRKYGFTHEKNGCCCMLTAIVPCSNPDKYVFYDFAHPSEKAYKTIAKKLVEDIKTGLA

SEQ ID NO: 25683 - DNA, 1217 bp, Arabidopsis thaliana
  misc_feature (1)..(1217): Ceres Seq. ID no. 12396274
  misc_feature: MA Experiment ID: 108434 Result: Down-regulated in Transcription
  misc_feature: MA Experiment 108434 PARAMETER Experiment Name: At_Root_Tips_cDNA_P Parameter: Tissue Value: Root Tips
  misc_feature: MA Experiment ID: 108435 Result: Down-regulated in Transcription
  misc_feature: MA Experiment 108435 PARAMETER Experiment Name: At_stm_Mutants_cDNA_P Parameter: Plant Line Value: wt Landsburg vs stm
  misc_feature: MA Experiment 108435 PARAMETER Experiment Name: At_stm_Mutants_cDNA_P Parameter: Tissue Value: Shoot Apical Meristem Region
  misc_feature: MA Experiment ID: 108461 Result: Up-regulated in Transcription
  misc_feature: MA Experiment 108461 PARAMETER Experiment Name: At_Germinating_Seeds_cDNA_P Parameter: Age (day) Value: 1 vs. 0
  misc_feature: MA Experiment 108461 PARAMETER Experiment Name: At_Germinating_Seeds_cDNA_P Parameter: Tissue Value: Germinating Seeds
  misc_feature: MA Experiment ID: 108462 Result: Up-regulated in Transcription
  misc_feature: MA Experiment 108462 PARAMETER Experiment Name: At_Germinating_Seeds_cDNA_P Parameter: Age (day) Value: 2 vs. 0
  misc_feature: MA Experiment 108462 PARAMETER Experiment Name: At_Germinating_Seeds_cDNA_P Parameter: Tissue Value: Germinating Seeds
  misc_feature: MA Experiment ID: 108464 Result: Up-regulated in Transcription
  misc_feature: MA Experiment 108464 PARAMETER Experiment Name: At_Germinating_Seeds_cDNA_P Parameter: Age (day) Value: 4 vs. 0
  misc_feature: MA Experiment 108464 PARAMETER Experiment Name: At_Germinating_Seeds_cDNA_P Parameter: Tissue Value: Germinating Seeds
  misc_feature: MA Experiment ID: 108585 Result: Down-regulated in Transcription
  misc_feature: MA Experiment 108585 PARAMETER Experiment Name: At_5mM_NaNP_cDNA_P Parameter: Timepoint (hr) Value: 6
  misc_feature: MA Experiment 108585 PARAMETER Experiment Name: At_5mM_NaNP_cDNA_P Parameter: Tissue Value: Aerial
  misc_feature: MA Experiment 108585 PARAMETER Experiment Name: At_5mM_NaNP_cDNA_P Parameter: Treatment Value: null
  misc_feature: MA Experiment ID: 108595 Result: Down-regulated in Transcription
  misc_feature: MA Experiment 108595 PARAMETER Experiment Name: At_Ler-pi_Ovule_cDNA_P Parameter: Plant Line Value: null
  misc_feature: MA Experiment ID: 20000087 Result: Down-regulated in Transcription
  misc_feature: MA Experiment 20000087 PARAMETER Experiment Name: At_100uM_ABA_Mutants_cDNA_P Parameter: Plant Line Value: WS
  misc_feature: MA Experiment 20000087 PARAMETER Experiment Name: At_100uM_ABA_Mutants_cDNA_P Parameter: Timepoint (hr) Value: 6
  misc_feature: MA Experiment 20000087 PARAMETER Experiment Name: At_100uM_ABA_Mutants_cDNA_P Parameter: Tissue Value: Aerial
  misc_feature: MA Experiment 20000087 PARAMETER Experiment Name: At_100uM_ABA_Mutants_cDNA_P Parameter: Treatment Value: 100uM ABA vs. No Treatment
  misc_feature: MA Experiment ID: 20000089 Result: Down-regulated in Transcription
  misc_feature: MA Experiment ID: 20000090 Result: Down-regulated in Transcription
  misc_feature: MA Experiment ID: 20000180 Result: Up-regulated in Transcription
  misc_feature: MA Experiment 20000180 PARAMETER Experiment Name: At_Germinating_Seeds_P Parameter: Age (hr) Value: 24 vs. 0
  misc_feature: MA Experiment 20000180 PARAMETER Experiment Name: At_Germinating_Seeds_P Parameter: Tissue Value: Germinating Seeds
  misc_feature: MA Experiment ID: 20000227 Result: Down-regulated in Transcription
  misc_feature: MA Experiment 20000227 PARAMETER Experiment Name: At_Root-Tips-vs-Tops_P Parameter: Tissue Value: Root Tips vs. Root Tops
  misc_feature: MA Experiment ID: 20000438 Result: Up-regulated in Transcription
  misc_feature: MA Experiment 20000438 PARAMETER Experiment Name: At_Shoots__P Parameter: Age (day) Value: 14
  misc_feature: MA Experiment 20000438 PARAMETER Experiment Name: At_Shoots__P Parameter: Tissue Value: Shoots vs. Whole Plant
agaaaacgagaaatgtcagagatagaagaagaagaagaagaaggatcagcaagtgcaattacaggttcgagaagtttcgatcttcccgatgaacttcttcaagttctaccgtccgatccattcgagcagctagatgtagctcgcaaaatcacatccattgctctctcgacacgtgtctcagctctcgaatcagagtcgtcggatctccgggaacttctcgccgagaaagaaaaagaatttgaagaactccagtctcacgttgagtctctcgaggcttctctttccgatgcgtttcataagctttctctcgctgatggtgaaaaggagaatctgataagagaaaatgcttctttgtctaatactgtcaagagacttcagagagatgtctcaaagcttgagggttttaggaagacgcttatgatgtctcttcaagatgatgaccaaaatgcaggaacaacgcaaatcatcgctaagccgacaccaaacgatgatgatactccatttcaaccttcaagacattcatcaatccaatctcaacaagcttctgaagccattgaaccagctgcaactgacaacgaaaacgatgctcctaaaccaagtttatcagctagtcttccgttagtatcacaaactactacgccacggcttactcctcctggttctccaccaatcttatctgcttctggtacaccgaaaacaacttcgagacctatctctcctcgacgccattctgtatcgttcgctaccactagaggcatgtttgatgatactagatcttctatttcaatctcagagcctggttcacaaactgcgagaactcgggttgatggaaaagagttctttcgacaagtcaggagccgattatcttacgagcaatttggtgcatttcttggaaatgtgaaggatcttaacgcccacaagcaaacaagagaagaaacacttaggaaagctgaagagatatttggaggcgataacagagatctctacgtcatattcgagggcttgatcacacgcaacgctcactaagagtttggcttcttcagttacacaaagaacttatatactcggaaactcaggattcatcagtctgcaacattcaatttcttttgtttccttggctgtcaagtaagaccaagtaaaactgacaatttgattgtatcatttgtgctctctcgtgtatctatctatctctctcttcttgaataaattacatttca

SEQ ID NO: 25684 - protein, 341 aa, Arabidopsis thaliana
  peptide (1)..(341): Ceres Seq. ID no. 12396275
  misc_feature (26)..(272): Homolog of NCBI NO: 25404089 NR Description: hypothetical protein T6H22.12 [imported] -
  misc_feature (276)..(340): Homolog of NCBI NO: 23489944 NR Description: hypothetical protein [Plasmodium yoelii yoelii]
  misc_feature (33)..(146): Homolog of NCBI NO: 23489944 NR Description: hypothetical protein [Plasmodium yoelii yoelii]
  misc_feature (276)..(340): Homolog of NCBI NO: 23613663 NR Description: hypothetical protein, conserved [Plasmodium
  misc_feature (33)..(146): Homolog of NCBI NO: 23613663 NR Description: hypothetical protein, conserved [Plasmodium
  misc_feature (15)..(339): Homolog of NCBI NO: 38344261 NR Description: OSJNBa0008M17.14 [Oryza sativa (japonica
  misc_feature (26)..(337): Homolog of NCBI NO: 15222835 NR Description: hypothetical protein; protein id: At1g56080.1
  misc_feature (26)..(339): Homolog of NCBI NO: 30684901 NR Description: expressed protein [Arabidopsis thaliana]
  misc_feature (14)..(311): Homolog of NCBI NO: 7485048 NR Description: hypothetical protein - Arabidopsis thaliana
  misc_feature (5)..(341): Homolog of NCBI NO: 18414476 NR Description: Expressed protein
RKREMSEIEEEEEEGSASAITGSRSFDLPDELLQVLPSDPFEQLDVARKITSIALSTRVSALESESSDLRELLAEKEKEFEELQSHVESLEASLSDAFHKLSLADGEKENLIRENASLSNTVKRLQRDVSKLEGFRKTLMMSLQDDDQNAGTTQIIAKPTPNDDDTPFQPSRHSSIQSQQASEAIEPAATDNENDAPKPSLSASLPLVSQTTTPRLTPPGSPPILSASGTPKTTSRPISPRRHSVSFATTRGMFDDTRSSISISEPGSQTARTRVDGKEFFRQVRSRLSYEQFGAFLGNVKDLNAHKQTREETLRKAEEIFGGDNRDLYVIFEGLITRNAH

SEQ ID NO: 25685 - protein, 337 aa, Arabidopsis thaliana
  peptide (1)..(337): Ceres Seq. ID no. 12396276
  misc_feature (22)..(268): Homolog of NCBI NO: 25404089 NR Description: hypothetical protein T6H22.12 [imported] -
  misc_feature (272)..(336): Homolog of NCBI NO: 23489944 NR Description: hypothetical protein [Plasmodium yoelii yoelii]
  misc_feature (29)..(142): Homolog of NCBI NO: 23489944 NR Description: hypothetical protein [Plasmodium yoelii yoelii]
  misc_feature (272)..(336): Homolog of NCBI NO: 23613663 NR Description: hypothetical protein, conserved [Plasmodium
  misc_feature (29)..(142): Homolog of NCBI NO: 23613663 NR Description: hypothetical protein, conserved [Plasmodium
  misc_feature (11)..(335): Homolog of NCBI NO: 38344261 NR Description: OSJNBa0008M17.14 [Oryza sativa (japonica
  misc_feature (22)..(333): Homolog of NCBI NO: 15222835 NR Description: hypothetical protein; protein id: At1g56080.1
  misc_feature (22)..(335): Homolog of NCBI NO: 30684901 NR Description: expressed protein [Arabidopsis thaliana]
  misc_feature (10)..(307): Homolog of NCBI NO: 7485048 NR Description: hypothetical protein - Arabidopsis thaliana
  misc_feature (1)..(337): Homolog of NCBI NO: 18414476 NR Description: Expressed protein
MSEIEEEEEEGSASAITGSRSFDLPDELLQVLPSDPFEQLDVARKITSIALSTRVSALESESSDLRELLAEKEKEFEELQSHVESLEASLSDAFHKLSLADGEKENLIRENASLSNTVKRLQRDVSKLEGFRKTLMMSLQDDDQNAGTTQIIAKPTPNDDDTPFQPSRHSSIQSQQASEAIEPAATDNENDAPKPSLSASLPLVSQTTTPRLTPPGSPPILSASGTPKTTSRPISPRRHSVSFATTRGMFDDTRSSISISEPGSQTARTRVDGKEFFRQVRSRLSYEQFGAFLGNVKDLNAHKQTREETLRKAEEIFGGDNRDLYVIFEGLITRNAH

SEQ ID NO: 25686 - protein, 202 aa, Arabidopsis thaliana
  peptide (1)..(202): Ceres Seq. ID no. 12396277
  misc_feature (1)..(130): Homolog of NCBI NO: 34909876 NR Description: B1143G03.2 [Oryza sativa (japonica
  misc_feature (1)..(133): Homolog of NCBI NO: 25404089 NR Description: hypothetical protein T6H22.12 [imported] -
  misc_feature (137)..(201): Homolog of NCBI NO: 23489944 NR Description: hypothetical protein [Plasmodium yoelii yoelii]
  misc_feature (137)..(201): Homolog of NCBI NO: 23613663 NR Description: hypothetical protein, conserved [Plasmodium
  misc_feature (1)..(200): Homolog of NCBI NO: 38344261 NR Description: OSJNBa0008M17.14 [Oryza sativa (japonica
  misc_feature (1)..(198): Homolog of NCBI NO: 15222835 NR Description: hypothetical protein; protein id: At1g56080.1
  misc_feature (1)..(200): Homolog of NCBI NO: 30684901 NR Description: expressed protein [Arabidopsis thaliana]
  misc_feature (1)..(172): Homolog of NCBI NO: 7485048 NR Description: hypothetical protein - Arabidopsis thaliana
  misc_feature (1)..(202): Homolog of NCBI NO: 18414476 NR Description: Expressed protein
MMSLQDDDQNAGTTQIIAKPTPNDDDTPFQPSRHSSIQSQQASEAIEPAATDNENDAPKPSLSASLPLVSQTTTPRLTPPGSPPILSASGTPKTTSRPISPRRHSVSFATTRGMFDDTRSSISISEPGSQTARTRVDGKEFFRQVRSRLSYEQFGAFLGNVKDLNAHKQTREETLRKAEEIFGGDNRDLYVIFEGLITRNAH

SEQ ID NO: 25687 - DNA, 1887 bp, Arabidopsis thaliana
  misc_feature (1)..(1887): Ceres Seq. ID no. 12343455
  misc_feature: MA Experiment ID: 108573 Result: Up-regulated in Transcription
  misc_feature: MA Experiment 108573 PARAMETER Experiment Name: At_Drought_cDNA_P Parameter: Timepoint (hr) Value: 6
  misc_feature: MA Experiment 108573 PARAMETER Experiment Name: At_Drought_cDNA_P Parameter: Tissue Value: Aerial
  misc_feature: MA Experiment 108573 PARAMETER Experiment Name: At_Drought_cDNA_P Parameter: Treatment Value: Drought vs. No Drought
  misc_feature: MA Experiment ID: 108577 Result: Down-regulated in Transcription
  misc_feature: MA Experiment 108577 PARAMETER Experiment Name: At_42deg_Heat_cDNA_P Parameter: Temperature (deg C) Value: 42 vs. 22
  misc_feature: MA Experiment 108577 PARAMETER Experiment Name: At_42deg_Heat_cDNA_P Parameter: Timepoint (hr) Value: 6
  misc_feature: MA Experiment 108577 PARAMETER Experiment Name: At_42deg_Heat_cDNA_P Parameter: Tissue Value: Aerial
  misc_feature: MA Experiment ID: 20000173 Result: Down-regulated in Transcription
  misc_feature: MA Experiment 20000173 PARAMETER Experiment Name: At_42deg_Heat_P Parameter: Age (day) Value: 14
  misc_feature: MA Experiment 20000173 PARAMETER Experiment Name: At_42deg_Heat_P Parameter: Organism Value: A. thaliana
  misc_feature: MA Experiment 20000173 PARAMETER Experiment Name: At_42deg_Heat_P Parameter: Plant Line Value: WS
  misc_feature: MA Experiment 20000173 PARAMETER Experiment Name: At_42deg_Heat_P Parameter: Temperature (deg C) Value: 42 vs. 22
  misc_feature: MA Experiment 20000173 PARAMETER Experiment Name: At_42deg_Heat_P Parameter: Timepoint (hr) Value: 6
  misc_feature: MA Experiment 20000173 PARAMETER Experiment Name: At_42deg_Heat_P Parameter: Tissue Value: Aerial
aaaaaagagagaaggagaggtcgtgttagataattagagcgcacttgcgagcaacaacgaacgacgacccactgattcaatctcctcctctctgcatattccttggcatcttttctggtaccgaagctgagtctctggagagtttctagatcttcttcaattctgcaattcagagcgaagatttattagtgattgattattcactctggagctcgagttctggatccgtgtggctggagggaatgttctgttaagctgattgtttaggcttgttggatcagtatagaaattgtcagattgagaaagacaacaaatgaagaacggtatagctgagtgccctgcatgtcattcaaaattggtctctcctggtagcaaaactatttctagggcttatgacgaccacaagattagggtatcctcaaaacaacgtgtcctcaatgtccttttggttgtaggtgattgcatgcttgttggtctccagcctgtcttggtgtatatgtcgaaggtggatgggaaattcaacttcagtcctattagcgtcaacttcttgacagaaatcgcaaaagttatttttgcgattgtgatgcttttaatccaggccaggcaccaaaaagttggagagaagcctcttctatccgtttccacatttgtccaggcagcccgaaataatgtgcttcttgctgttccagccctgttgtatgcaattaataactatctgaagttcacaatgcagctatatttcaatcctgctactgtaaagatgcttagcaacctaaaggttctggtcatcgctgttctattaaagatggtaatgaagcggcggttttctatcatacagtgggaggcacttgctctgttgctgatagggattagtgtaaaccaattacgttctcttcctgaaggtgctacagccattggaattcctcttgctacgggtgcatacgtctgcaccgttatctttgtcactgtcccgtcaatggcatctgtcttcaacgagtatgctctaaagagtcagtatgacacaagcatatatcttcagaatttattcctctatggttatggtgcaatattcaactttcttggaatactaggaactgttatatataaaggtcctggcagctttgacatcctacaaggacattctagggctaccatgtttttgatactgaacaacgcagcacaagggattttatcgtcctttttcttcaaatatgcagatacaatcttgaagaaatattcatcgacagttgccacaatatttactggcatagcatctgctgcgctctttggacatgttataaccatgaacttccttctcggaatttctatcgttttcatttcgatgcaccagttcttttcaccacttgccaaagcgagagacgagcaacaacagaatgggaacctagaactaggcaacacaaaggatactcacagggctaatgaatcattcatcaacatggccgcaggagcaaatgaagaggctagtcaccgcggtgaatcagacgacaggactccactgcttcccagatgaaaagtttcttaaatgatttttgttcggaagaattattttggccaagaatattctagaaattgggggttttccattcgtatactagcagaggaaacagtgaagcaaacttcatgacaccaactcttacttctctcaagagtcggttttaaagttcgttgaagaacctctcaagtctgaagctgtattgttttaagatagagtgagaacaaaattggtaagtgatatatgtattttggatatataatatttgtattctttggtttttgcaaaatatcaggtcacacttttttgctcttgtttatacaattactctcacagttggattcttcttatatatataaaagcataatttttcc

SEQ ID NO: 25688 - protein, 405 aa, Arabidopsis thaliana
  peptide (1)..(405): Ceres Seq. ID no. 12343456
  misc_feature (104)..(340): Pfam Name: Nucleotide-sugar transporter Pfam Description: Nucleotide-sugar transporter
  misc_feature (1)..(335): Homolog of NCBI NO: 11358902 NR Description: transporter-like protein - Arabidopsis thaliana
  misc_feature (214)..(391): Homolog of NCBI NO: 30689311 NR Description: expressed protein [Arabidopsis thaliana]
  misc_feature (5)..(242): Homolog of NCBI NO: 30689311 NR Description: expressed protein [Arabidopsis thaliana]
  misc_feature (3)..(56): Homolog of NCBI NO: 34907666 NR Description: putative transporter-like protein
  misc_feature (45)..(380): Homolog of NCBI NO: 34907666 NR Description: putative transporter-like protein
  misc_feature (214)..(391): Homolog of NCBI NO: 25408848 NR Description: hypothetical protein At2g43240 [imported] -
  misc_feature (5)..(242): Homolog of NCBI NO: 25408848 NR Description: hypothetical protein At2g43240 [imported] -
  misc_feature (2)..(404): Homolog of NCBI NO: 38345234 NR Description: OSJNBa0084K20.12 [Oryza sativa (japonica
  misc_feature (1)..(405): Homolog of NCBI NO: 26450627 NR Description: unknown protein [Arabidopsis thaliana]
  misc_feature (1)..(405): Homolog of NCBI NO: 18411150 NR Description: transporter-like protein
MKNGIAECPACHSKLVSPGSKTISRAYDDHKIRVSSKQRVLNVLLVVGDCMLVGLQPVLVYMSKVDGKFNFSPISVNFLTEIAKVIFAIVMLLIQARHQKVGEKPLLSVSTFVQAARNNVLLAVPALLYAINNYLKFTMQLYFNPATVKMLSNLKVLVIAVLLKMVMKRRFSIIQWEALALLLIGISVNQLRSLPEGATAIGIPLATGAYVCTVIFVTVPSMASVFNEYALKSQYDTSIYLQNLFLYGYGAIFNFLGILGTVIYKGPGSFDILQGHSRATMFLILNNAAQGILSSFFFKYADTILKKYSSTVATIFTGIASAALFGHVITMNFLLGISIVFISMHQFFSPLAKARDEQQQNGNLELGNTKDTHRANESFINMAAGANEEASHRGESDDRTPLLPR

SEQ ID NO: 25689 - protein, 355 aa, Arabidopsis thaliana
  peptide (1)..(355): Ceres Seq. ID no. 12343457
  misc_feature (54)..(290): Pfam Name: Nucleotide-sugar transporter Pfam Description: Nucleotide-sugar transporter
  misc_feature (1)..(355): Homolog of NCBI NO: 11358902 NR Description: transporter-like protein - Arabidopsis thaliana
  misc_feature (1)..(285): Homolog of NCBI NO: 11358902 NR Description: transporter-like protein - Arabidopsis thaliana
  misc_feature (164)..(341): Homolog of NCBI NO: 30689311 NR Description: expressed protein [Arabidopsis thaliana]
  misc_feature (1)..(192): Homolog of NCBI NO: 30689311 NR Description: expressed protein [Arabidopsis thaliana]
  misc_feature (1)..(330): Homolog of NCBI NO: 34907666 NR Description: putative transporter-like protein
  misc_feature (164)..(341): Homolog of NCBI NO: 25408848 NR Description: hypothetical protein At2g43240 [imported] -
  misc_feature (1)..(192): Homolog of NCBI NO: 25408848 NR Description: hypothetical protein At2g43240 [imported] -
  misc_feature (1)..(354): Homolog of NCBI NO: 38345234 NR Description: OSJNBa0084K20.12 [Oryza sativa (japonica
  misc_feature (1)..(355): Homolog of NCBI NO: 26450627 NR Description: unknown protein [Arabidopsis thaliana]
  misc_feature (1)..(355): Homolog of NCBI NO: 18411150 NR Description: transporter-like protein
MLVGLQPVLVYMSKVDGKFNFSPISVNFLTEIAKVIFAIVMLLIQARHQKVGEKPLLSVSTFVQAARNNVLLAVPALLYAINNYLKFTMQLYFNPATVKMLSNLKVLVIAVLLKMVMKRRFSIIQWEALALLLIGISVNQLRSLPEGATAIGIPLATGAYVCTVIFVTVPSMASVFNEYALKSQYDTSIYLQNLFLYGYGAIFNFLGILGTVIYKGPGSFDILQGHSRATMFLILNNAAQGILSSFFFKYADTILKKYSSTVATIFTGIASAALFGHVITMNFLLGISIVFISMHQFFSPLAKARDEQQQNGNLELGNTKDTHRANESFINMAAGANEEASHRGESDDRTPLLPR

SEQ ID NO: 25690 - protein, 344 aa, Arabidopsis thaliana
  peptide (1)..(344): Ceres Seq. ID no. 12343458
  misc_feature (43)..(279): Pfam Name: Nucleotide-sugar transporter Pfam Description: Nucleotide-sugar transporter
  misc_feature (1)..(344): Homolog of NCBI NO: 11358902 NR Description: transporter-like protein - Arabidopsis thaliana
  misc_feature (1)..(274): Homolog of NCBI NO: 11358902 NR Description: transporter-like protein - Arabidopsis thaliana
  misc_feature (153)..(330): Homolog of NCBI NO: 30689311 NR Description: expressed protein [Arabidopsis thaliana]
  misc_feature (1)..(181): Homolog of NCBI NO: 30689311 NR Description: expressed protein [Arabidopsis thaliana]
  misc_feature (1)..(319): Homolog of NCBI NO: 34907666 NR Description: putative transporter-like protein
  misc_feature (153)..(330): Homolog of NCBI NO: 25408848 NR Description: hypothetical protein At2g43240 [imported] -
  misc_feature (1)..(181): Homolog of NCBI NO: 25408848 NR Description: hypothetical protein At2g43240 [imported] -
  misc_feature (1)..(343): Homolog of NCBI NO: 38345234 NR Description: OSJNBa0084K20.12 [Oryza sativa (japonica
  misc_feature (1)..(344): Homolog of NCBI NO: 26450627 NR Description: unknown protein [Arabidopsis thaliana]
  misc_feature (1)..(344): Homolog of NCBI NO: 18411150 NR Description: transporter-like protein
MSKVDGKFNFSPISVNFLTEIAKVIFAIVMLLIQARHQKVGEKPLLSVSTFVQAARNNVLLAVPALLYAINNYLKFTMQLYFNPATVKMLSNLKVLVIAVLLKMVMKRRFSIIQWEALALLLIGISVNQLRSLPEGATAIGIPLATGAYVCTVIFVTVPSMASVFNEYALKSQYDTSIYLQNLFLYGYGAIFNFLGILGTVIYKGPGSFDILQGHSRATMFLILNNAAQGILSSFFFKYADTILKKYSSTVATIFTGIASAALFGHVITMNFLLGISIVFISMHQFFSPLAKARDEQQQNGNLELGNTKDTHRANESFINMAAGANEEASHRGESDDRTPLLPR

SEQ ID NO: 25691 - DNA, 729 bp, Arabidopsis thaliana
  misc_feature (1)..(729): Ceres Seq. ID no. 12370677
  misc_feature: MA Experiment ID: 108463 Result: Down-regulated in Transcription
  misc_feature: MA Experiment 108463 PARAMETER Experiment Name: At_Germinating_Seeds_cDNA_P Parameter: Age (day) Value: 3 vs. 0
  misc_feature: MA Experiment 108463 PARAMETER Experiment Name: At_Germinating_Seeds_cDNA_P Parameter: Tissue Value: Germinating Seeds
  misc_feature: MA Experiment ID: 108579 Result: Down-regulated in Transcription
  misc_feature: MA Experiment 108579 PARAMETER Experiment Name: At_4deg_Cold_cDNA_P Parameter: Temperature (deg C) Value: 4 vs. 22
  misc_feature: MA Experiment 108579 PARAMETER Experiment Name: At_4deg_Cold_cDNA_P Parameter: Timepoint (hr) Value: 6
  misc_feature: MA Experiment 108579 PARAMETER Experiment Name: At_4deg_Cold_cDNA_P Parameter: Tissue Value: Aerial
atcatcggagccgtttctctctctcgaactcgatttaagtatttgaatcttgccaatggatttgacgtggttaagtgccctaattgttggagctgcacttggatactgcgttggcactcgccgttccaaacctgttgttgctgctgttgataaggatatcaaaactcaatcctccaaaagtccactcgagattgagaaactcgctgatattctcgatgatttcaagatggttttggtggtgagaaatgatcttaaaatgggtaaaggaaagattgcagctcaatgcagtcatgcaactttaggattatacaagaagcttgttcgtcgagcgccaaaagcattggactgctgggaggaatgtgcacagccaaaagttgttgtgaaaatcgaggacgaggacgagatgctagaattgcaagaaagagctaaatcccttaaactgcctacccatatcaccattgatgctggaagaacacagattgccccaaattcaaggacggttatggctattcttggaccagtcgaagttgttgatgaagtaacaggtggactaaagcttctttagcagattcgaatttcgatatgacatttcttcaacctgatctctcagatggaccaagcagaaaggagagacatgaactccaccttctctgttcgcccgaggttacctgtgagaaatctgtagttgttacgtatactcgttcctgatgatgacgaaatattcatttt

SEQ ID NO: 25692 - protein, 169 aa, Arabidopsis thaliana
  peptide (1)..(169): Ceres Seq. ID no. 12370678
  misc_feature (65)..(155): Pfam Name: Domain of unknown function UPF0099 Pfam Description: Domain of unknown function UPF0099
  misc_feature (1)..(169): Homolog of NCBI NO: 18418110 NR Description: putative protein
  misc_feature (8)..(168): Homolog of NCBI NO: 33239415 NR Description: RIKEN cDNA A230072I16 gene [Mus musculus]
  misc_feature (8)..(168): Homolog of NCBI NO: 27674393 NR Description: similar to Protein CGI-147 [Rattus norvegicus]
  misc_feature (9)..(168): Homolog of NCBI NO: 7706351 NR Description: CGI-147 protein [Homo sapiens]
  misc_feature (1)..(169): Homolog of NCBI NO: 15228442 NR Description: unknown protein; protein id: At3g03010.1
  misc_feature (1)..(169): Homolog of NCBI NO: 11357729 NR Description: hypothetical protein F2K13_20 - Arabidopsis
  misc_feature (36)..(169): Homolog of NCBI NO: 38345901 NR Description: OSJNBa0060D06.11 [Oryza sativa (japonica
  misc_feature (9)..(168): Homolog of NCBI NO: 11359891 NR Description: hypothetical protein DKFZp434A1535.1 - human
  misc_feature (8)..(168): Homolog of NCBI NO: 29428218 NR Description: Protein CGI-147
  misc_feature (1)..(169): Homolog of NCBI NO: 21592675 NR Description: unknown [Arabidopsis thaliana]
MDLTWLSALIVGAALGYCVGTRRSKPVVAAVDKDIKTQSSKSPLEIEKLADILDDFKMVLVVRNDLKMGKGKIAAQCSHATLGLYKKLVRRAPKALDCWEECAQPKVVVKIEDEDEMLELQERAKSLKLPTHITIDAGRTQIAPNSRTVMAILGPVEVVDEVTGGLKLL

SEQ ID NO: 25693 - protein, 112 aa, Arabidopsis thaliana
  peptide (1)..(112): Ceres Seq. ID no. 12370679
  misc_feature (8)..(98): Pfam Name: Domain of unknown function UPF0099 Pfam Description: Domain of unknown function UPF0099
  misc_feature (1)..(111): Homolog of NCBI NO: 33239415 NR Description: RIKEN cDNA A230072I16 gene [Mus musculus]
  misc_feature (1)..(111): Homolog of NCBI NO: 29428218 NR Description: Protein CGI-147
  misc_feature (1)..(111): Homolog of NCBI NO: 27674393 NR Description: similar to Protein CGI-147 [Rattus norvegicus]
  misc_feature (1)..(111): Homolog of NCBI NO: 11359891 NR Description: hypothetical protein DKFZp434A1535.1 - human
  misc_feature (1)..(111): Homolog of NCBI NO: 7706351 NR Description: CGI-147 protein [Homo sapiens]
  misc_feature (1)..(112): Homolog of NCBI NO: 38345901 NR Description: OSJNBa0060D06.11 [Oryza sativa (japonica
  misc_feature (1)..(112): Homolog of NCBI NO: 15228442 NR Description: unknown protein; protein id: At3g03010.1
  misc_feature (1)..(112): Homolog of NCBI NO: 11357729 NR Description: hypothetical protein F2K13_20 - Arabidopsis
  misc_feature (1)..(112): Homolog of NCBI NO: 18418110 NR Description: putative protein
  misc_feature (1)..(112): Homolog of NCBI NO: 21592675 NR Description: unknown [Arabidopsis thaliana]
MVLVVRNDLKMGKGKIAAQCSHATLGLYKKLVRRAPKALDCWEECAQPKVVVKIEDEDEMLELQERAKSLKLPTHITIDAGRTQIAPNSRTVMAILGPVEVVDEVTGGLKLL

SEQ ID NO: 25694 - protein, 102 aa, Arabidopsis thaliana
  peptide (1)..(102): Ceres Seq. ID no. 12370680
  misc_feature (1)..(88): Pfam Name: Domain of unknown function UPF0099 Pfam Description: Domain of unknown function UPF0099
  misc_feature (1)..(101): Homolog of NCBI NO: 33239415 NR Description: RIKEN cDNA A230072I16 gene [Mus musculus]
  misc_feature (1)..(101): Homolog of NCBI NO: 29428218 NR Description: Protein CGI-147
  misc_feature (1)..(101): Homolog of NCBI NO: 27674393 NR Description: similar to Protein CGI-147 [Rattus norvegicus]
  misc_feature (1)..(101): Homolog of NCBI NO: 11359891 NR Description: hypothetical protein DKFZp434A1535.1 - human
  misc_feature (1)..(101): Homolog of NCBI NO: 7706351 NR Description: CGI-147 protein [Homo sapiens]
  misc_feature (1)..(102): Homolog of NCBI NO: 38345901 NR Description: OSJNBa0060D06.11 [Oryza sativa (japonica
  misc_feature (1)..(102): Homolog of NCBI NO: 15228442 NR Description: unknown protein; protein id: At3g03010.1
  misc_feature (1)..(102): Homolog of NCBI NO: 11357729 NR Description: hypothetical protein F2K13_20 - Arabidopsis
  misc_feature (1)..(102): Homolog of NCBI NO: 18418110 NR Description: putative protein
  misc_feature (1)..(102): Homolog of NCBI NO: 21592675 NR Description: unknown [Arabidopsis thaliana]
MGKGKIAAQCSHATLGLYKKLVRRAPKALDCWEECAQPKVVVKIEDEDEMLELQERAKSLKLPTHITIDAGRTQIAPNSRTVMAILGPVEVVDEVTGGLKLL

SEQ ID NO: 25695 - DNA, 1387 bp, Arabidopsis thaliana
  misc_feature (1)..(1387): Ceres Seq. ID no. 12333211
  misc_feature: MA Experiment ID: 108576 Result: Up-regulated in Transcription
  misc_feature: MA Experiment 108576 PARAMETER Experiment Name: At_42deg_Heat_cDNA_P Parameter: Temperature (deg C) Value: 42 vs. 22
  misc_feature: MA Experiment 108576 PARAMETER Experiment Name: At_42deg_Heat_cDNA_P Parameter: Timepoint (hr) Value: 1
  misc_feature: MA Experiment 108576 PARAMETER Experiment Name: At_42deg_Heat_cDNA_P Parameter: Tissue Value: Aerial
  misc_feature: MA Experiment ID: 20000111 Result: Up-regulated in Transcription
  misc_feature: MA Experiment 20000111 PARAMETER Experiment Name: At_42deg_Heat_cDNA_P Parameter: Temperature (deg C) Value: 42 vs. 22
  misc_feature: MA Experiment 20000111 PARAMETER Experiment Name: At_42deg_Heat_cDNA_P Parameter: Timepoint (hr) Value: 6
  misc_feature: MA Experiment 20000111 PARAMETER Experiment Name: At_42deg_Heat_cDNA_P Parameter: Tissue Value: Aerial
  misc_feature: MA Experiment ID: 20000113 Result: Up-regulated in Transcription
  misc_feature: MA Experiment 20000113 PARAMETER Experiment Name: At_42deg_Heat_cDNA_P Parameter: Temperature (deg C) Value: 42 vs. 22
  misc_feature: MA Experiment 20000113 PARAMETER Experiment Name: At_42deg_Heat_cDNA_P Parameter: Timepoint (hr) Value: 8
  misc_feature: MA Experiment 20000113 PARAMETER Experiment Name: At_42deg_Heat_cDNA_P Parameter: Tissue Value: Aerial
  misc_feature: MA Experiment ID: 20000173 Result: Up-regulated in Transcription
  misc_feature: MA Experiment 20000173 PARAMETER Experiment Name: At_42deg_Heat_P Parameter: Age (day) Value: 14
  misc_feature: MA Experiment 20000173 PARAMETER Experiment Name: At_42deg_Heat_P Parameter: Organism Value: A. thaliana
  misc_feature: MA Experiment 20000173 PARAMETER Experiment Name: At_42deg_Heat_P Parameter: Plant Line Value: WS
  misc_feature: MA Experiment 20000173 PARAMETER Experiment Name: At_42deg_Heat_P Parameter: Temperature (deg C) Value: 42 vs. 22
  misc_feature: MA Experiment 20000173 PARAMETER Experiment Name: At_42deg_Heat_P Parameter: Timepoint (hr) Value: 6
  misc_feature: MA Experiment 20000173 PARAMETER Experiment Name: At_42deg_Heat_P Parameter: Tissue Value: Aerial
  misc_feature: MA Experiment ID: 20000224 Result: Down-regulated in Transcription
  misc_feature: MA Experiment ID: 20001247 Result: Up-regulated in Transcription
  misc_feature: MA Experiment 20001247 PARAMETER Experiment Name: At_Far-red-induction_P Parameter: Age (day) Value: 7
  misc_feature: MA Experiment 20001247 PARAMETER Experiment Name: At_Far-red-induction_P Parameter: Light Value: Far-red vs. White
  misc_feature: MA Experiment 20001247 PARAMETER Experiment Name: At_Far-red-induction_P Parameter: Organism Value: A. thaliana
  misc_feature: MA Experiment 20001247 PARAMETER Experiment Name: At_Far-red-induction_P Parameter: Plant Line Value: Columbia
  misc_feature: MA Experiment 20001247 PARAMETER Experiment Name: At_Far-red-induction_P Parameter: Timepoint (hr) Value: 1
  misc_feature: MA Experiment 20001247 PARAMETER Experiment Name: At_Far-red-induction_P Parameter: Tissue Value: Whole Plant
  misc_feature: MA Experiment ID: 20001248 Result: Up-regulated in Transcription
  misc_feature: MA Experiment 20001248 PARAMETER Experiment Name: At_Far-red-induction_P Parameter: Age (day) Value: 7
  misc_feature: MA Experiment 20001248 PARAMETER Experiment Name: At_Far-red-induction_P Parameter: Light Value: Far-red vs. White
  misc_feature: MA Experiment 20001248 PARAMETER Experiment Name: At_Far-red-induction_P Parameter: Organism Value: A. thaliana
  misc_feature: MA Experiment 20001248 PARAMETER Experiment Name: At_Far-red-induction_P Parameter: Plant Line Value: Columbia
  misc_feature: MA Experiment 20001248 PARAMETER Experiment Name: At_Far-red-induction_P Parameter: Timepoint (hr) Value: 4
  misc_feature: MA Experiment 20001248 PARAMETER Experiment Name: At_Far-red-induction_P Parameter: Tissue Value: Whole Plant
  misc_feature: MA Experiment ID: 20001450 Result: Up-regulated in Transcription
  misc_feature: MA Experiment 20001450 PARAMETER Experiment Name: At_Far-red-induction_P Parameter: Age (day) Value: 7
  misc_feature: MA Experiment 20001450 PARAMETER Experiment Name: At_Far-red-induction_P Parameter: Light Value: Far-red vs. White
  misc_feature: MA Experiment 20001450 PARAMETER Experiment Name: At_Far-red-induction_P Parameter: Organism Value: A. thaliana
  misc_feature: MA Experiment 20001450 PARAMETER Experiment Name: At_Far-red-induction_P Parameter: Plant Line Value: Columbia
  misc_feature: MA Experiment 20001450 PARAMETER Experiment Name: At_Far-red-induction_P Parameter: Timepoint (hr) Value: 8
  misc_feature: MA Experiment 20001450 PARAMETER Experiment Name: At_Far-red-induction_P Parameter: Tissue Value: Whole Plant
attattctcttccccacttgattgcgatttgagagagataaaggtcgagaaagtcttttcatctccttcaccctcatcgtttcgcgtctcttctcttctctctcagaaaatgctcatcagaaattgtctcctttttgtttccttgatgtgttttctcttctaatctccggtgaaacaaagaacaaaggattcataagacacaaagcagagaaggagagagagatacgaggcttttcttcatcttctatggcttctatgaccgagaaggaagctatggtggatccttttttggtcgaggctcttcaaaatcctcgtcatcgtctcaccattttgcgaatggagcttgatatacagaagttctttcaaaaccctgagcagcttcagttcgaattcccgccttttccaacatcgtacctgcgtcttgctgcacatcgagttgctcagcattatggactagtaaccatggctttggacaatggtactggtacaggagatggatccgataacagaatcctcgtgacgaagacagcggaaagtagatttccttatgtctgcttatccgaaatccctgtgaaacaacctgagaatggtagacccgagggtttcaaaatcgctatcaagcctagacccaagagaggatctggttgtgggggtagcggatcaggagtacagcagaatcttttgagaagtgttgaggagagaaaggaagagtatgataaagctcgcgctcggatctttaatagtcctagcagttccgactctgaagattcttcatcactacgacctccctctcttgaagtgaaaaacacatgtataaaccggaatgagactgaagtggcggttaataatagtcctgtcgatgctgttactcgagactctggacggacttctcgagtagccattatcagagatagagagaaagaacgatatgacccggattatgacaggagctatgacaggtatgtcgtggatccagcctacaggtacgttagggttatgccgtctggccaaagcttcagtccaatgccaatccatattccgtttcacgatgggtttttcccgcatatgccaagaggtcatcaagccaacctaaactatgggcatccgcttaaccctgctttgagtccctttactcataacgtggcttcatatacaccgtggccaaactcacccgttatgaactatgcacagccgttgaacggctcagacacaaatctttacaggtatccttctgcaagtaatccctgacagcaagagtagtgtttgagtacttcaatgtctgtaatgaaaagcagattctatagatattagcctttaggagctccctgttctgttccgaacaatggctacttctttcttatataacaaacaagacatctactttttt

SEQ ID NO: 25696 - protein, 333 aa, Arabidopsis thaliana
  peptide (1)..(333): Ceres Seq. ID no. 12333212
  misc_feature (11)..(313): Homolog of NCBI NO: 29367411 NR Description: unknown [Oryza sativa (japonica cultivar-group)]
  misc_feature (1)..(240): Homolog of NCBI NO: 7487238 NR Description: hypothetical protein At2g40960 [imported] -
  misc_feature (1)..(313): Homolog of NCBI NO: 18405560 NR Description: expressed protein
  misc_feature (1)..(313): Homolog of NCBI NO: 21592404 NR Description: unknown [Arabidopsis thaliana]
  misc_feature (11)..(316): Homolog of NCBI NO: 15228989 NR Description: putative protein
  misc_feature (1)..(329): Homolog of NCBI NO: 10178049 NR Description: gb|AAF19572.1~gene_id:MUG13.4~strong similarity
  misc_feature (1)..(329): Homolog of NCBI NO: 18414788 NR Description: putative protein
  misc_feature (1)..(333): Homolog of NCBI NO: 30681485 NR Description: expressed protein [Arabidopsis thaliana]
  misc_feature (1)..(333): Homolog of NCBI NO: 18398995 NR Description: expressed protein
  misc_feature (1)..(333): Homolog of NCBI NO: 21592735 NR Description: unknown [Arabidopsis thaliana]
MASMTEKEAMVDPFLVEALQNPRHRLTILRMELDIQKFFQNPEQLQFEFPPFPTSYLRLAAHRVAQHYGLVTMALDNGTGTGDGSDNRILVTKTAESRFPYVCLSEIPVKQPENGRPEGFKIAIKPRPKRGSGCGGSGSGVQQNLLRSVEERKEEYDKARARIFNSPSSSDSEDSSSLRPPSLEVKNTCINRNETEVAVNNSPVDAVTRDSGRTSRVAIIRDREKERYDPDYDRSYDRYVVDPAYRYVRVMPSGQSFSPMPIHIPFHDGFFPHMPRGHQANLNYGHPLNPALSPFTHNVASYTPWPNSPVMNYAQPLNGSDTNLYRYPSASNP

SEQ ID NO: 25697 - protein, 330 aa, Arabidopsis thaliana
  peptide (1)..(330): Ceres Seq. ID no. 12333213
  misc_feature (8)..(310): Homolog of NCBI NO: 29367411 NR Description: unknown [Oryza sativa (japonica cultivar-group)]
  misc_feature (1)..(237): Homolog of NCBI NO: 7487238 NR Description: hypothetical protein At2g40960 [imported] -
  misc_feature (1)..(310): Homolog of NCBI NO: 18405560 NR Description: expressed protein
  misc_feature (1)..(310): Homolog of NCBI NO: 21592404 NR Description: unknown [Arabidopsis thaliana]
  misc_feature (8)..(313): Homolog of NCBI NO: 15228989 NR Description: putative protein
  misc_feature (1)..(326): Homolog of NCBI NO: 10178049 NR Description: gb|AAF19572.1~gene_id:MUG13.4~strong similarity
  misc_feature (1)..(326): Homolog of NCBI NO: 18414788 NR Description: putative protein
  misc_feature (1)..(330): Homolog of NCBI NO: 30681485 NR Description: expressed protein [Arabidopsis thaliana]
  misc_feature (1)..(330): Homolog of NCBI NO: 18398995 NR Description: expressed protein
  misc_feature (1)..(330): Homolog of NCBI NO: 21592735 NR Description: unknown [Arabidopsis thaliana]
MTEKEAMVDPFLVEALQNPRHRLTILRMELDIQKFFQNPEQLQFEFPPFPTSYLRLAAHRVAQHYGLVTMALDNGTGTGDGSDNRILVTKTAESRFPYVCLSEIPVKQPENGRPEGFKIAIKPRPKRGSGCGGSGSGVQQNLLRSVEERKEEYDKARARIFNSPSSSDSEDSSSLRPPSLEVKNTCINRNETEVAVNNSPVDAVTRDSGRTSRVAIIRDREKERYDPDYDRSYDRYVVDPAYRYVRVMPSGQSFSPMPIHIPFHDGFFPHMPRGHQANLNYGHPLNPALSPFTHNVASYTPWPNSPVMNYAQPLNGSDTNLYRYPSASNP

SEQ ID NO: 25698 - protein, 324 aa, Arabidopsis thaliana
  peptide (1)..(324): Ceres Seq. ID no. 12333214
  misc_feature (2)..(304): Homolog of NCBI NO: 29367411 NR Description: unknown [Oryza sativa (japonica cultivar-group)]
  misc_feature (1)..(231): Homolog of NCBI NO: 7487238 NR Description: hypothetical protein At2g40960 [imported] -
  misc_feature (1)..(304): Homolog of NCBI NO: 18405560 NR Description: expressed protein
  misc_feature (1)..(304): Homolog of NCBI NO: 21592404 NR Description: unknown [Arabidopsis thaliana]
  misc_feature (2)..(307): Homolog of NCBI NO: 15228989 NR Description: putative protein
  misc_feature (1)..(320): Homolog of NCBI NO: 10178049 NR Description: gb|AAF19572.1~gene_id:MUG13.4~strong similarity
  misc_feature (1)..(320): Homolog of NCBI NO: 18414788 NR Description: putative protein
  misc_feature (1)..(324): Homolog of NCBI NO: 30681485 NR Description: expressed protein [Arabidopsis thaliana]
  misc_feature (1)..(324): Homolog of NCBI NO: 18398995 NR Description: expressed protein
  misc_feature (1)..(324): Homolog of NCBI NO: 21592735 NR Description: unknown [Arabidopsis thaliana]
MVDPFLVEALQNPRHRLTILRMELDIQKFFQNPEQLQFEFPPFPTSYLRLAAHRVAQHYGLVTMALDNGTGTGDGSDNRILVTKTAESRFPYVCLSEIPVKQPENGRPEGFKIAIKPRPKRGSGCGGSGSGVQQNLLRSVEERKEEYDKARARIFNSPSSSDSEDSSSLRPPSLEVKNTCINRNETEVAVNNSPVDAVTRDSGRTSRVAIIRDREKERYDPDYDRSYDRYVVDPAYRYVRVMPSGQSFSPMPIHIPFHDGFFPHMPRGHQANLNYGHPLNPALSPFTHNVASYTPWPNSPVMNYAQPLNGSDTNLYRYPSASNP

SEQ ID NO: 25699 - DNA, 1481 bp, Arabidopsis thaliana
  misc_feature (1)..(1481): Ceres Seq. ID no. 12333207
  misc_feature: MA Experiment ID: 108435 Result: Down-regulated in Transcription
  misc_feature: MA Experiment 108435 PARAMETER Experiment Name: At_stm_Mutants_cDNA_P Parameter: Plant Line Value: wt Landsburg vs stm
  misc_feature: MA Experiment 108435 PARAMETER Experiment Name: At_stm_Mutants_cDNA_P Parameter: Tissue Value: Shoot Apical Meristem Region
  misc_feature: MA Experiment ID: 108461 Result: Up-regulated in Transcription
  misc_feature: MA Experiment 108461 PARAMETER Experiment Name: At_Germinating_Seeds_cDNA_P Parameter: Age (day) Value: 1 vs. 0
  misc_feature: MA Experiment 108461 PARAMETER Experiment Name: At_Germinating_Seeds_cDNA_P Parameter: Tissue Value: Germinating Seeds
  misc_feature: MA Experiment ID: 108462 Result: Up-regulated in Transcription
  misc_feature: MA Experiment 108462 PARAMETER Experiment Name: At_Germinating_Seeds_cDNA_P Parameter: Age (day) Value: 2 vs. 0
  misc_feature: MA Experiment 108462 PARAMETER Experiment Name: At_Germinating_Seeds_cDNA_P Parameter: Tissue Value: Germinating Seeds
  misc_feature: MA Experiment ID: 108463 Result: Up-regulated in Transcription
  misc_feature: MA Experiment 108463 PARAMETER Experiment Name: At_Germinating_Seeds_cDNA_P Parameter: Age (day) Value: 3 vs. 0
  misc_feature: MA Experiment 108463 PARAMETER Experiment Name: At_Germinating_Seeds_cDNA_P Parameter: Tissue Value: Germinating Seeds
  misc_feature: MA Experiment ID: 108464 Result: Up-regulated in Transcription
  misc_feature: MA Experiment 108464 PARAMETER Experiment Name: At_Germinating_Seeds_cDNA_P Parameter: Age (day) Value: 4 vs. 0
  misc_feature: MA Experiment 108464 PARAMETER Experiment Name: At_Germinating_Seeds_cDNA_P Parameter: Tissue Value: Germinating Seeds
  misc_feature: MA Experiment ID: 108473 Result: Up-regulated in Transcription
  misc_feature: MA Experiment 108473 PARAMETER Experiment Name: At_Drought_Flowers_cDNA_P Parameter: Timepoint (hr) Value: 7 d
  misc_feature: MA Experiment 108473 PARAMETER Experiment Name: At_Drought_Flowers_cDNA_P Parameter: Tissue Value: Flower
  misc_feature: MA Experiment 108473 PARAMETER Experiment Name: At_Drought_Flowers_cDNA_P Parameter: Treatment Value: Drought vs. No Drought
  misc_feature: MA Experiment ID: 108489 Result: Down-regulated in Transcription
  misc_feature: MA Experiment ID: 108577 Result: Down-regulated in Transcription
  misc_feature: MA Experiment 108577 PARAMETER Experiment Name: At_42deg_Heat_cDNA_P Parameter: Temperature (deg C) Value: 42 vs. 22
  misc_feature: MA Experiment 108577 PARAMETER Experiment Name: At_42deg_Heat_cDNA_P Parameter: Timepoint (hr) Value: 6
  misc_feature: MA Experiment 108577 PARAMETER Experiment Name: At_42deg_Heat_cDNA_P Parameter: Tissue Value: Aerial
  misc_feature: MA Experiment ID: 108585 Result: Down-regulated in Transcription
  misc_feature: MA Experiment 108585 PARAMETER Experiment Name: At_5mM_NaNP_cDNA_P Parameter: Timepoint (hr) Value: 6
  misc_feature: MA Experiment 108585 PARAMETER Experiment Name: At_5mM_NaNP_cDNA_P Parameter: Tissue Value: Aerial
  misc_feature: MA Experiment 108585 PARAMETER Experiment Name: At_5mM_NaNP_cDNA_P Parameter: Treatment Value: null
  misc_feature: MA Experiment ID: 108594 Result: Down-regulated in Transcription
  misc_feature: MA Experiment 108594 PARAMETER Experiment Name: At_Ler-rhl_Root_cDNA_P Parameter: Plant Line Value: null
  misc_feature: MA Experiment ID: 108595 Result: Down-regulated in Transcription
  misc_feature: MA Experiment 108595 PARAMETER Experiment Name: At_Ler-pi_Ovule_cDNA_P Parameter: Plant Line Value: null
  misc_feature: MA Experiment ID: 20000070 Result: Down-regulated in Transcription
  misc_feature: MA Experiment 20000070 PARAMETER Experiment Name: At_100uM_ABA_Mutants_cDNA_P Parameter: Plant Line Value: CS24
  misc_feature: MA Experiment 20000070 PARAMETER Experiment Name: At_100uM_ABA_Mutants_cDNA_P Parameter: Timepoint (hr) Value: 6
  misc_feature: MA Experiment 20000070 PARAMETER Experiment Name: At_100uM_ABA_Mutants_cDNA_P Parameter: Tissue Value: Aerial
  misc_feature: MA Experiment 20000070 PARAMETER Experiment Name: At_100uM_ABA_Mutants_cDNA_P Parameter: Treatment Value: 100uM ABA vs. No Treatment
  misc_feature: MA Experiment ID: 20000071 Result: Down-regulated in Transcription
  misc_feature: MA Experiment 20000071 PARAMETER Experiment Name: At_100uM_ABA_Mutants_cDNA_P Parameter: Plant Line Value: CS8104
  misc_feature: MA Experiment 20000071 PARAMETER Experiment Name: At_100uM_ABA_Mutants_cDNA_P Parameter: Timepoint (hr) Value: 6
  misc_feature: MA Experiment 20000071 PARAMETER Experiment Name: At_100uM_ABA_Mutants_cDNA_P Parameter: Tissue Value: Aerial
  misc_feature: MA Experiment 20000071 PARAMETER Experiment Name: At_100uM_ABA_Mutants_cDNA_P Parameter: Treatment Value: 100uM ABA vs. No Treatment
  misc_feature: MA Experiment ID: 20000111 Result: Down-regulated in Transcription
  misc_feature: MA Experiment 20000111 PARAMETER Experiment Name: At_42deg_Heat_cDNA_P Parameter: Temperature (deg C) Value: 42 vs. 22
  misc_feature: MA Experiment 20000111 PARAMETER Experiment Name: At_42deg_Heat_cDNA_P Parameter: Timepoint (hr) Value: 6
  misc_feature: MA Experiment 20000111 PARAMETER Experiment Name: At_42deg_Heat_cDNA_P Parameter: Tissue Value: Aerial
  misc_feature: MA Experiment ID: 20000112 Result: Down-regulated in Transcription
  misc_feature: MA Experiment 20000112 PARAMETER Experiment Name: At_42deg_Heat_cDNA_P Parameter: Temperature (deg C) Value: 42 vs. 22
  misc_feature: MA Experiment 20000112 PARAMETER Experiment Name: At_42deg_Heat_cDNA_P Parameter: Timepoint (hr) Value: 2
  misc_feature: MA Experiment 20000112 PARAMETER Experiment Name: At_42deg_Heat_cDNA_P Parameter: Tissue Value: Aerial
  misc_feature: MA Experiment ID: 20000113 Result: Down-regulated in Transcription
  misc_feature: MA Experiment 20000113 PARAMETER Experiment Name: At_42deg_Heat_cDNA_P Parameter: Temperature (deg C) Value: 42 vs. 22
  misc_feature: MA Experiment 20000113 PARAMETER Experiment Name: At_42deg_Heat_cDNA_P Parameter: Timepoint (hr) Value: 8
  misc_feature: MA Experiment 20000113 PARAMETER Experiment Name: At_42deg_Heat_cDNA_P Parameter: Tissue Value: Aerial
  misc_feature: MA Experiment ID: 20000117 Result: Down-regulated in Transcription
  misc_feature: MA Experiment 20000117 PARAMETER Experiment Name: At_100uM_ABA_Mutants_cDNA_P Parameter: Plant Line Value: Columbia
  misc_feature: MA Experiment 20000117 PARAMETER Experiment Name: At_100uM_ABA_Mutants_cDNA_P Parameter: Timepoint (hr) Value: 6
  misc_feature: MA Experiment 20000117 PARAMETER Experiment Name: At_100uM_ABA_Mutants_cDNA_P Parameter: Tissue Value: Aerial
  misc_feature: MA Experiment 20000117 PARAMETER Experiment Name: At_100uM_ABA_Mutants_cDNA_P Parameter: Treatment Value: 100uM ABA vs. No Treatment
  misc_feature: MA Experiment ID: 20000173 Result: Down-regulated in Transcription
  misc_feature: MA Experiment 20000173 PARAMETER Experiment Name: At_42deg_Heat_P Parameter: Age (day) Value: 14
  misc_feature: MA Experiment 20000173 PARAMETER Experiment Name: At_42deg_Heat_P Parameter: Organism Value: A. thaliana
  misc_feature: MA Experiment 20000173 PARAMETER Experiment Name: At_42deg_Heat_P Parameter: Plant Line Value: WS
  misc_feature: MA Experiment 20000173 PARAMETER Experiment Name: At_42deg_Heat_P Parameter: Temperature (deg C) Value: 42 vs. 22
  misc_feature: MA Experiment 20000173 PARAMETER Experiment Name: At_42deg_Heat_P Parameter: Timepoint (hr) Value: 6
  misc_feature: MA Experiment 20000173 PARAMETER Experiment Name: At_42deg_Heat_P Parameter: Tissue Value: Aerial
  misc_feature: MA Experiment ID: 20000179 Result: Up-regulated in Transcription
  misc_feature: MA Experiment 20000179 PARAMETER Experiment Name: At_Germinating_Seeds_P Parameter: Age (hr) Value: 6 vs. 0
  misc_feature: MA Experiment 20000179 PARAMETER Experiment Name: At_Germinating_Seeds_P Parameter: Tissue Value: Germinating Seeds
  misc_feature: MA Experiment ID: 20000180 Result: Up-regulated in Transcription
  misc_feature: MA Experiment 20000180 PARAMETER Experiment Name: At_Germinating_Seeds_P Parameter: Age (hr) Value: 24 vs. 0
  misc_feature: MA Experiment 20000180 PARAMETER Experiment Name: At_Germinating_Seeds_P Parameter: Tissue Value: Germinating Seeds
  misc_feature: MA Experiment ID: 20000182 Result: Down-regulated in Transcription
  misc_feature: MA Experiment 20000182 PARAMETER Experiment Name: At_2mM_SA_P Parameter: Age (day) Value: 14
  misc_feature: MA Experiment 20000182 PARAMETER Experiment Name: At_2mM_SA_P Parameter: Organism Value: A. thaliana
  misc_feature: MA Experiment 20000182 PARAMETER Experiment Name: At_2mM_SA_P Parameter: Plant Line Value: WS
  misc_feature: MA Experiment 20000182 PARAMETER Experiment Name: At_2mM_SA_P Parameter: Timepoint (hr) Value: 6
  misc_feature: MA Experiment 20000182 PARAMETER Experiment Name: At_2mM_SA_P Parameter: Tissue Value: Aerial
  misc_feature: MA Experiment 20000182 PARAMETER Experiment Name: At_2mM_SA_P Parameter: Treatment Value: 2mM SA vs. No Treatment
  misc_feature: MA Experiment ID: 20000224 Result: Down-regulated in Transcription
  misc_feature: MA Experiment ID: 20000227 Result: Down-regulated in Transcription
  misc_feature: MA Experiment 20000227 PARAMETER Experiment Name: At_Root-Tips-vs-Tops_P Parameter: Tissue Value: Root Tips vs. Root Tops
  misc_feature: MA Experiment ID: 20000265 Result: Up-regulated in Transcription
  misc_feature: MA Experiment 20000265 PARAMETER Experiment Name: At_Open_Flower_P Parameter: Age (day) Value: 21
  misc_feature: MA Experiment 20000265 PARAMETER Experiment Name: At_Open_Flower_P Parameter: Plant Line Value: WS
  misc_feature: MA Experiment 20000265 PARAMETER Experiment Name: At_Open_Flower_P Parameter: Tissue Value: Closed Flower vs. Whole Plant
  misc_feature: MA Experiment ID: 20000438 Result: Up-regulated in Transcription
  misc_feature: MA Experiment 20000438 PARAMETER Experiment Name: At_Shoots__P Parameter: Age (day) Value: 14
  misc_feature: MA Experiment 20000438 PARAMETER Experiment Name: At_Shoots__P Parameter: Tissue Value: Shoots vs. Whole Plant
  misc_feature: MA Experiment ID: 20000794 Result: Down-regulated in Transcription
  misc_feature: MA Experiment 20000794 PARAMETER Experiment Name: At_Petals_P Parameter: Age (day) Value: 23-25 days
  misc_feature: MA Experiment 20000794 PARAMETER Experiment Name: At_Petals_P Parameter: Plant Line Value: WS
  misc_feature: MA Experiment 20000794 PARAMETER Experiment Name: At_Petals_P Parameter: Tissue Value: Petals vs. Whole plant
  misc_feature: MA Experiment ID: 20001905 Result: Down-regulated in Transcription
  misc_feature: MA Experiment 20001905 PARAMETER Experiment Name: At_Drought_Reproduction_P Parameter: Age (day) Value: 40
  misc_feature: MA Experiment 20001905 PARAMETER Experiment Name: At_Drought_Reproduction_P Parameter: Organism Value: A. thaliana
  misc_feature: MA Experiment 20001905 PARAMETER Experiment Name: At_Drought_Reproduction_P Parameter: Plant Line Value: WS
  misc_feature: MA Experiment 20001905 PARAMETER Experiment Name: At_Drought_Reproduction_P Parameter: Timepoint (day) Value: 10
  misc_feature: MA Experiment 20001905 PARAMETER Experiment Name: At_Drought_Reproduction_P Parameter: Tissue Value: Rosettes
  misc_feature: MA Experiment 20001905 PARAMETER Experiment Name: At_Drought_Reproduction_P Parameter: Treatment Value: Drought vs. No Drought
aaaaagataagatacgaagaacaagagccccctctctctctctcgtccactcacctattgtgtatctcatcatcaccatggacaagacatttttctctagcaacgaagggaaaccaattacatgcaaagcagcaatatgtagaaaagcaggagaagcattggtgattgaagacatccacgtggatccaccccaagcttatgaagttaggattaagattttatgtacttctctatgtcacactgatcttactttctggaaactaagctttggaccaatttcaaggtttcctaggattcttggacacgaagcagtcggtgtggtcgagagcattggtgaaaacgtggacggatttaaacaaggtgacgtcgttttgccagtttttcatccttattgtgaagaatgcaaagactgcaaatcttcaaaaaccaactggtgtgacagatatgccgaagatttcatatcaaacacaagacgatatggaatggcttcaagattcaaagattcttcaggagaagtgattcatcattttctctttgtctcaagtttttccgaatacaccgtcgtggatattgcacatcttgtcaaaatatctcctgaaatccccgttgataaagcggctttgctcagctgcggtgtctccacaggaattggagcagcttggaaggtggctaacgtggaagaaggctccaccattgcaatttttggccttggtgctgttggacttgcggttgcagaaggagccaggctacgaggagccgcaaagattattggtattgataccaattctgataaattcgagctaggtaagaaatttggttttacggatttcatcaatccgaccttatgcggagaaaagaagattagtgaggtcattaaagaaatgacagaaggaggagttgactatagtttcgaatgcgttggcttagcttctttacttaacgaggctttcatcagtacccgcacgggaacaggtaaaactgtaatgttggggatggagaagcatgcagcgccaattagtttgggtagttttgatcttttaagaggcagagttatttgcggaagcttgttcggtggtctgaaatccaaacttgatattcccattctagtggatcattacctaaaaaaggagctcaatctggatagtttcattacacacgaactgaatttcaaagaaattaataaggctttcgctttattagaggaaggaaagtctctccgctgcattctatggatggataagtaactatccagcttcatatttgcactttataatcttctcgtggatcttgtttagattatcttcctttgtctttcaagatgctttgtcttgttaccttgcaatttttgttctttccacacgagctacaaacttatcatttggtagtccaaaccccttaacattgtgttttctgatggttacaaatattatgacaccttgtatttgttgatcaatgatcattatagtactaattgcttctac

SEQ ID NO: 25700 - protein, 413 aa, Arabidopsis thaliana
  peptide (1)..(413): Ceres Seq. ID no. 12333208
  misc_feature (32)..(413): Homolog of NCBI NO: 1076580 NR Description: probable alcohol dehydrogenase (EC 1.1.1.1) ADH3b
  misc_feature (32)..(413): Homolog of NCBI NO: 7705215 NR Description: alcohol dehydrogenase ADH [Lycopersicon
  misc_feature (37)..(411): Homolog of NCBI NO: 15238330 NR Description: alcohol dehydrogenase
  misc_feature (28)..(413): Homolog of NCBI NO: 1076579 NR Description: probable alcohol dehydrogenase (EC 1.1.1.1) ADH3a
  misc_feature (28)..(413): Homolog of NCBI NO: 7705214 NR Description: alcohol dehydrogenase ADH [Lycopersicon
  misc_feature (26)..(413): Homolog of NCBI NO: 15219884 NR Description: alcohol dehydrogenase ADH, putative; protein id:
  misc_feature (26)..(413): Homolog of NCBI NO: 11250327 NR Description: probable alcohol dehydrogenase (EC 1.1.1.1)
  misc_feature (31)..(413): Homolog of NCBI NO: 21618210 NR Description: alcohol dehydrogenase like protein [Arabidopsis
  misc_feature (26)..(413): Homolog of NCBI NO: 18415840 NR Description: alcohol dehydrogenase like protein
  misc_feature (26)..(413): Homolog of NCBI NO: 15219882 NR Description: alcohol dehydrogenase ADH, putative
KDKIRRTRAPSLSLVHSPIVYLIITMDKTFFSSNEGKPITCKAAICRKAGEALVIEDIHVDPPQAYEVRIKILCTSLCHTDLTFWKLSFGPISRFPRILGHEAVGVVESIGENVDGFKQGDVVLPVFHPYCEECKDCKSSKTNWCDRYAEDFISNTRRYGMASRFKDSSGEVIHHFLFVSSFSEYTVVDIAHLVKISPEIPVDKAALLSCGVSTGIGAAWKVANVEEGSTIAIFGLGAVGLAVAEGARLRGAAKIIGIDTNSDKFELGKKFGFTDFINPTLCGEKKISEVIKEMTEGGVDYSFECVGLASLLNEAFISTRTGTGKTVMLGMEKHAAPISLGSFDLLRGRVICGSLFGGLKSKLDIPILVDHYLKKELNLDSFITHELNFKEINKAFALLEEGKSLRCILWMDK

SEQ ID NO: 25701 - protein, 388 aa, Arabidopsis thaliana
  peptide (1)..(388): Ceres Seq. ID no. 12333209
  misc_feature (7)..(388): Homolog of NCBI NO: 1076580 NR Description: probable alcohol dehydrogenase (EC 1.1.1.1) ADH3b
  misc_feature (7)..(388): Homolog of NCBI NO: 7705215 NR Description: alcohol dehydrogenase ADH [Lycopersicon
  misc_feature (12)..(386): Homolog of NCBI NO: 15238330 NR Description: alcohol dehydrogenase
  misc_feature (3)..(388): Homolog of NCBI NO: 1076579 NR Description: probable alcohol dehydrogenase (EC 1.1.1.1) ADH3a
  misc_feature (3)..(388): Homolog of NCBI NO: 7705214 NR Description: alcohol dehydrogenase ADH [Lycopersicon
  misc_feature (1)..(388): Homolog of NCBI NO: 15219884 NR Description: alcohol dehydrogenase ADH, putative; protein id:
  misc_feature (1)..(388): Homolog of NCBI NO: 11250327 NR Description: probable alcohol dehydrogenase (EC 1.1.1.1)
  misc_feature (6)..(388): Homolog of NCBI NO: 21618210 NR Description: alcohol dehydrogenase like protein [Arabidopsis
  misc_feature (1)..(388): Homolog of NCBI NO: 18415840 NR Description: alcohol dehydrogenase like protein
  misc_feature (1)..(388): Homolog of NCBI NO: 15219882 NR Description: alcohol dehydrogenase ADH, putative
MDKTFFSSNEGKPITCKAAICRKAGEALVIEDIHVDPPQAYEVRIKILCTSLCHTDLTFWKLSFGPISRFPRILGHEAVGVVESIGENVDGFKQGDVVLPVFHPYCEECKDCKSSKTNWCDRYAEDFISNTRRYGMASRFKDSSGEVIHHFLFVSSFSEYTVVDIAHLVKISPEIPVDKAALLSCGVSTGIGAAWKVANVEEGSTIAIFGLGAVGLAVAEGARLRGAAKIIGIDTNSDKFELGKKFGFTDFINPTLCGEKKISEVIKEMTEGGVDYSFECVGLASLLNEAFISTRTGTGKTVMLGMEKHAAPISLGSFDLLRGRVICGSLFGGLKSKLDIPILVDHYLKKELNLDSFITHELNFKEINKAFALLEEGKSLRCILWMDK

SEQ ID NO: 25702 - protein, 253 aa, Arabidopsis thaliana
  peptide (1)..(253): Ceres Seq. ID no. 12333210
  misc_feature (1)..(253): Homolog of NCBI NO: 1076580 NR Description: probable alcohol dehydrogenase (EC 1.1.1.1) ADH3b
  misc_feature (1)..(253): Homolog of NCBI NO: 7705215 NR Description: alcohol dehydrogenase ADH [Lycopersicon
  misc_feature (1)..(251): Homolog of NCBI NO: 15238330 NR Description: alcohol dehydrogenase
  misc_feature (1)..(253): Homolog of NCBI NO: 1076579 NR Description: probable alcohol dehydrogenase (EC 1.1.1.1) ADH3a
  misc_feature (1)..(253): Homolog of NCBI NO: 7705214 NR Description: alcohol dehydrogenase ADH [Lycopersicon
  misc_feature (1)..(253): Homolog of NCBI NO: 15219884 NR Description: alcohol dehydrogenase ADH, putative; protein id:
  misc_feature (1)..(253): Homolog of NCBI NO: 11250327 NR Description: probable alcohol dehydrogenase (EC 1.1.1.1)
  misc_feature (1)..(253): Homolog of NCBI NO: 21618210 NR Description: alcohol dehydrogenase like protein [Arabidopsis
  misc_feature (1)..(253): Homolog of NCBI NO: 18415840 NR Description: alcohol dehydrogenase like protein
  misc_feature (1)..(253): Homolog of NCBI NO: 15219882 NR Description: alcohol dehydrogenase ADH, putative
MASRFKDSSGEVIHHFLFVSSFSEYTVVDIAHLVKISPEIPVDKAALLSCGVSTGIGAAWKVANVEEGSTIAIFGLGAVGLAVAEGARLRGAAKIIGIDTNSDKFELGKKFGFTDFINPTLCGEKKISEVIKEMTEGGVDYSFECVGLASLLNEAFISTRTGTGKTVMLGMEKHAAPISLGSFDLLRGRVICGSLFGGLKSKLDIPILVDHYLKKELNLDSFITHELNFKEINKAFALLEEGKSLRCILWMDK

SEQ ID NO: 25703 - DNA, 1409 bp, Arabidopsis thaliana
  misc_feature (1)..(1409): Ceres Seq. ID no. 13490151
  misc_feature: MA Experiment ID: 108435 Result: Down-regulated in Transcription
  misc_feature: MA Experiment 108435 PARAMETER Experiment Name: At_stm_Mutants_cDNA_P Parameter: Plant Line Value: wt Landsburg vs stm
  misc_feature: MA Experiment 108435 PARAMETER Experiment Name: At_stm_Mutants_cDNA_P Parameter: Tissue Value: Shoot Apical Meristem Region
  misc_feature: MA Experiment ID: 108462 Result: Up-regulated in Transcription
  misc_feature: MA Experiment 108462 PARAMETER Experiment Name: At_Germinating_Seeds_cDNA_P Parameter: Age (day) Value: 2 vs. 0
  misc_feature: MA Experiment 108462 PARAMETER Experiment Name: At_Germinating_Seeds_cDNA_P Parameter: Tissue Value: Germinating Seeds
  misc_feature: MA Experiment ID: 108463 Result: Up-regulated in Transcription
  misc_feature: MA Experiment 108463 PARAMETER Experiment Name: At_Germinating_Seeds_cDNA_P Parameter: Age (day) Value: 3 vs. 0
  misc_feature: MA Experiment 108463 PARAMETER Experiment Name: At_Germinating_Seeds_cDNA_P Parameter: Tissue Value: Germinating Seeds
  misc_feature: MA Experiment ID: 108464 Result: Up-regulated in Transcription
  misc_feature: MA Experiment 108464 PARAMETER Experiment Name: At_Germinating_Seeds_cDNA_P Parameter: Age (day) Value: 4 vs. 0
  misc_feature: MA Experiment 108464 PARAMETER Experiment Name: At_Germinating_Seeds_cDNA_P Parameter: Tissue Value: Germinating Seeds
  misc_feature: MA Experiment ID: 108561 Result: Down-regulated in Transcription
  misc_feature: MA Experiment 108561 PARAMETER Experiment Name: At_100uM_ABA_cDNA_P Parameter: Timepoint (hr) Value: 6
  misc_feature: MA Experiment 108561 PARAMETER Experiment Name: At_100uM_ABA_cDNA_P Parameter: Tissue Value: Aerial
  misc_feature: MA Experiment 108561 PARAMETER Experiment Name: At_100uM_ABA_cDNA_P Parameter: Treatment Value: 100uM ABA vs. No Treatment
  misc_feature: MA Experiment ID: 108576 Result: Down-regulated in Transcription
  misc_feature: MA Experiment 108576 PARAMETER Experiment Name: At_42deg_Heat_cDNA_P Parameter: Temperature (deg C) Value: 42 vs. 22
  misc_feature: MA Experiment 108576 PARAMETER Experiment Name: At_42deg_Heat_cDNA_P Parameter: Timepoint (hr) Value: 1
  misc_feature: MA Experiment 108576 PARAMETER Experiment Name: At_42deg_Heat_cDNA_P Parameter: Tissue Value: Aerial
  misc_feature: MA Experiment ID: 108577 Result: Down-regulated in Transcription
  misc_feature: MA Experiment 108577 PARAMETER Experiment Name: At_42deg_Heat_cDNA_P Parameter: Temperature (deg C) Value: 42 vs. 22
  misc_feature: MA Experiment 108577 PARAMETER Experiment Name: At_42deg_Heat_cDNA_P Parameter: Timepoint (hr) Value: 6
  misc_feature: MA Experiment 108577 PARAMETER Experiment Name: At_42deg_Heat_cDNA_P Parameter: Tissue Value: Aerial
  misc_feature: MA Experiment ID: 108595 Result: Down-regulated in Transcription
  misc_feature: MA Experiment 108595 PARAMETER Experiment Name: At_Ler-pi_Ovule_cDNA_P Parameter: Plant Line Value: null
  misc_feature: MA Experiment ID: 108668 Result: Down-regulated in Transcription
  misc_feature: MA Experiment 108668 PARAMETER Experiment Name: At_2mM_SA_cDNA_P Parameter: Plant Line Value: WS
  misc_feature: MA Experiment 108668 PARAMETER Experiment Name: At_2mM_SA_cDNA_P Parameter: Timepoint (hr) Value: 6
  misc_feature: MA Experiment 108668 PARAMETER Experiment Name: At_2mM_SA_cDNA_P Parameter: Treatment Value: 2mM SA vs. No Treatment
  misc_feature: MA Experiment ID: 20000069 Result: Down-regulated in Transcription
  misc_feature: MA Experiment 20000069 PARAMETER Experiment Name: At_100uM_ABA_Mutants_cDNA_P Parameter: Plant Line Value: CS23
  misc_feature: MA Experiment 20000069 PARAMETER Experiment Name: At_100uM_ABA_Mutants_cDNA_P Parameter: Timepoint (hr) Value: 6
  misc_feature: MA Experiment 20000069 PARAMETER Experiment Name: At_100uM_ABA_Mutants_cDNA_P Parameter: Tissue Value: Aerial
  misc_feature: MA Experiment 20000069 PARAMETER Experiment Name: At_100uM_ABA_Mutants_cDNA_P Parameter: Treatment Value: 100uM ABA vs. No Treatment
  misc_feature: MA Experiment ID: 20000070 Result: Down-regulated in Transcription
  misc_feature: MA Experiment 20000070 PARAMETER Experiment Name: At_100uM_ABA_Mutants_cDNA_P Parameter: Plant Line Value: CS24
  misc_feature: MA Experiment 20000070 PARAMETER Experiment Name: At_100uM_ABA_Mutants_cDNA_P Parameter: Timepoint (hr) Value: 6
  misc_feature: MA Experiment 20000070 PARAMETER Experiment Name: At_100uM_ABA_Mutants_cDNA_P Parameter: Tissue Value: Aerial
  misc_feature: MA Experiment 20000070 PARAMETER Experiment Name: At_100uM_ABA_Mutants_cDNA_P Parameter: Treatment Value: 100uM ABA vs. No Treatment
  misc_feature: MA Experiment ID: 20000071 Result: Down-regulated in Transcription
  misc_feature: MA Experiment 20000071 PARAMETER Experiment Name: At_100uM_ABA_Mutants_cDNA_P Parameter: Plant Line Value: CS8104
  misc_feature: MA Experiment 20000071 PARAMETER Experiment Name: At_100uM_ABA_Mutants_cDNA_P Parameter: Timepoint (hr) Value: 6
  misc_feature: MA Experiment 20000071 PARAMETER Experiment Name: At_100uM_ABA_Mutants_cDNA_P Parameter: Tissue Value: Aerial
  misc_feature: MA Experiment 20000071 PARAMETER Experiment Name: At_100uM_ABA_Mutants_cDNA_P Parameter: Treatment Value: 100uM ABA vs. No Treatment
  misc_feature: MA Experiment ID: 20000072 Result: Down-regulated in Transcription
  misc_feature: MA Experiment 20000072 PARAMETER Experiment Name: At_100uM_ABA_Mutants_cDNA_P Parameter: Plant Line Value: CS8105
  misc_feature: MA Experiment 20000072 PARAMETER Experiment Name: At_100uM_ABA_Mutants_cDNA_P Parameter: Timepoint (hr) Value: 6
  misc_feature: MA Experiment 20000072 PARAMETER Experiment Name: At_100uM_ABA_Mutants_cDNA_P Parameter: Tissue Value: Aerial
  misc_feature: MA Experiment 20000072 PARAMETER Experiment Name: At_100uM_ABA_Mutants_cDNA_P Parameter: Treatment Value: 100uM ABA vs. No Treatment
  misc_feature: MA Experiment ID: 20000087 Result: Down-regulated in Transcription
  misc_feature: MA Experiment 20000087 PARAMETER Experiment Name: At_100uM_ABA_Mutants_cDNA_P Parameter: Plant Line Value: WS
  misc_feature: MA Experiment 20000087 PARAMETER Experiment Name: At_100uM_ABA_Mutants_cDNA_P Parameter: Timepoint (hr) Value: 6
  misc_feature: MA Experiment 20000087 PARAMETER Experiment Name: At_100uM_ABA_Mutants_cDNA_P Parameter: Tissue Value: Aerial
  misc_feature: MA Experiment 20000087 PARAMETER Experiment Name: At_100uM_ABA_Mutants_cDNA_P Parameter: Treatment Value: 100uM ABA vs. No Treatment
  misc_feature: MA Experiment ID: 20000088 Result: Down-regulated in Transcription
  misc_feature: MA Experiment 20000088 PARAMETER Experiment Name: At_100uM_ABA_Mutants_cDNA_P Parameter: Plant Line Value: Landsberg
  misc_feature: MA Experiment 20000088 PARAMETER Experiment Name: At_100uM_ABA_Mutants_cDNA_P Parameter: Timepoint (hr) Value: 6
  misc_feature: MA Experiment 20000088 PARAMETER Experiment Name: At_100uM_ABA_Mutants_cDNA_P Parameter: Tissue Value: Aerial
  misc_feature: MA Experiment 20000088 PARAMETER Experiment Name: At_100uM_ABA_Mutants_cDNA_P Parameter: Treatment Value: 100uM ABA vs. No Treatment
  misc_feature: MA Experiment ID: 20000093 Result: Down-regulated in Transcription
  misc_feature: MA Experiment 20000093 PARAMETER Experiment Name: At_42deg_Heat_cDNA_P Parameter: Temperature (deg C) Value: 42 vs. 22
  misc_feature: MA Experiment 20000093 PARAMETER Experiment Name: At_42deg_Heat_cDNA_P Parameter: Timepoint (hr) Value: 0.5
  misc_feature: MA Experiment 20000093 PARAMETER Experiment Name: At_42deg_Heat_cDNA_P Parameter: Tissue Value: Aerial
  misc_feature: MA Experiment ID: 20000111 Result: Down-regulated in Transcription
  misc_feature: MA Experiment 20000111 PARAMETER Experiment Name: At_42deg_Heat_cDNA_P Parameter: Temperature (deg C) Value: 42 vs. 22
  misc_feature: MA Experiment 20000111 PARAMETER Experiment Name: At_42deg_Heat_cDNA_P Parameter: Timepoint (hr) Value: 6
  misc_feature: MA Experiment 20000111 PARAMETER Experiment Name: At_42deg_Heat_cDNA_P Parameter: Tissue Value: Aerial
  misc_feature: MA Experiment ID: 20000112 Result: Down-regulated in Transcription
  misc_feature: MA Experiment 20000112 PARAMETER Experiment Name: At_42deg_Heat_cDNA_P Parameter: Temperature (deg C) Value: 42 vs. 22
  misc_feature: MA Experiment 20000112 PARAMETER Experiment Name: At_42deg_Heat_cDNA_P Parameter: Timepoint (hr) Value: 2
  misc_feature: MA Experiment 20000112 PARAMETER Experiment Name: At_42deg_Heat_cDNA_P Parameter: Tissue Value: Aerial
  misc_feature: MA Experiment ID: 20000113 Result: Down-regulated in Transcription
  misc_feature: MA Experiment 20000113 PARAMETER Experiment Name: At_42deg_Heat_cDNA_P Parameter: Temperature (deg C) Value: 42 vs. 22
  misc_feature: MA Experiment 20000113 PARAMETER Experiment Name: At_42deg_Heat_cDNA_P Parameter: Timepoint (hr) Value: 8
  misc_feature: MA Experiment 20000113 PARAMETER Experiment Name: At_42deg_Heat_cDNA_P Parameter: Tissue Value: Aerial
  misc_feature: MA Experiment ID: 20000117 Result: Down-regulated in Transcription
  misc_feature: MA Experiment 20000117 PARAMETER Experiment Name: At_100uM_ABA_Mutants_cDNA_P Parameter: Plant Line Value: Columbia
  misc_feature: MA Experiment 20000117 PARAMETER Experiment Name: At_100uM_ABA_Mutants_cDNA_P Parameter: Timepoint (hr) Value: 6
  misc_feature: MA Experiment 20000117 PARAMETER Experiment Name: At_100uM_ABA_Mutants_cDNA_P Parameter: Tissue Value: Aerial
  misc_feature: MA Experiment 20000117 PARAMETER Experiment Name: At_100uM_ABA_Mutants_cDNA_P Parameter: Treatment Value: 100uM ABA vs. No Treatment
  misc_feature: MA Experiment ID: 20000144 Result: Down-regulated in Transcription
  misc_feature: MA Experiment 20000144 PARAMETER Experiment Name: At_42deg_Heat_cDNA_P Parameter: Temperature (deg C) Value: 42 vs. 22
  misc_feature: MA Experiment 20000144 PARAMETER Experiment Name: At_42deg_Heat_cDNA_P Parameter: Timepoint (hr) Value: 1
  misc_feature: MA Experiment 20000144 PARAMETER Experiment Name: At_42deg_Heat_cDNA_P Parameter: Tissue Value: Aerial
  misc_feature: MA Experiment ID: 20000314 Result: Down-regulated in Transcription
  misc_feature: MA Experiment 20000314 PARAMETER Experiment Name: At_14day_Shoots-Roots_Sub_P Parameter: Age (day) Value: 14
  misc_feature: MA Experiment 20000314 PARAMETER Experiment Name: At_14day_Shoots-Roots_Sub_P Parameter: Organism Value: A. thaliana
  misc_feature: MA Experiment 20000314 PARAMETER Experiment Name: At_14day_Shoots-Roots_Sub_P Parameter: Plant Line Value: WS
  misc_feature: MA Experiment 20000314 PARAMETER Experiment Name: At_14day_Shoots-Roots_Sub_P Parameter: Tissue Value: Roots vs. Whole Plant
  misc_feature: MA Experiment ID: 20000315 Result: Up-regulated in Transcription
  misc_feature: MA Experiment 20000315 PARAMETER Experiment Name: At_14day_Shoots-Roots_Sub_P Parameter: Age (day) Value: 14
  misc_feature: MA Experiment 20000315 PARAMETER Experiment Name: At_14day_Shoots-Roots_Sub_P Parameter: Organism Value: A. thaliana
  misc_feature: MA Experiment 20000315 PARAMETER Experiment Name: At_14day_Shoots-Roots_Sub_P Parameter: Plant Line Value: WS
  misc_feature: MA Experiment 20000315 PARAMETER Experiment Name: At_14day_Shoots-Roots_Sub_P Parameter: Tissue Value: Shoots vs. Whole Plant
  misc_feature: MA Experiment ID: 20000328 Result: Down-regulated in Transcription
  misc_feature: MA Experiment 20000328 PARAMETER Experiment Name: At_42deg_Heat_Sub_P Parameter: Age (day) Value: 14
  misc_feature: MA Experiment 20000328 PARAMETER Experiment Name: At_42deg_Heat_Sub_P Parameter: Organism Value: A. thaliana
  misc_feature: MA Experiment 20000328 PARAMETER Experiment Name: At_42deg_Heat_Sub_P Parameter: Plant Line Value: WS
  misc_feature: MA Experiment 20000328 PARAMETER Experiment Name: At_42deg_Heat_Sub_P Parameter: Temperature (deg C) Value: 42 vs. 22
  misc_feature: MA Experiment 20000328 PARAMETER Experiment Name: At_42deg_Heat_Sub_P Parameter: Timepoint (hr) Value: 6
  misc_feature: MA Experiment 20000328 PARAMETER Experiment Name: At_42deg_Heat_Sub_P Parameter: Tissue Value: Aerial
  misc_feature: MA Experiment ID: 20000347 Result: Down-regulated in Transcription
  misc_feature: MA Experiment 20000347 PARAMETER Experiment Name: At_2mM_SA_Sub_P Parameter: Age (day) Value: 14
  misc_feature: MA Experiment 20000347 PARAMETER Experiment Name: At_2mM_SA_Sub_P Parameter: Organism Value: A. thaliana
  misc_feature: MA Experiment 20000347 PARAMETER Experiment Name: At_2mM_SA_Sub_P Parameter: Plant Line Value: WS
  misc_feature: MA Experiment 20000347 PARAMETER Experiment Name: At_2mM_SA_Sub_P Parameter: Timepoint (hr) Value: 6
  misc_feature: MA Experiment 20000347 PARAMETER Experiment Name: At_2mM_SA_Sub_P Parameter: Tissue Value: Aerial
  misc_feature: MA Experiment 20000347 PARAMETER Experiment Name: At_2mM_SA_Sub_P Parameter: Treatment Value: 2mM SA vs. No Treatment
  misc_feature: MA Experiment ID: 20000355 Result: Up-regulated in Transcription
  misc_feature: MA Experiment 20000355 PARAMETER Experiment Name: At_Siliques_Sub_P Parameter: Age (day) Value: 21
  misc_feature: MA Experiment 20000355 PARAMETER Experiment Name: At_Siliques_Sub_P Parameter: Organism Value: A. thaliana
  misc_feature: MA Experiment 20000355 PARAMETER Experiment Name: At_Siliques_Sub_P Parameter: Plant Line Value: WS
  misc_feature: MA Experiment 20000355 PARAMETER Experiment Name: At_Siliques_Sub_P Parameter: Tissue Value: Less Than 5mm Siliques vs. Whole Plant
aacatttcatagtattacaaaacaacgccaaaagtcaaaaggtttcgctttctagatcatgtccacatttctcctaacatggattattatgaccgtcgcgttaagcgtaacgctttttcttatgccgcaacaaacaaatgcggctagagcgttcttcgtgtttggcgactcactcgtggacagtggtaataacaattacttagtcaccactgctcgtgccgattctccaccgtatggaatcgattatccgactggtcgaccaaccggtcgtttctccaacggcttgaacctccctgacatcatcagtgaacaaattggatctgagcctacattaccaattcttagccctgaactcactggagagaagctattgatcggagctaactttgcctctgccggcattggaattctcaacgatactggcgttcaatttttgaacatactaaggatcggtaggcaattcgagctgttccaagagtatcaagagagagtgagtgagattataggttcagacaaaacgcaacagcttgtaaatggggctctcgtcctcatgactctcggcggcaatgatttcgtcaacaactacttcttccccatctctactagaagacgccaatcatctctcggtgaatttagccagcttctcatctccgaatacaagaaaatcctgacgagtctttatgagttgggagcaaggagggtgatggtgacgggaacaggacctttgggttgcgtaccagcggagcttgcctcatcgggaagtgtgaatggagaatgtgcacccgaggcgcaacaggctgcagcaatcttcaatcctcttttagttcaaatgcttcaaggacttaaccgtgagattggttctgatgttttcatcggggctaatgcctttaacacgaatgcggatttcatcaacaatccccaaagatttggttttgtgacgtcaaaagtagcatgttgtggacaaggagcatacaacgggcaaggcgtttgcaccccattgtcgactttatgctctgaccgcaatgcctatgctttctgggaccctttccacccgaccgagaaagccacccgactcatcgtccaacaaatcatgactggttcggttgagtacatgaaccccatgaaccttagtactattatggctttagactccagaatataattaaggatgcaatcttttacagaatctatttccagtttttctcgtatgataaaatatcgcgagtctgccaaacaatggtaaggaactaaggattctatttttccaaattatggttttcttagtttctctctaatgctaatggggagtctctgtctcggctctgtcttttctgttatgtttcaattttgtggttagttgccacttctttcttacgaaggctttataaaactttgtcaattttacaccc

SEQ ID NO: 25704 - protein, 367 aa, Arabidopsis thaliana
  peptide (1)..(367): Ceres Seq. ID no. 13490152
  misc_feature (32)..(344): Pfam Name: GDSL-like Lipase/Acylhydrolase Pfam Description: GDSL-like Lipase/Acylhydrolase
  misc_feature (1)..(367): Homolog of NCBI NO: 15235421 NR Description: GDSL-motif lipase/hydrolase protein [Arabidopsis
  misc_feature (31)..(363): Homolog of NCBI NO: 34899288 NR Description: similar to GDSL-motif lipase/hydrolase
  misc_feature (3)..(360): Homolog of NCBI NO: 15227849 NR Description: GDSL-motif lipase/hydrolase protein [Arabidopsis
  misc_feature (28)..(189): Homolog of NCBI NO: 37789825 NR Description: putative GDSL-motif lipase [Vitis vinifera]
  misc_feature (10)..(363): Homolog of NCBI NO: 15238814 NR Description: GDSL-motif lipase/hydrolase protein [Arabidopsis
  misc_feature (11)..(365): Homolog of NCBI NO: 37535146 NR Description: putative early nodulin gene (Enod) related
  misc_feature (11)..(365): Homolog of NCBI NO: 22758315 NR Description: putative early nodulin gene (Enod) related
  misc_feature (10)..(365): Homolog of NCBI NO: 28071322 NR Description: P0705A05.30 [Oryza sativa (japonica
  misc_feature (15)..(365): Homolog of NCBI NO: 15242808 NR Description: GDSL-motif lipase/hydrolase protein [Arabidopsis
  misc_feature (17)..(365): Homolog of NCBI NO: 15229265 NR Description: GDSL-motif lipase/hydrolase protein [Arabidopsis
MSTFLLTWIIMTVALSVTLFLMPQQTNAARAFFVFGDSLVDSGNNNYLVTTARADSPPYGIDYPTGRPTGRFSNGLNLPDIISEQIGSEPTLPILSPELTGEKLLIGANFASAGIGILNDTGVQFLNILRIGRQFELFQEYQERVSEIIGSDKTQQLVNGALVLMTLGGNDFVNNYFFPISTRRRQSSLGEFSQLLISEYKKILTSLYELGARRVMVTGTGPLGCVPAELASSGSVNGECAPEAQQAAAIFNPLLVQMLQGLNREIGSDVFIGANAFNTNADFINNPQRFGFVTSKVACCGQGAYNGQGVCTPLSTLCSDRNAYAFWDPFHPTEKATRLIVQQIMTGSVEYMNPMNLSTIMALDSRI

SEQ ID NO: 25705 - protein, 357 aa, Arabidopsis thaliana
  peptide (1)..(357): Ceres Seq. ID no. 13490153
  misc_feature (22)..(334): Pfam Name: GDSL-like Lipase/Acylhydrolase Pfam Description: GDSL-like Lipase/Acylhydrolase
  misc_feature (21)..(353): Homolog of NCBI NO: 34899288 NR Description: similar to GDSL-motif lipase/hydrolase
  misc_feature (1)..(350): Homolog of NCBI NO: 15227849 NR Description: GDSL-motif lipase/hydrolase protein [Arabidopsis
  misc_feature (18)..(179): Homolog of NCBI NO: 37789825 NR Description: putative GDSL-motif lipase [Vitis vinifera]
  misc_feature (1)..(353): Homolog of NCBI NO: 15238814 NR Description: GDSL-motif lipase/hydrolase protein [Arabidopsis
  misc_feature (1)..(355): Homolog of NCBI NO: 37535146 NR Description: putative early nodulin gene (Enod) related
  misc_feature (1)..(355): Homolog of NCBI NO: 22758315 NR Description: putative early nodulin gene (Enod) related
  misc_feature (1)..(355): Homolog of NCBI NO: 28071322 NR Description: P0705A05.30 [Oryza sativa (japonica
  misc_feature (5)..(355): Homolog of NCBI NO: 15242808 NR Description: GDSL-motif lipase/hydrolase protein [Arabidopsis
  misc_feature (7)..(355): Homolog of NCBI NO: 15229265 NR Description: GDSL-motif lipase/hydrolase protein [Arabidopsis
  misc_feature (1)..(357): Homolog of NCBI NO: 15235421 NR Description: GDSL-motif lipase/hydrolase protein [Arabidopsis
MTVALSVTLFLMPQQTNAARAFFVFGDSLVDSGNNNYLVTTARADSPPYGIDYPTGRPTGRFSNGLNLPDIISEQIGSEPTLPILSPELTGEKLLIGANFASAGIGILNDTGVQFLNILRIGRQFELFQEYQERVSEIIGSDKTQQLVNGALVLMTLGGNDFVNNYFFPISTRRRQSSLGEFSQLLISEYKKILTSLYELGARRVMVTGTGPLGCVPAELASSGSVNGECAPEAQQAAAIFNPLLVQMLQGLNREIGSDVFIGANAFNTNADFINNPQRFGFVTSKVACCGQGAYNGQGVCTPLSTLCSDRNAYAFWDPFHPTEKATRLIVQQIMTGSVEYMNPMNLSTIMALDSRI

SEQ ID NO: 25706 - protein, 346 aa, Arabidopsis thaliana
  peptide (1)..(346): Ceres Seq. ID no. 13490154
  misc_feature (11)..(323): Pfam Name: GDSL-like Lipase/Acylhydrolase Pfam Description: GDSL-like Lipase/Acylhydrolase
  misc_feature (10)..(342): Homolog of NCBI NO: 34899288 NR Description: similar to GDSL-motif lipase/hydrolase
  misc_feature (1)..(339): Homolog of NCBI NO: 15227849 NR Description: GDSL-motif lipase/hydrolase protein [Arabidopsis
  misc_feature (7)..(168): Homolog of NCBI NO: 37789825 NR Description: putative GDSL-motif lipase [Vitis vinifera]
  misc_feature (1)..(342): Homolog of NCBI NO: 15238814 NR Description: GDSL-motif lipase/hydrolase protein [Arabidopsis
  misc_feature (1)..(344): Homolog of NCBI NO: 37535146 NR Description: putative early nodulin gene (Enod) related
  misc_feature (1)..(344): Homolog of NCBI NO: 22758315 NR Description: putative early nodulin gene (Enod) related
  misc_feature (1)..(344): Homolog of NCBI NO: 28071322 NR Description: P0705A05.30 [Oryza sativa (japonica
  misc_feature (1)..(344): Homolog of NCBI NO: 15242808 NR Description: GDSL-motif lipase/hydrolase protein [Arabidopsis
  misc_feature (1)..(344): Homolog of NCBI NO: 15229265 NR Description: GDSL-motif lipase/hydrolase protein [Arabidopsis
  misc_feature (1)..(346): Homolog of NCBI NO: 15235421 NR Description: GDSL-motif lipase/hydrolase protein [Arabidopsis
MPQQTNAARAFFVFGDSLVDSGNNNYLVTTARADSPPYGIDYPTGRPTGRFSNGLNLPDIISEQIGSEPTLPILSPELTGEKLLIGANFASAGIGILNDTGVQFLNILRIGRQFELFQEYQERVSEIIGSDKTQQLVNGALVLMTLGGNDFVNNYFFPISTRRRQSSLGEFSQLLISEYKKILTSLYELGARRVMVTGTGPLGCVPAELASSGSVNGECAPEAQQAAAIFNPLLVQMLQGLNREIGSDVFIGANAFNTNADFINNPQRFGFVTSKVACCGQGAYNGQGVCTPLSTLCSDRNAYAFWDPFHPTEKATRLIVQQIMTGSVEYMNPMNLSTIMALDSRI

SEQ ID NO: 25707 - DNA, 1513 bp, Arabidopsis thaliana
  misc_feature (1)..(1513): Ceres Seq. ID no. 12331556
  misc_feature: MA Experiment ID: 20000213 Result: Up-regulated in Transcription
  misc_feature: MA Experiment 20000213 PARAMETER Experiment Name: At_4deg_Cold_P Parameter: Timepoint (hr) Value: 2
  misc_feature: MA Experiment ID: 20000214 Result: Up-regulated in Transcription
  misc_feature: MA Experiment 20000214 PARAMETER Experiment Name: At_4deg_Cold_P Parameter: Timepoint (hr) Value: 6
  misc_feature: MA Experiment ID: 20000227 Result: Up-regulated in Transcription
  misc_feature: MA Experiment 20000227 PARAMETER Experiment Name: At_Root-Tips-vs-Tops_P Parameter: Tissue Value: Root Tips vs. Root Tops
  misc_feature: MA Experiment ID: 20000437 Result: Down-regulated in Transcription
  misc_feature: MA Experiment 20000437 PARAMETER Experiment Name: At_Drought_P Parameter: Age (day) Value: 8
  misc_feature: MA Experiment 20000437 PARAMETER Experiment Name: At_Drought_P Parameter: Organism Value: A. thaliana
  misc_feature: MA Experiment 20000437 PARAMETER Experiment Name: At_Drought_P Parameter: Plant Line Value: WS
  misc_feature: MA Experiment 20000437 PARAMETER Experiment Name: At_Drought_P Parameter: Timepoint (hr) Value: 24
  misc_feature: MA Experiment 20000437 PARAMETER Experiment Name: At_Drought_P Parameter: Tissue Value: Whole Plant
  misc_feature: MA Experiment 20000437 PARAMETER Experiment Name: At_Drought_P Parameter: Treatment Value: Drought vs. No Drought
  misc_feature: MA Experiment ID: 20000794 Result: Down-regulated in Transcription
  misc_feature: MA Experiment 20000794 PARAMETER Experiment Name: At_Petals_P Parameter: Age (day) Value: 23-25 days
  misc_feature: MA Experiment 20000794 PARAMETER Experiment Name: At_Petals_P Parameter: Plant Line Value: WS
  misc_feature: MA Experiment 20000794 PARAMETER Experiment Name: At_Petals_P Parameter: Tissue Value: Petals vs. Whole plant
  misc_feature: MA Experiment ID: 20001247 Result: Up-regulated in Transcription
  misc_feature: MA Experiment 20001247 PARAMETER Experiment Name: At_Far-red-induction_P Parameter: Age (day) Value: 7
  misc_feature: MA Experiment 20001247 PARAMETER Experiment Name: At_Far-red-induction_P Parameter: Light Value: Far-red vs. White
  misc_feature: MA Experiment 20001247 PARAMETER Experiment Name: At_Far-red-induction_P Parameter: Organism Value: A. thaliana
  misc_feature: MA Experiment 20001247 PARAMETER Experiment Name: At_Far-red-induction_P Parameter: Plant Line Value: Columbia
  misc_feature: MA Experiment 20001247 PARAMETER Experiment Name: At_Far-red-induction_P Parameter: Timepoint (hr) Value: 1
  misc_feature: MA Experiment 20001247 PARAMETER Experiment Name: At_Far-red-induction_P Parameter: Tissue Value: Whole Plant
  misc_feature: MA Experiment ID: 20001451 Result: Down-regulated in Transcription
  misc_feature: MA Experiment 20001451 PARAMETER Experiment Name: At_Far-red-induction_P Parameter: Age (day) Value: 7
  misc_feature: MA Experiment 20001451 PARAMETER Experiment Name: At_Far-red-induction_P Parameter: Light Value: Far-red vs. White
  misc_feature: MA Experiment 20001451 PARAMETER Experiment Name: At_Far-red-induction_P Parameter: Organism Value: A. thaliana
  misc_feature: MA Experiment 20001451 PARAMETER Experiment Name: At_Far-red-induction_P Parameter: Plant Line Value: Columbia
  misc_feature: MA Experiment 20001451 PARAMETER Experiment Name: At_Far-red-induction_P Parameter: Timepoint (hr) Value: 24
  misc_feature: MA Experiment 20001451 PARAMETER Experiment Name: At_Far-red-induction_P Parameter: Tissue Value: Whole Plant
  misc_feature: MA Experiment ID: 20001557 Result: Up-regulated in Transcription
  misc_feature: MA Experiment 20001557 PARAMETER Experiment Name: At_Drought_Soil_Dry_P Parameter: Age (day) Value: 27
  misc_feature: MA Experiment 20001557 PARAMETER Experiment Name: At_Drought_Soil_Dry_P Parameter: Organism Value: A. thaliana
  misc_feature: MA Experiment 20001557 PARAMETER Experiment Name: At_Drought_Soil_Dry_P Parameter: Plant Line Value: WS
  misc_feature: MA Experiment 20001557 PARAMETER Experiment Name: At_Drought_Soil_Dry_P Parameter: Post Timepoint (hr) Value: 3
  misc_feature: MA Experiment 20001557 PARAMETER Experiment Name: At_Drought_Soil_Dry_P Parameter: Post-Treatment Value: Re-Water vs. No Drought
  misc_feature: MA Experiment 20001557 PARAMETER Experiment Name: At_Drought_Soil_Dry_P Parameter: Timepoint (day) Value: 13
  misc_feature: MA Experiment 20001557 PARAMETER Experiment Name: At_Drought_Soil_Dry_P Parameter: Treatment Value: Drought vs. No Drought
  misc_feature: MA Experiment ID: 20001558 Result: Up-regulated in Transcription
  misc_feature: MA Experiment 20001558 PARAMETER Experiment Name: At_Drought_Soil_Dry_P Parameter: Age (day) Value: 27
  misc_feature: MA Experiment 20001558 PARAMETER Experiment Name: At_Drought_Soil_Dry_P Parameter: Organism Value: A. thaliana
  misc_feature: MA Experiment 20001558 PARAMETER Experiment Name: At_Drought_Soil_Dry_P Parameter: Plant Line Value: WS
  misc_feature: MA Experiment 20001558 PARAMETER Experiment Name: At_Drought_Soil_Dry_P Parameter: Post Timepoint (hr) Value: 6
  misc_feature: MA Experiment 20001558 PARAMETER Experiment Name: At_Drought_Soil_Dry_P Parameter: Post-Treatment Value: Re-Water vs. No Drought
  misc_feature: MA Experiment 20001558 PARAMETER Experiment Name: At_Drought_Soil_Dry_P Parameter: Timepoint (day) Value: 13
  misc_feature: MA Experiment 20001558 PARAMETER Experiment Name: At_Drought_Soil_Dry_P Parameter: Treatment Value: Drought vs. No Drought
  misc_feature: MA Experiment ID: 20001560 Result: Up-regulated in Transcription
  misc_feature: MA Experiment 20001560 PARAMETER Experiment Name: At_Drought_Soil_Dry_P Parameter: Age (day) Value: 28
  misc_feature: MA Experiment 20001560 PARAMETER Experiment Name: At_Drought_Soil_Dry_P Parameter: Organism Value: A. thaliana
  misc_feature: MA Experiment 20001560 PARAMETER Experiment Name: At_Drought_Soil_Dry_P Parameter: Plant Line Value: WS
  misc_feature: MA Experiment 20001560 PARAMETER Experiment Name: At_Drought_Soil_Dry_P Parameter: Post Timepoint (hr) Value: None
  misc_feature: MA Experiment 20001560 PARAMETER Experiment Name: At_Drought_Soil_Dry_P Parameter: Post-Treatment Value: None
  misc_feature: MA Experiment 20001560 PARAMETER Experiment Name: At_Drought_Soil_Dry_P Parameter: Timepoint (day) Value: 14
  misc_feature: MA Experiment 20001560 PARAMETER Experiment Name: At_Drought_Soil_Dry_P Parameter: Treatment Value: Drought vs. No Drought
ttcgtactactactaccaccacatttctttagctcaaccttcattactaatctccttttaaggtttctttcgtgaatcagatcggaaaaatggaatcttttttgttcacatctgaatccgtcaacgagggacatcccgacaagctttgtgatcagatctccgacgctatcctcgatgcttgccttgaacaagaccctgagagcaaagttgcttgtgagacttgtaccaagactaacatggtcatggtttttggagaaatcaccaccaaggctaacgttgattacgagcagattgttcgtaaaacatgccgtgagattggattcgtctctgctgacgttggtctagatgctgacaattgcaaggttctggttaacattgagcaacagagtcctgacattgcacaaggtgttcatggtcatctcaccaagaagccagaggaggttggagctggtgaccaaggtcacatgtttgggtatgctactgatgagactcctgagctcatgcctcttactcacgttctcgctactaagcttggagctaaactcactgaagttcgcaagaatggaacttgcccttggttgaggccagatggtaagactcaagtcactattgagtacatcaacgaaagcggagccatggttcctgtacgtgtccacactgttctcatctcaacacagcatgacgagactgtgactaacgatgagatcgcagctgatcttaaggagcatgtgatcaagccagtgatcccagagaaataccttgatgagaaaaccatcttccatctcaacccatctggtcgttttgttatcggaggtcctcatggagatgcagggcttaccggccgtaagatcatcatcgatacttatggtggttggggtgcacacggaggtggtgctttctctggaaaggacccaaccaaggttgacaggagtggggcttacatcgttaggcaagcagctaagagcattgtagccagtgggctagcgaggcgggtcattgtgcaagtctcgtatgccattggtgtccctgagccattgtctgtgttcgtggacagttatggaacaggaaagataccagacaaggagattcttgagattgtgaaggagagttttgatttcaggccaggtatgatctccattaacttggatctgaagagaggaggtaatggtaggttcttgaagactgctgcctatggtcactttggaagggacgatgctgatttcacctgggaggtagtcaagccactcaagtctaacaaggtccaagcttgaaacctgtcagcctctgtttcacttctgtccagaatcagtcttgttctctgtattttaggctctttctgcctctttagtttcaactctgagatgggtttattcattttgttttcaactttgaagaaaaaagctaagcagctgggaatttatataattatttatatggtattcttgtgctaagaaagttaaattcataatatgtatttcttacttattttgagaagaaaatcatataagagaat

SEQ ID NO: 25708 - protein, 393 aa, Arabidopsis thaliana
  peptide (1)..(393): Ceres Seq. ID no. 12331557
  misc_feature (116)..(238): Pfam Name: S-adenosylmethionine synthetase, central domain Pfam Description: S-adenosylmethionine synthetase, central domain
  misc_feature (116)..(238): Pfam Name: S-adenosylmethionine synthetase, central domain Pfam Description: S-adenosylmethionine synthetase, central domain
  misc_feature (1)..(393): Homolog of NCBI NO: 1170938 NR Description: S-adenosylmethionine synthetase 2 (Methionine
  misc_feature (2)..(390): Homolog of NCBI NO: 18157331 NR Description: S-adenosylmethionine synthetase [Phaseolus
  misc_feature (1)..(393): Homolog of NCBI NO: 13540318 NR Description: S-adenosyl-L-methionine synthetase [Elaeagnus
  misc_feature (1)..(393): Homolog of NCBI NO: 13540316 NR Description: S-adenosyl-L-methionine synthetase [Elaeagnus
  misc_feature (2)..(393): Homolog of NCBI NO: 1346524 NR Description: S-adenosylmethionine synthetase (Methionine
  misc_feature (1)..(393): Homolog of NCBI NO: 1170938 NR Description: S-adenosylmethionine synthetase 2 (Methionine
  misc_feature (1)..(393): Homolog of NCBI NO: 13540318 NR Description: S-adenosyl-L-methionine synthetase [Elaeagnus
  misc_feature (2)..(393): Homolog of NCBI NO: 1346524 NR Description: S-adenosylmethionine synthetase (Methionine
  misc_feature (1)..(393): Homolog of NCBI NO: 15229033 NR Description: putative s-adenosylmethionine synthetase
  misc_feature (1)..(393): Homolog of NCBI NO: 10443981 NR Description: S-adenosylmethionine synthetase [Brassica juncea]
  misc_feature (1)..(393): Homolog of NCBI NO: 3024127 NR Description: S-adenosylmethionine synthetase 2 (Methionine
  misc_feature (1)..(392): Homolog of NCBI NO: 5726594 NR Description: S-adenosyl-L-methionine synthetase [Petunia x
  misc_feature (1)..(390): Homolog of NCBI NO: 3024126 NR Description: S-adenosylmethionine synthetase 1 (Methionine
  misc_feature (1)..(393): Homolog of NCBI NO: 13540316 NR Description: S-adenosyl-L-methionine synthetase [Elaeagnus
  misc_feature (2)..(390): Homolog of NCBI NO: 18157331 NR Description: S-adenosylmethionine synthetase [Phaseolus
  misc_feature (1)..(390): Homolog of NCBI NO: 3024126 NR Description: S-adenosylmethionine synthetase 1 (Methionine
  misc_feature (1)..(392): Homolog of NCBI NO: 5726594 NR Description: S-adenosyl-L-methionine synthetase [Petunia x
  misc_feature (1)..(393): Homolog of NCBI NO: 3024127 NR Description: S-adenosylmethionine synthetase 2 (Methionine
  misc_feature (1)..(393): Homolog of NCBI NO: 10443981 NR Description: S-adenosylmethionine synthetase [Brassica juncea]
  misc_feature (1)..(393): Homolog of NCBI NO: 15229033 NR Description: putative s-adenosylmethionine synthetase
MESFLFTSESVNEGHPDKLCDQISDAILDACLEQDPESKVACETCTKTNMVMVFGEITTKANVDYEQIVRKTCREIGFVSADVGLDADNCKVLVNIEQQSPDIAQGVHGHLTKKPEEVGAGDQGHMFGYATDETPELMPLTHVLATKLGAKLTEVRKNGTCPWLRPDGKTQVTIEYINESGAMVPVRVHTVLISTQHDETVTNDEIAADLKEHVIKPVIPEKYLDEKTIFHLNPSGRFVIGGPHGDAGLTGRKIIIDTYGGWGAHGGGAFSGKDPTKVDRSGAYIVRQAAKSIVASGLARRVIVQVSYAIGVPEPLSVFVDSYGTGKIPDKEILEIVKESFDFRPGMISINLDLKRGGNGRFLKTAAYGHFGRDDADFTWEVVKPLKSNKVQA

SEQ ID NO: 25709 - protein, 344 aa, Arabidopsis thaliana
  peptide (1)..(344): Ceres Seq. ID no. 12331558
  misc_feature (67)..(189): Pfam Name: S-adenosylmethionine synthetase, central domain Pfam Description: S-adenosylmethionine synthetase, central domain
  misc_feature (67)..(189): Pfam Name: S-adenosylmethionine synthetase, central domain Pfam Description: S-adenosylmethionine synthetase, central domain
  misc_feature (1)..(344): Homolog of NCBI NO: 1170938 NR Description: S-adenosylmethionine synthetase 2 (Methionine
  misc_feature (1)..(341): Homolog of NCBI NO: 18157331 NR Description: S-adenosylmethionine synthetase [Phaseolus
  misc_feature (1)..(344): Homolog of NCBI NO: 13540318 NR Description: S-adenosyl-L-methionine synthetase [Elaeagnus
  misc_feature (1)..(344): Homolog of NCBI NO: 13540316 NR Description: S-adenosyl-L-methionine synthetase [Elaeagnus
  misc_feature (1)..(344): Homolog of NCBI NO: 1346524 NR Description: S-adenosylmethionine synthetase (Methionine
  misc_feature (1)..(344): Homolog of NCBI NO: 1170938 NR Description: S-adenosylmethionine synthetase 2 (Methionine
  misc_feature (1)..(344): Homolog of NCBI NO: 13540318 NR Description: S-adenosyl-L-methionine synthetase [Elaeagnus
  misc_feature (1)..(344): Homolog of NCBI NO: 1346524 NR Description: S-adenosylmethionine synthetase (Methionine
  misc_feature (1)..(344): Homolog of NCBI NO: 15229033 NR Description: putative s-adenosylmethionine synthetase
  misc_feature (1)..(344): Homolog of NCBI NO: 10443981 NR Description: S-adenosylmethionine synthetase [Brassica juncea]
  misc_feature (1)..(344): Homolog of NCBI NO: 3024127 NR Description: S-adenosylmethionine synthetase 2 (Methionine
  misc_feature (1)..(343): Homolog of NCBI NO: 5726594 NR Description: S-adenosyl-L-methionine synthetase [Petunia x
  misc_feature (1)..(341): Homolog of NCBI NO: 3024126 NR Description: S-adenosylmethionine synthetase 1 (Methionine
  misc_feature (1)..(344): Homolog of NCBI NO: 13540316 NR Description: S-adenosyl-L-methionine synthetase [Elaeagnus
  misc_feature (1)..(341): Homolog of NCBI NO: 18157331 NR Description: S-adenosylmethionine synthetase [Phaseolus
  misc_feature (1)..(341): Homolog of NCBI NO: 3024126 NR Description: S-adenosylmethionine synthetase 1 (Methionine
  misc_feature (1)..(343): Homolog of NCBI NO: 5726594 NR Description: S-adenosyl-L-methionine synthetase [Petunia x
  misc_feature (1)..(344): Homolog of NCBI NO: 3024127 NR Description: S-adenosylmethionine synthetase 2 (Methionine
  misc_feature (1)..(344): Homolog of NCBI NO: 10443981 NR Description: S-adenosylmethionine synthetase [Brassica juncea]
  misc_feature (1)..(344): Homolog of NCBI NO: 15229033 NR Description: putative s-adenosylmethionine synthetase
MVMVFGEITTKANVDYEQIVRKTCREIGFVSADVGLDADNCKVLVNIEQQSPDIAQGVHGHLTKKPEEVGAGDQGHMFGYATDETPELMPLTHVLATKLGAKLTEVRKNGTCPWLRPDGKTQVTIEYINESGAMVPVRVHTVLISTQHDETVTNDEIAADLKEHVIKPVIPEKYLDEKTIFHLNPSGRFVIGGPHGDAGLTGRKIIIDTYGGWGAHGGGAFSGKDPTKVDRSGAYIVRQAAKSIVASGLARRVIVQVSYAIGVPEPLSVFVDSYGTGKIPDKEILEIVKESFDFRPGMISINLDLKRGGNGRFLKTAAYGHFGRDDADFTWEVVKPLKSNKVQA

SEQ ID NO: 25710 - protein, 342 aa, Arabidopsis thaliana
  peptide (1)..(342): Ceres Seq. ID no. 12331559
  misc_feature (65)..(187): Pfam Name: S-adenosylmethionine synthetase, central domain Pfam Description: S-adenosylmethionine synthetase, central domain
  misc_feature (65)..(187): Pfam Name: S-adenosylmethionine synthetase, central domain Pfam Description: S-adenosylmethionine synthetase, central domain
  misc_feature (1)..(342): Homolog of NCBI NO: 1170938 NR Description: S-adenosylmethionine synthetase 2 (Methionine
  misc_feature (1)..(339): Homolog of NCBI NO: 18157331 NR Description: S-adenosylmethionine synthetase [Phaseolus
  misc_feature (1)..(342): Homolog of NCBI NO: 13540318 NR Description: S-adenosyl-L-methionine synthetase [Elaeagnus
  misc_feature (1)..(342): Homolog of NCBI NO: 13540316 NR Description: S-adenosyl-L-methionine synthetase [Elaeagnus
  misc_feature (1)..(342): Homolog of NCBI NO: 1346524 NR Description: S-adenosylmethionine synthetase (Methionine
  misc_feature (1)..(342): Homolog of NCBI NO: 1170938 NR Description: S-adenosylmethionine synthetase 2 (Methionine
  misc_feature (1)..(342): Homolog of NCBI NO: 13540318 NR Description: S-adenosyl-L-methionine synthetase [Elaeagnus
  misc_feature (1)..(342): Homolog of NCBI NO: 1346524 NR Description: S-adenosylmethionine synthetase (Methionine
  misc_feature (1)..(342): Homolog of NCBI NO: 15229033 NR Description: putative s-adenosylmethionine synthetase
  misc_feature (1)..(342): Homolog of NCBI NO: 10443981 NR Description: S-adenosylmethionine synthetase [Brassica juncea]
  misc_feature (1)..(342): Homolog of NCBI NO: 3024127 NR Description: S-adenosylmethionine synthetase 2 (Methionine
  misc_feature (1)..(341): Homolog of NCBI NO: 5726594 NR Description: S-adenosyl-L-methionine synthetase [Petunia x
  misc_feature (1)..(339): Homolog of NCBI NO: 3024126 NR Description: S-adenosylmethionine synthetase 1 (Methionine
  misc_feature (1)..(342): Homolog of NCBI NO: 13540316 NR Description: S-adenosyl-L-methionine synthetase [Elaeagnus
  misc_feature (1)..(339): Homolog of NCBI NO: 18157331 NR Description: S-adenosylmethionine synthetase [Phaseolus
  misc_feature (1)..(339): Homolog of NCBI NO: 3024126 NR Description: S-adenosylmethionine synthetase 1 (Methionine
  misc_feature (1)..(341): Homolog of NCBI NO: 5726594 NR Description: S-adenosyl-L-methionine synthetase [Petunia x
  misc_feature (1)..(342): Homolog of NCBI NO: 3024127 NR Description: S-adenosylmethionine synthetase 2 (Methionine
  misc_feature (1)..(342): Homolog of NCBI NO: 10443981 NR Description: S-adenosylmethionine synthetase [Brassica juncea]
  misc_feature (1)..(342): Homolog of NCBI NO: 15229033 NR Description: putative s-adenosylmethionine synthetase
MVFGEITTKANVDYEQIVRKTCREIGFVSADVGLDADNCKVLVNIEQQSPDIAQGVHGHLTKKPEEVGAGDQGHMFGYATDETPELMPLTHVLATKLGAKLTEVRKNGTCPWLRPDGKTQVTIEYINESGAMVPVRVHTVLISTQHDETVTNDEIAADLKEHVIKPVIPEKYLDEKTIFHLNPSGRFVIGGPHGDAGLTGRKIIIDTYGGWGAHGGGAFSGKDPTKVDRSGAYIVRQAAKSIVASGLARRVIVQVSYAIGVPEPLSVFVDSYGTGKIPDKEILEIVKESFDFRPGMISINLDLKRGGNGRFLKTAAYGHFGRDDADFTWEVVKPLKSNKVQA

SEQ ID NO: 25711 - DNA, 789 bp, Arabidopsis thaliana
  misc_feature (1)..(789): Ceres Seq. ID no. 12339501
  misc_feature: MA Experiment ID: 108434 Result: Up-regulated in Transcription
  misc_feature: MA Experiment 108434 PARAMETER Experiment Name: At_Root_Tips_cDNA_P Parameter: Tissue Value: Root Tips
  misc_feature: MA Experiment ID: 108573 Result: Up-regulated in Transcription
  misc_feature: MA Experiment 108573 PARAMETER Experiment Name: At_Drought_cDNA_P Parameter: Timepoint (hr) Value: 6
  misc_feature: MA Experiment 108573 PARAMETER Experiment Name: At_Drought_cDNA_P Parameter: Tissue Value: Aerial
  misc_feature: MA Experiment 108573 PARAMETER Experiment Name: At_Drought_cDNA_P Parameter: Treatment Value: Drought vs. No Drought
  misc_feature: MA Experiment ID: 108585 Result: Up-regulated in Transcription
  misc_feature: MA Experiment 108585 PARAMETER Experiment Name: At_5mM_NaNP_cDNA_P Parameter: Timepoint (hr) Value: 6
  misc_feature: MA Experiment 108585 PARAMETER Experiment Name: At_5mM_NaNP_cDNA_P Parameter: Tissue Value: Aerial
  misc_feature: MA Experiment 108585 PARAMETER Experiment Name: At_5mM_NaNP_cDNA_P Parameter: Treatment Value: null
  misc_feature: MA Experiment ID: 20000111 Result: Up-regulated in Transcription
  misc_feature: MA Experiment 20000111 PARAMETER Experiment Name: At_42deg_Heat_cDNA_P Parameter: Temperature (deg C) Value: 42 vs. 22
  misc_feature: MA Experiment 20000111 PARAMETER Experiment Name: At_42deg_Heat_cDNA_P Parameter: Timepoint (hr) Value: 6
  misc_feature: MA Experiment 20000111 PARAMETER Experiment Name: At_42deg_Heat_cDNA_P Parameter: Tissue Value: Aerial
  misc_feature: MA Experiment ID: 20000224 Result: Down-regulated in Transcription
  misc_feature: MA Experiment ID: 20000286 Result: Down-regulated in Transcription
  misc_feature: MA Experiment 20000286 PARAMETER Experiment Name: At_Open_Flower_P Parameter: Age (day) Value: 21
  misc_feature: MA Experiment 20000286 PARAMETER Experiment Name: At_Open_Flower_P Parameter: Plant Line Value: WS
  misc_feature: MA Experiment 20000286 PARAMETER Experiment Name: At_Open_Flower_P Parameter: Tissue Value: Half Open vs. Whole Plant
  misc_feature: MA Experiment ID: 20000439 Result: Down-regulated in Transcription
  misc_feature: MA Experiment 20000439 PARAMETER Experiment Name: At_Roots__P Parameter: Age (day) Value: 14 vs. 21
  misc_feature: MA Experiment 20000439 PARAMETER Experiment Name: At_Roots__P Parameter: Organism Value: A. thaliana
  misc_feature: MA Experiment 20000439 PARAMETER Experiment Name: At_Roots__P Parameter: Tissue Value: Roots vs. Whole Plant
  misc_feature: MA Experiment ID: 20000452 Result: Down-regulated in Transcription
  misc_feature: MA Experiment 20000452 PARAMETER Experiment Name: At_CS6879_Shoots-Roots_P Parameter: Age (day) Value: 14
  misc_feature: MA Experiment 20000452 PARAMETER Experiment Name: At_CS6879_Shoots-Roots_P Parameter: Organism Value: A. thaliana
  misc_feature: MA Experiment 20000452 PARAMETER Experiment Name: At_CS6879_Shoots-Roots_P Parameter: Plant Line Value: CS6879 vs. WS
  misc_feature: MA Experiment 20000452 PARAMETER Experiment Name: At_CS6879_Shoots-Roots_P Parameter: Tissue Value: Shoots
  misc_feature: MA Experiment ID: 20001450 Result: Up-regulated in Transcription
  misc_feature: MA Experiment 20001450 PARAMETER Experiment Name: At_Far-red-induction_P Parameter: Age (day) Value: 7
  misc_feature: MA Experiment 20001450 PARAMETER Experiment Name: At_Far-red-induction_P Parameter: Light Value: Far-red vs. White
  misc_feature: MA Experiment 20001450 PARAMETER Experiment Name: At_Far-red-induction_P Parameter: Organism Value: A. thaliana
  misc_feature: MA Experiment 20001450 PARAMETER Experiment Name: At_Far-red-induction_P Parameter: Plant Line Value: Columbia
  misc_feature: MA Experiment 20001450 PARAMETER Experiment Name: At_Far-red-induction_P Parameter: Timepoint (hr) Value: 8
  misc_feature: MA Experiment 20001450 PARAMETER Experiment Name: At_Far-red-induction_P Parameter: Tissue Value: Whole Plant
  misc_feature: MA Experiment ID: 20001451 Result: Up-regulated in Transcription
  misc_feature: MA Experiment 20001451 PARAMETER Experiment Name: At_Far-red-induction_P Parameter: Age (day) Value: 7
  misc_feature: MA Experiment 20001451 PARAMETER Experiment Name: At_Far-red-induction_P Parameter: Light Value: Far-red vs. White
  misc_feature: MA Experiment 20001451 PARAMETER Experiment Name: At_Far-red-induction_P Parameter: Organism Value: A. thaliana
  misc_feature: MA Experiment 20001451 PARAMETER Experiment Name: At_Far-red-induction_P Parameter: Plant Line Value: Columbia
  misc_feature: MA Experiment 20001451 PARAMETER Experiment Name: At_Far-red-induction_P Parameter: Timepoint (hr) Value: 24
  misc_feature: MA Experiment 20001451 PARAMETER Experiment Name: At_Far-red-induction_P Parameter: Tissue Value: Whole Plant
aaataaacctaaaccaatagaaccgcagttttttctcctcgccgaaacgaagaagattctccttctctccgtcagacaaatctacgaacaagcgagcctgagcttaagaccaaactcctagagatgggtttcttctcttttcttggaagagttctcttcgcttctctctttatcctctccgcttggcaaatgttcaatgatggtggtcctgcagctaaagaattggctccaaagcttgatttggttaaggcacatttatcttctagattaggagtaacattgcccaaaatagaggtgagacaagtcgttgctactattattgccctgaaaggagtcggaggcttactctttgttatcggaaacatcttcggtgcttatcttctggctttctacttggttgttgtcagtcctattctctatgatttctacaactacggacctcaggaacgtcatttctctcttctgttgacagagttcttgcagagcgttgcactctttggagcattactcttctttatcggaatgaagaactcgacacccgccaagaagaatttgaagaagaggacacctaagccgaaagctgcctagtatcaatattagttttcttctggttttgccatgagcaagcaataccttgcattttccttttttcccgacaaaatctttccttagaacttttgttttctttctgttttaggattcttagattagctcatgatcttatactgtgatttgatattggggatcttgaagttttggtttgttgaaactggaaccatgcagctacag

SEQ ID NO: 25712 - protein, 154 aa, Arabidopsis thaliana
  peptide (1)..(154): Ceres Seq. ID no. 12339502
  misc_feature (1)..(134): Pfam Name: HR-like lesion-inducing Pfam Description: HR-like lesion-inducing
  misc_feature (1)..(152): Homolog of NCBI NO: 7489144 NR Description: hypothetical protein (clone NF22) - common
  misc_feature (1)..(153): Homolog of NCBI NO: 15236497 NR Description: elicitor like protein
  misc_feature (1)..(152): Homolog of NCBI NO: 38346190 NR Description: OSJNBa0027O01.6 [Oryza sativa (japonica
  misc_feature (1)..(24): Homolog of NCBI NO: 37534824 NR Description: putative RNA-binding protein
  misc_feature (26)..(153): Homolog of NCBI NO: 37534824 NR Description: putative RNA-binding protein
  misc_feature (1)..(152): Homolog of NCBI NO: 27261473 NR Description: Unknown protein [Oryza sativa (japonica
  misc_feature (1)..(148): Homolog of NCBI NO: 40287494 NR Description: putative lesion-inducing protein [Capsicum annuum]
  misc_feature (1)..(154): Homolog of NCBI NO: 15219714 NR Description: unknown protein
  misc_feature (1)..(154): Homolog of NCBI NO: 15239873 NR Description: Nicotiana lesion-inducing like
  misc_feature (1)..(154): Homolog of NCBI NO: 21592798 NR Description: Nicotiana lesion-inducing like [Arabidopsis
MGFFSFLGRVLFASLFILSAWQMFNDGGPAAKELAPKLDLVKAHLSSRLGVTLPKIEVRQVVATIIALKGVGGLLFVIGNIFGAYLLAFYLVVVSPILYDFYNYGPQERHFSLLLTEFLQSVALFGALLFFIGMKNSTPAKKNLKKRTPKPKAA

SEQ ID NO: 25713 - protein, 132 aa, Arabidopsis thaliana
  peptide (1)..(132): Ceres Seq. ID no. 12339504
  misc_feature (1)..(112): Pfam Name: HR-like lesion-inducing Pfam Description: HR-like lesion-inducing
  misc_feature (5)..(131): Homolog of NCBI NO: 3885517 NR Description: similar to Nicotiana HR lesion-inducing ORF
  misc_feature (1)..(130): Homolog of NCBI NO: 7489144 NR Description: hypothetical protein (clone NF22) - common
  misc_feature (1)..(131): Homolog of NCBI NO: 15236497 NR Description: elicitor like protein
  misc_feature (1)..(130): Homolog of NCBI NO: 38346190 NR Description: OSJNBa0027O01.6 [Oryza sativa (japonica
  misc_feature (4)..(131): Homolog of NCBI NO: 37534824 NR Description: putative RNA-binding protein
  misc_feature (1)..(130): Homolog of NCBI NO: 27261473 NR Description: Unknown protein [Oryza sativa (japonica
  misc_feature (1)..(126): Homolog of NCBI NO: 40287494 NR Description: putative lesion-inducing protein [Capsicum annuum]
  misc_feature (1)..(132): Homolog of NCBI NO: 15219714 NR Description: unknown protein
  misc_feature (1)..(132): Homolog of NCBI NO: 15239873 NR Description: Nicotiana lesion-inducing like
  misc_feature (1)..(132): Homolog of NCBI NO: 21592798 NR Description: Nicotiana lesion-inducing like [Arabidopsis
MFNDGGPAAKELAPKLDLVKAHLSSRLGVTLPKIEVRQVVATIIALKGVGGLLFVIGNIFGAYLLAFYLVVVSPILYDFYNYGPQERHFSLLLTEFLQSVALFGALLFFIGMKNSTPAKKNLKKRTPKPKAA

SEQ ID NO: 25714 - DNA, 783 bp, Arabidopsis thaliana
  misc_feature (1)..(783): Ceres Seq. ID no. 12562397
  misc_feature: MA Experiment ID: 108561 Result: Up-regulated in Transcription
  misc_feature: MA Experiment 108561 PARAMETER Experiment Name: At_100uM_ABA_cDNA_P Parameter: Timepoint (hr) Value: 6
  misc_feature: MA Experiment 108561 PARAMETER Experiment Name: At_100uM_ABA_cDNA_P Parameter: Tissue Value: Aerial
  misc_feature: MA Experiment 108561 PARAMETER Experiment Name: At_100uM_ABA_cDNA_P Parameter: Treatment Value: 100uM ABA vs. No Treatment
  misc_feature: MA Experiment ID: 20000069 Result: Up-regulated in Transcription
  misc_feature: MA Experiment 20000069 PARAMETER Experiment Name: At_100uM_ABA_Mutants_cDNA_P Parameter: Plant Line Value: CS23
  misc_feature: MA Experiment 20000069 PARAMETER Experiment Name: At_100uM_ABA_Mutants_cDNA_P Parameter: Timepoint (hr) Value: 6
  misc_feature: MA Experiment 20000069 PARAMETER Experiment Name: At_100uM_ABA_Mutants_cDNA_P Parameter: Tissue Value: Aerial
  misc_feature: MA Experiment 20000069 PARAMETER Experiment Name: At_100uM_ABA_Mutants_cDNA_P Parameter: Treatment Value: 100uM ABA vs. No Treatment
  misc_feature: MA Experiment ID: 20000087 Result: Up-regulated in Transcription
  misc_feature: MA Experiment 20000087 PARAMETER Experiment Name: At_100uM_ABA_Mutants_cDNA_P Parameter: Plant Line Value: WS
  misc_feature: MA Experiment 20000087 PARAMETER Experiment Name: At_100uM_ABA_Mutants_cDNA_P Parameter: Timepoint (hr) Value: 6
  misc_feature: MA Experiment 20000087 PARAMETER Experiment Name: At_100uM_ABA_Mutants_cDNA_P Parameter: Tissue Value: Aerial
  misc_feature: MA Experiment 20000087 PARAMETER Experiment Name: At_100uM_ABA_Mutants_cDNA_P Parameter: Treatment Value: 100uM ABA vs. No Treatment
  misc_feature: MA Experiment ID: 20000179 Result: Down-regulated in Transcription
  misc_feature: MA Experiment 20000179 PARAMETER Experiment Name: At_Germinating_Seeds_P Parameter: Age (hr) Value: 6 vs. 0
  misc_feature: MA Experiment 20000179 PARAMETER Experiment Name: At_Germinating_Seeds_P Parameter: Tissue Value: Germinating Seeds
  misc_feature: MA Experiment ID: 20000180 Result: Down-regulated in Transcription
  misc_feature: MA Experiment 20000180 PARAMETER Experiment Name: At_Germinating_Seeds_P Parameter: Age (hr) Value: 24 vs. 0
  misc_feature: MA Experiment 20000180 PARAMETER Experiment Name: At_Germinating_Seeds_P Parameter: Tissue Value: Germinating Seeds
aaaatttcacggaaaatagaagcgtcgagttcctcctctccctcaggttgtcaatggccgctaggttacttgcttggagacgcgctttgtctcttttcagcaaccaacaacatcgttttcctttgtctcaagtctcaacagagcagttgtcgctatcaaactcactcttcagcagaagtcatgtttatggaagattatttcagagacagttatctgtaatccgtgaggcaaatgaagcttctgtaaccaatgtctgcaactcgtcaaactctgctactgaatcggccaaagttccctcccctgcgacgccctctgaggaaatgatggtgaagtacaagtcccagttaaaaataaacccgaggcatgacttcatgatggtcttcacttgcaaggtctgtgatacaagatctatgaagatggcgagccgagaatcatatgaaaacggcgttgtggtggtacgatgtggagggtgtgataatctacatttgattgcagaccgtcgtgttggtttggagaaccaggaagcgtggaggacttccttgcttctcaaggggaagaattcaagaaaggatccatggattctcttaacctaactcctgaaaatttagctggaggaaagatttctactgaataaggagtgatcttctttgcttttgctacttaaccattatggaacagaacttcaccttatgttccagtattataattgtttcttgtagttcactgtttggtaacatttaaatgcagaagatgtttaatacaattatgtgtttggaatgttcc

SEQ ID NO: 25715 - protein, 196 aa, Arabidopsis thaliana
  peptide (1)..(196): Ceres Seq. ID no. 12562398
  misc_feature (125)..(165): Homolog of NCBI NO: 24642261 NR Description: CG12379-PA [Drosophila melanogaster]
  misc_feature (31)..(166): Homolog of NCBI NO: 23485607 NR Description: Drosophila melanogaster CG12379 gene product
  misc_feature (78)..(177): Homolog of NCBI NO: 21912576 NR Description: hypothetical protein [Taenia solium]
  misc_feature (18)..(167): Homolog of NCBI NO: 29028810 NR Description: At3g54830 [Arabidopsis thaliana]
  misc_feature (80)..(189): Homolog of NCBI NO: 19113862 NR Description: hypothetical protein [Schizosaccharomyces pombe]
  misc_feature (116)..(165): Homolog of NCBI NO: 12835133 NR Description: unnamed protein product [Mus musculus]
  misc_feature (104)..(166): Homolog of NCBI NO: 23509418 NR Description: hypothetical protein [Plasmodium falciparum 3D7]
NFTENRSVEFLLSLRLSMAARLLAWRRALSLFSNQQHRFPLSQVSTEQLSLSNSLFSRSHVYGRLFQRQLSVIREANEASVTNVCNSSNSATESAKVPSPATPSEEMMVKYKSQLKINPRHDFMMVFTCKVCDTRSMKMASRESYENGVVVVRCGGCDNLHLIADRRVGLENQEAWRTSLLLKGKNSRKDPWILLT

SEQ ID NO: 25716 - protein, 179 aa, Arabidopsis thaliana
  peptide (1)..(179): Ceres Seq. ID no. 12562399
  misc_feature (87)..(149): Homolog of NCBI NO: 23509418 NR Description: hypothetical protein [Plasmodium falciparum 3D7]
  misc_feature (63)..(172): Homolog of NCBI NO: 19113862 NR Description: hypothetical protein [Schizosaccharomyces pombe]
  misc_feature (99)..(148): Homolog of NCBI NO: 12835133 NR Description: unnamed protein product [Mus musculus]
  misc_feature (108)..(148): Homolog of NCBI NO: 24642261 NR Description: CG12379-PA [Drosophila melanogaster]
  misc_feature (14)..(149): Homolog of NCBI NO: 23485607 NR Description: Drosophila melanogaster CG12379 gene product
  misc_feature (61)..(160): Homolog of NCBI NO: 21912576 NR Description: hypothetical protein [Taenia solium]
  misc_feature (1)..(150): Homolog of NCBI NO: 29028810 NR Description: At3g54830 [Arabidopsis thaliana]
MAARLLAWRRALSLFSNQQHRFPLSQVSTEQLSLSNSLFSRSHVYGRLFQRQLSVIREANEASVTNVCNSSNSATESAKVPSPATPSEEMMVKYKSQLKINPRHDFMMVFTCKVCDTRSMKMASRESYENGVVVVRCGGCDNLHLIADRRVGLENQEAWRTSLLLKGKNSRKDPWILLT

SEQ ID NO: 25717 - DNA, 1102 bp, Arabidopsis thaliana
  misc_feature (1)..(1102): Ceres Seq. ID no. 12331065
  misc_feature: MA Experiment ID: 108434 Result: Up-regulated in Transcription
  misc_feature: MA Experiment 108434 PARAMETER Experiment Name: At_Root_Tips_cDNA_P Parameter: Tissue Value: Root Tips
  misc_feature: MA Experiment ID: 108435 Result: Up-regulated in Transcription
  misc_feature: MA Experiment 108435 PARAMETER Experiment Name: At_stm_Mutants_cDNA_P Parameter: Plant Line Value: wt Landsburg vs stm
  misc_feature: MA Experiment 108435 PARAMETER Experiment Name: At_stm_Mutants_cDNA_P Parameter: Tissue Value: Shoot Apical Meristem Region
  misc_feature: MA Experiment ID: 108462 Result: Down-regulated in Transcription
  misc_feature: MA Experiment 108462 PARAMETER Experiment Name: At_Germinating_Seeds_cDNA_P Parameter: Age (day) Value: 2 vs. 0
  misc_feature: MA Experiment 108462 PARAMETER Experiment Name: At_Germinating_Seeds_cDNA_P Parameter: Tissue Value: Germinating Seeds
  misc_feature: MA Experiment ID: 108463 Result: Down-regulated in Transcription
  misc_feature: MA Experiment 108463 PARAMETER Experiment Name: At_Germinating_Seeds_cDNA_P Parameter: Age (day) Value: 3 vs. 0
  misc_feature: MA Experiment 108463 PARAMETER Experiment Name: At_Germinating_Seeds_cDNA_P Parameter: Tissue Value: Germinating Seeds
  misc_feature: MA Experiment ID: 108464 Result: Down-regulated in Transcription
  misc_feature: MA Experiment 108464 PARAMETER Experiment Name: At_Germinating_Seeds_cDNA_P Parameter: Age (day) Value: 4 vs. 0
  misc_feature: MA Experiment 108464 PARAMETER Experiment Name: At_Germinating_Seeds_cDNA_P Parameter: Tissue Value: Germinating Seeds
  misc_feature: MA Experiment ID: 108573 Result: Up-regulated in Transcription
  misc_feature: MA Experiment 108573 PARAMETER Experiment Name: At_Drought_cDNA_P Parameter: Timepoint (hr) Value: 6
  misc_feature: MA Experiment 108573 PARAMETER Experiment Name: At_Drought_cDNA_P Parameter: Tissue Value: Aerial
  misc_feature: MA Experiment 108573 PARAMETER Experiment Name: At_Drought_cDNA_P Parameter: Treatment Value: Drought vs. No Drought
  misc_feature: MA Experiment ID: 20000224 Result: Down-regulated in Transcription
cacttgaggaaacacagtaaaaacctaaaaagagaatgaaactcgcaggtctgaaatcgatcgagaacgctcacgaagattccgtttgggcagcgacgtgggttccggcgacggaagatcgaccggcgttgcttctgactggatctcttgacgagacggtgaagttatggcgaccggacgagctggatcttgtgcggactaatactggacactctttgggagtagcagctttggctgcgcatccttctgggattattgcagcatcttcttcgattgatagctttgtccgtgtgtttgatgttgatactaatgctacgattgctgttttggaagctcctccttctgaggtttgggtaatgcaatttgaacctaagggtacgatccttgctgttgcaggtggaagtagtgcctcagtcaagctttgggacactgcaagctggagattaatctcaactctatcaatcccacgcccagatgcaccaaaaccttccgataaaaccagcagcaagaaattcgttctctcggtggcttggtctcctaatgggaaacgacttgcttgtggttcaatggatggtacgatctgtgtttttgatgttgaccgctcaaagctacttcaccagctagaaggtcacaatatgcctgtaaggtcccttgtgttctcccctgtagacccgagagtcctcttctctggatcagatgatgggcatgtgaacatgcacgatgcagaagggaaaacgctgttggggtccatgtcagggcacacgagttgggtgctgagcgttgatgctagcccagacggtggagccatagcaaccggctgaagcgatagaactgtgaggctatgggatcttaaaatgagagctgcgattcagacaatgagcaaccacaatgaccaggtttggtctttggcctttagaccaccaggtggaaccggtgtccgggctggtcgacttgctagtgtctctgatgacaagagtgtatcgctctatgattactcatgaacaattcggttttttgacttttttcttttatgcattctccaagacgcatctagttgtaacaatataatctgcaacaggttgattttgaccggagtctttag

SEQ ID NO: 25718 - protein, 261 aa, Arabidopsis thaliana
  peptide (1)..(261): Ceres Seq. ID no. 12331066
  misc_feature (33)..(261): Homolog of NCBI NO: 13173173 NR Description: unknown protein i8 [Aedes aegypti]
  misc_feature (33)..(261): Homolog of NCBI NO: 19335618 NR Description: unknown protein [Aedes aegypti]
  misc_feature (10)..(261): Homolog of NCBI NO: 26345856 NR Description: unnamed protein product [Mus musculus]
  misc_feature (10)..(261): Homolog of NCBI NO: 33150742 NR Description: G protein beta subunit-like protein [Homo sapiens]
  misc_feature (10)..(261): Homolog of NCBI NO: 13277350 NR Description: meiotic recombination protein REC14 [Mus
  misc_feature (10)..(261): Homolog of NCBI NO: 12849020 NR Description: unnamed protein product [Mus musculus]
  misc_feature (10)..(261): Homolog of NCBI NO: 13376840 NR Description: recombination protein REC14 [Homo sapiens]
  misc_feature (10)..(261): Homolog of NCBI NO: 37590940 NR Description: Unknown (protein for MGC:75826) [Silurana
  misc_feature (10)..(261): Homolog of NCBI NO: 38541742 NR Description: Unknown (protein for MGC:77675) [Danio rerio]
  misc_feature (1)..(261): Homolog of NCBI NO: 15233721 NR Description: G-protein beta family
MKLAGLKSIENAHEDSVWAATWVPATEDRPALLLTGSLDETVKLWRPDELDLVRTNTGHSLGVAALAAHPSGIIAASSSIDSFVRVFDVDTNATIAVLEAPPSEVWVMQFEPKGTILAVAGGSSASVKLWDTASWRLISTLSIPRPDAPKPSDKTSSKKFVLSVAWSPNGKRLACGSMDGTICVFDVDRSKLLHQLEGHNMPVRSLVFSPVDPRVLFSGSDDGHVNMHDAEGKTLLGSMSGHTSWVLSVDASPDGGAIATG

SEQ ID NO: 25719 - protein, 154 aa, Arabidopsis thaliana
  peptide (1)..(154): Ceres Seq. ID no. 12331067
  misc_feature (1)..(154): Homolog of NCBI NO: 13173173 NR Description: unknown protein i8 [Aedes aegypti]
  misc_feature (1)..(154): Homolog of NCBI NO: 19335618 NR Description: unknown protein [Aedes aegypti]
  misc_feature (1)..(154): Homolog of NCBI NO: 26345856 NR Description: unnamed protein product [Mus musculus]
  misc_feature (1)..(154): Homolog of NCBI NO: 33150742 NR Description: G protein beta subunit-like protein [Homo sapiens]
  misc_feature (1)..(154): Homolog of NCBI NO: 13277350 NR Description: meiotic recombination protein REC14 [Mus
  misc_feature (1)..(154): Homolog of NCBI NO: 12849020 NR Description: unnamed protein product [Mus musculus]
  misc_feature (1)..(154): Homolog of NCBI NO: 13376840 NR Description: recombination protein REC14 [Homo sapiens]
  misc_feature (1)..(154): Homolog of NCBI NO: 37590940 NR Description: Unknown (protein for MGC:75826) [Silurana
  misc_feature (1)..(154): Homolog of NCBI NO: 38541742 NR Description: Unknown (protein for MGC:77675) [Danio rerio]
  misc_feature (1)..(154): Homolog of NCBI NO: 15233721 NR Description: G-protein beta family
MQFEPKGTILAVAGGSSASVKLWDTASWRLISTLSIPRPDAPKPSDKTSSKKFVLSVAWSPNGKRLACGSMDGTICVFDVDRSKLLHQLEGHNMPVRSLVFSPVDPRVLFSGSDDGHVNMHDAEGKTLLGSMSGHTSWVLSVDASPDGGAIATG

SEQ ID NO: 25720 - DNA, 1132 bp, Arabidopsis thaliana
  misc_feature (1)..(1132): Ceres Seq. ID no. 12580373
  misc_feature: MA Experiment ID: 108434 Result: Up-regulated in Transcription
  misc_feature: MA Experiment 108434 PARAMETER Experiment Name: At_Root_Tips_cDNA_P Parameter: Tissue Value: Root Tips
  misc_feature: MA Experiment ID: 108461 Result: Up-regulated in Transcription
  misc_feature: MA Experiment 108461 PARAMETER Experiment Name: At_Germinating_Seeds_cDNA_P Parameter: Age (day) Value: 1 vs. 0
  misc_feature: MA Experiment 108461 PARAMETER Experiment Name: At_Germinating_Seeds_cDNA_P Parameter: Tissue Value: Germinating Seeds
  misc_feature: MA Experiment ID: 108463 Result: Down-regulated in Transcription
  misc_feature: MA Experiment 108463 PARAMETER Experiment Name: At_Germinating_Seeds_cDNA_P Parameter: Age (day) Value: 3 vs. 0
  misc_feature: MA Experiment 108463 PARAMETER Experiment Name: At_Germinating_Seeds_cDNA_P Parameter: Tissue Value: Germinating Seeds
  misc_feature: MA Experiment ID: 108464 Result: Down-regulated in Transcription
  misc_feature: MA Experiment 108464 PARAMETER Experiment Name: At_Germinating_Seeds_cDNA_P Parameter: Age (day) Value: 4 vs. 0
  misc_feature: MA Experiment 108464 PARAMETER Experiment Name: At_Germinating_Seeds_cDNA_P Parameter: Tissue Value: Germinating Seeds
  misc_feature: MA Experiment ID: 108501 Result: Up-regulated in Transcription
  misc_feature: MA Experiment 108501 PARAMETER Experiment Name: At_ap2_floral_buds_cDNA_P Parameter: Plant Line Value: ap2 (Ler.)
  misc_feature: MA Experiment 108501 PARAMETER Experiment Name: At_ap2_floral_buds_cDNA_P Parameter: Tissue Value: Closed Flower
  misc_feature: MA Experiment ID: 108573 Result: Down-regulated in Transcription
  misc_feature: MA Experiment 108573 PARAMETER Experiment Name: At_Drought_cDNA_P Parameter: Timepoint (hr) Value: 6
  misc_feature: MA Experiment 108573 PARAMETER Experiment Name: At_Drought_cDNA_P Parameter: Tissue Value: Aerial
  misc_feature: MA Experiment 108573 PARAMETER Experiment Name: At_Drought_cDNA_P Parameter: Treatment Value: Drought vs. No Drought
  misc_feature: MA Experiment ID: 108585 Result: Down-regulated in Transcription
  misc_feature: MA Experiment 108585 PARAMETER Experiment Name: At_5mM_NaNP_cDNA_P Parameter: Timepoint (hr) Value: 6
  misc_feature: MA Experiment 108585 PARAMETER Experiment Name: At_5mM_NaNP_cDNA_P Parameter: Tissue Value: Aerial
  misc_feature: MA Experiment 108585 PARAMETER Experiment Name: At_5mM_NaNP_cDNA_P Parameter: Treatment Value: null
  misc_feature: MA Experiment ID: 108595 Result: Down-regulated in Transcription
  misc_feature: MA Experiment 108595 PARAMETER Experiment Name: At_Ler-pi_Ovule_cDNA_P Parameter: Plant Line Value: null
  misc_feature: MA Experiment ID: 20000090 Result: Up-regulated in Transcription
  misc_feature: MA Experiment ID: 20000111 Result: Down-regulated in Transcription
  misc_feature: MA Experiment 20000111 PARAMETER Experiment Name: At_42deg_Heat_cDNA_P Parameter: Temperature (deg C) Value: 42 vs. 22
  misc_feature: MA Experiment 20000111 PARAMETER Experiment Name: At_42deg_Heat_cDNA_P Parameter: Timepoint (hr) Value: 6
  misc_feature: MA Experiment 20000111 PARAMETER Experiment Name: At_42deg_Heat_cDNA_P Parameter: Tissue Value: Aerial
  misc_feature: MA Experiment ID: 20000113 Result: Down-regulated in Transcription
  misc_feature: MA Experiment 20000113 PARAMETER Experiment Name: At_42deg_Heat_cDNA_P Parameter: Temperature (deg C) Value: 42 vs. 22
  misc_feature: MA Experiment 20000113 PARAMETER Experiment Name: At_42deg_Heat_cDNA_P Parameter: Timepoint (hr) Value: 8
  misc_feature: MA Experiment 20000113 PARAMETER Experiment Name: At_42deg_Heat_cDNA_P Parameter: Tissue Value: Aerial
  misc_feature: MA Experiment ID: 20000574 Result: Down-regulated in Transcription
  misc_feature: MA Experiment 20000574 PARAMETER Experiment Name: At_100uM_ABA_Mutants__P Parameter: Organism Value: A. thaliana
  misc_feature: MA Experiment 20000574 PARAMETER Experiment Name: At_100uM_ABA_Mutants__P Parameter: Plant Line Value: CS23 vs. Ler wt
  misc_feature: MA Experiment 20000574 PARAMETER Experiment Name: At_100uM_ABA_Mutants__P Parameter: Timepoint (hr) Value: N/A
  misc_feature: MA Experiment 20000574 PARAMETER Experiment Name: At_100uM_ABA_Mutants__P Parameter: Tissue Value: Whole Plant
  misc_feature: MA Experiment 20000574 PARAMETER Experiment Name: At_100uM_ABA_Mutants__P Parameter: Treatment Value: None
atcacttcccgctaacaattgcaatctcctcccagaaatttcaacagctctaaaaaccctaaccgtttcgattcacactctaacctttcgataatttcccagaagatgttggagcttcgtttagttcaaggttctctactgaagaaggttctagaagcggtcaaagatctggtgaacgatgcgaacttcgactgttcgaccacagggttctcgcttcaagctatggattcgagccatgtcgcgttggtgtctcttttgcttagatctgaaggtttcgagcactatagatgcgatagaaacctctctatgggaatgaatcttggtaatatgtctaagatgctgaaatgtgctggaaatgatgatatcatcaccatcaaagctgatgatggtagcgacactgttactttcatgtttgagagtcccacacaagacaagattgcagattttgagatgaagctgatggatatcgacaggagcatttaggaattcctgatgctgagtaccactcgattgtgagaatgccttctggtgaattttccaggatatgcaaagatctcagtagcattggtgacacagttgtgatctcggtaacaaaagaaggggtgaagttttcaacagcaggtgatatcgggacagcaaacattgtgctcaggcagaatactaccgtcgacaaacctgaagatgctattgtgatagagatgaacgagcctgtttcgctttcatttgcattgaggtacatgaactccttcacaaaggctactccattgtcggaaactgtgaccatcagtttgtcctctgagttaccggtcgtggtggagtacaaggtggctgagatgggttacattcgatactatctggcgcctaagattgaagaagaagaagacaccaaaccagaataatgatgaatgtttgatagtcttcgttcgagtcctttgttgaaatgtctgtcttgattcagttgttttctggatttactatcttaaggcaatgctaaactagataatcgtatgatgtttgtctttctgaaatttggaaaagcttgtttataacacttttcatctgtttgttaaacattgaagaaaaagaagacacgaagccctaaaacacgtttgtttgtggcttctgcaacccc

SEQ ID NO: 25721 - protein, 126 aa, Arabidopsis thaliana
  peptide (1)..(126): Ceres Seq. ID no. 12580374
  misc_feature (1)..(116): Pfam Name: Proliferating cell nuclear antigen, C-terminal domain Pfam Description: Proliferating cell nuclear antigen, C-terminal
  misc_feature (1)..(125): Homolog of NCBI NO: 100160 NR Description: proliferating cell nuclear antigen (clone 4.10) -
  misc_feature (1)..(125): Homolog of NCBI NO: 25005275 NR Description: proliferating cell nuclear antigen [Lycopersicon
  misc_feature (1)..(125): Homolog of NCBI NO: 3947727 NR Description: proliferating cell nuclear antigen [Nicotiana
  misc_feature (1)..(125): Homolog of NCBI NO: 129692 NR Description: PROLIFERATING CELL NUCLEAR ANTIGEN (PCNA) (CYCLIN)
  misc_feature (1)..(125): Homolog of NCBI NO: 10946427 NR Description: proliferating cell nuclear antigen [Nicotiana
  misc_feature (1)..(125): Homolog of NCBI NO: 6225836 NR Description: Proliferating cell nuclear antigen (PCNA)
  misc_feature (1)..(124): Homolog of NCBI NO: 2499441 NR Description: PROLIFERATING CELL NUCLEAR ANTIGEN (PCNA)
  misc_feature (1)..(125): Homolog of NCBI NO: 7207994 NR Description: proliferating cellular nuclear antigen
  misc_feature (1)..(125): Homolog of NCBI NO: 15222379 NR Description: proliferating cellular nuclear antigen
  misc_feature (1)..(126): Homolog of NCBI NO: 15227564 NR Description: putative proliferating cell nuclear antigen, PCNA
MPSGEFSRICKDLSSIGDTVVISVTKEGVKFSTAGDIGTANIVLRQNTTVDKPEDAIVIEMNEPVSLSFALRYMNSFTKATPLSETVTISLSSELPVVVEYKVAEMGYIRYYLAPKIEEEEDTKPE

SEQ ID NO: 25722 - protein, 125 aa, Arabidopsis thaliana
  peptide (1)..(125): Ceres Seq. ID no. 12580375
  misc_feature (1)..(122): Pfam Name: Proliferating cell nuclear antigen, N-terminal domain Pfam Description: Proliferating cell nuclear antigen, N-terminal
  misc_feature (1)..(122): Homolog of NCBI NO: 100160 NR Description: proliferating cell nuclear antigen (clone 4.10) -
  misc_feature (1)..(122): Homolog of NCBI NO: 25005275 NR Description: proliferating cell nuclear antigen [Lycopersicon
  misc_feature (1)..(122): Homolog of NCBI NO: 3947727 NR Description: proliferating cell nuclear antigen [Nicotiana
  misc_feature (1)..(122): Homolog of NCBI NO: 129692 NR Description: PROLIFERATING CELL NUCLEAR ANTIGEN (PCNA) (CYCLIN)
  misc_feature (1)..(122): Homolog of NCBI NO: 10946427 NR Description: proliferating cell nuclear antigen [Nicotiana
  misc_feature (1)..(122): Homolog of NCBI NO: 6225836 NR Description: Proliferating cell nuclear antigen (PCNA)
  misc_feature (1)..(122): Homolog of NCBI NO: 2499441 NR Description: PROLIFERATING CELL NUCLEAR ANTIGEN (PCNA)
  misc_feature (1)..(122): Homolog of NCBI NO: 7207994 NR Description: proliferating cellular nuclear antigen
  misc_feature (1)..(122): Homolog of NCBI NO: 15222379 NR Description: proliferating cellular nuclear antigen
  misc_feature (1)..(122): Homolog of NCBI NO: 15227564 NR Description: putative proliferating cell nuclear antigen, PCNA
MLELRLVQGSLLKKVLEAVKDLVNDANFDCSTTGFSLQAMDSSHVALVSLLLRSEGFEHYRCDRNLSMGMNLGNMSKMLKCAGNDDIITIKADDGSDTVTFMFESPTQDKIADFEMKLMDIDRSI

SEQ ID NO: 25723 - protein, 86 aa, Arabidopsis thaliana
  peptide (1)..(86): Ceres Seq. ID no. 12580376
  misc_feature (1)..(83): Pfam Name: Proliferating cell nuclear antigen, N-terminal domain Pfam Description: Proliferating cell nuclear antigen, N-terminal
  misc_feature (1)..(83): Homolog of NCBI NO: 100160 NR Description: proliferating cell nuclear antigen (clone 4.10) -
  misc_feature (1)..(83): Homolog of NCBI NO: 25005275 NR Description: proliferating cell nuclear antigen [Lycopersicon
  misc_feature (1)..(83): Homolog of NCBI NO: 3947727 NR Description: proliferating cell nuclear antigen [Nicotiana
  misc_feature (1)..(83): Homolog of NCBI NO: 129692 NR Description: PROLIFERATING CELL NUCLEAR ANTIGEN (PCNA) (CYCLIN)
  misc_feature (1)..(83): Homolog of NCBI NO: 10946427 NR Description: proliferating cell nuclear antigen [Nicotiana
  misc_feature (1)..(83): Homolog of NCBI NO: 6225836 NR Description: Proliferating cell nuclear antigen (PCNA)
  misc_feature (1)..(83): Homolog of NCBI NO: 2499441 NR Description: PROLIFERATING CELL NUCLEAR ANTIGEN (PCNA)
  misc_feature (1)..(83): Homolog of NCBI NO: 7207994 NR Description: proliferating cellular nuclear antigen
  misc_feature (1)..(83): Homolog of NCBI NO: 15222379 NR Description: proliferating cellular nuclear antigen
  misc_feature (1)..(83): Homolog of NCBI NO: 15227564 NR Description: putative proliferating cell nuclear antigen, PCNA
MDSSHVALVSLLLRSEGFEHYRCDRNLSMGMNLGNMSKMLKCAGNDDIITIKADDGSDTVTFMFESPTQDKIADFEMKLMDIDRSI

SEQ ID NO: 25724 - DNA, 1742 bp, Arabidopsis thaliana
  misc_feature (1)..(1742): Ceres Seq. ID no. 12580060
  misc_feature: MA Experiment ID: 108573 Result: Up-regulated in Transcription
  misc_feature: MA Experiment 108573 PARAMETER Experiment Name: At_Drought_cDNA_P Parameter: Timepoint (hr) Value: 6
  misc_feature: MA Experiment 108573 PARAMETER Experiment Name: At_Drought_cDNA_P Parameter: Tissue Value: Aerial
  misc_feature: MA Experiment 108573 PARAMETER Experiment Name: At_Drought_cDNA_P Parameter: Treatment Value: Drought vs. No Drought
  misc_feature: MA Experiment ID: 20000184 Result: Down-regulated in Transcription
  misc_feature: MA Experiment 20000184 PARAMETER Experiment Name: At_Shoots__P Parameter: Age (day) Value: 7
  misc_feature: MA Experiment 20000184 PARAMETER Experiment Name: At_Shoots__P Parameter: Tissue Value: Shoots vs. Whole Plant
  misc_feature: MA Experiment ID: 20000224 Result: Up-regulated in Transcription
  misc_feature: MA Experiment ID: 20001451 Result: Up-regulated in Transcription
  misc_feature: MA Experiment 20001451 PARAMETER Experiment Name: At_Far-red-induction_P Parameter: Age (day) Value: 7
  misc_feature: MA Experiment 20001451 PARAMETER Experiment Name: At_Far-red-induction_P Parameter: Light Value: Far-red vs. White
  misc_feature: MA Experiment 20001451 PARAMETER Experiment Name: At_Far-red-induction_P Parameter: Organism Value: A. thaliana
  misc_feature: MA Experiment 20001451 PARAMETER Experiment Name: At_Far-red-induction_P Parameter: Plant Line Value: Columbia
  misc_feature: MA Experiment 20001451 PARAMETER Experiment Name: At_Far-red-induction_P Parameter: Timepoint (hr) Value: 24
  misc_feature: MA Experiment 20001451 PARAMETER Experiment Name: At_Far-red-induction_P Parameter: Tissue Value: Whole Plant
aattttcatccaattcaactcaggaaattgctatgattttactctgagaatcagaagaagaaatctcggtgagcaaaatccctagttttgggatgatgtttccacgactacgattgacgaaggtcttcttctccccgatcatcgccgggaaatggatcgtctttgccgacggtagcagcggcggcggcgttggtagaaatggctactacggtggattgtggtcgtcggccgttattccttccaatgttggtttagctgtcgctgtcaccgtcatggccgtggccgtcgctttcaccgtctactctcgtagaggaagcattggatcaccgtggtcactaaggagaagaaagcgagttcttcaacctaaacaatggaatgcttttttcacagaggaagggcgactcagtgatggaggtgtcaaatttctgaagaaagttcgtagtgggggtgtacatccaagcatcagaccagaagtttggccgttccttcttggagtgtatgacttaaagagcaacaaagaagaaagagactccattcgacagctgaaactgacggaatatgaaaacctgcggagacagtgtcgcgagattcatgaacgctatgaaaatgtctgcgactcaaaggagacagctcagagcagcaacactgaagacagtcaggttcttgaatcccatgatattgaggaagtcgagagttccacaagaaccatcaccgtagatgaatcagagaagttgaattctgaatcgattatgcaggatgagaactgtgaaaagagcgatgtcaccacagaagatgctgctggtaatgattcagactcaaccaatcctgaagaaaccgagacttcaccttttctagctaacgaagaagtagaaagccacaatactgttaaccaagaaaaagaaatttcgtctccatcatcaaagccaaaatctcaggcagcggacgaggatttcatgtcaacttggcagagaattatccgcctagatgctgtgagagcaaatgacgaatgggtgccctactcaccaactcaagctgctgtttctgagacaaaagcccggggaatagccattcaggttggtctcaatgactatgaccacttggaaccctgccggatatttcacgcagcccgcctggtcgggatccttgaagcctacgcagtctatgatccagaaattggttactgtcaaggaatgagcgacttactatctcctttaatcgcagtgatggaagacgacgtcttagcattctggtgctttgttggcttcatgagtaaagcacggcataatttccggttagacgaggttggaatcaggcggcaactctcaatggtatcgaaaatcataaaattcaaagacattcacttgtaccgacacttggagaaccttgaagcagaagactgcttctttgtataccgtatggttgtagttctgttcagacgagaactaacctttgagcagacgttgtgtctctgggaagtaatgtgggcggatcaagctgcaatacgaactgggattgcgaaggcgacatgggggagaatccggttacgagcaccaccgacagaagatttgttgctttacgcgatagctgcaagcgtgctgcagaggaggaagacgataatagagaaatacagtgggatggatgagataatgaaggaatgtaacagcatggctggtcatcttgatgtttggaaacttctagacgatgctcatgacttagtcgtcaatcttcacgacaagatctaa

SEQ ID NO: 25725 - protein, 549 aa, Arabidopsis thaliana
  peptide (1)..(549): Ceres Seq. ID no. 12580061
  misc_feature (87)..(166): Homolog of NCBI NO: 15239749 NR Description: putative protein; protein id: At5g54780.1
  misc_feature (327)..(465): Homolog of NCBI NO: 15239749 NR Description: putative protein; protein id: At5g54780.1
  misc_feature (87)..(166): Homolog of NCBI NO: 23296366 NR Description: unknown protein [Arabidopsis thaliana]
  misc_feature (327)..(465): Homolog of NCBI NO: 23296366 NR Description: unknown protein [Arabidopsis thaliana]
  misc_feature (155)..(549): Homolog of NCBI NO: 15229125 NR Description: GTPase activating -like protein; protein id:
  misc_feature (176)..(549): Homolog of NCBI NO: 37536102 NR Description: putative GTPase activating protein
  misc_feature (78)..(549): Homolog of NCBI NO: 15238518 NR Description: GTPase activator-like protein of Rab-like small
  misc_feature (78)..(549): Homolog of NCBI NO: 9759196 NR Description: GTPase activator protein of Rab-like small
  misc_feature (25)..(549): Homolog of NCBI NO: 15238777 NR Description: GTPase activator protein of Rab-like small
  misc_feature (54)..(549): Homolog of NCBI NO: 15238237 NR Description: GTPase activator protein of Rab-like small
MMFPRLRLTKVFFSPIIAGKWIVFADGSSGGGVGRNGYYGGLWSSAVIPSNVGLAVAVTVMAVAVAFTVYSRRGSIGSPWSLRRRKRVLQPKQWNAFFTEEGRLSDGGVKFLKKVRSGGVHPSIRPEVWPFLLGVYDLKSNKEERDSIRQLKLTEYENLRRQCREIHERYENVCDSKETAQSSNTEDSQVLESHDIEEVESSTRTITVDESEKLNSESIMQDENCEKSDVTTEDAAGNDSDSTNPEETETSPFLANEEVESHNTVNQEKEISSPSSKPKSQAADEDFMSTWQRIIRLDAVRANDEWVPYSPTQAAVSETKARGIAIQVGLNDYDHLEPCRIFHAARLVGILEAYAVYDPEIGYCQGMSDLLSPLIAVMEDDVLAFWCFVGFMSKARHNFRLDEVGIRRQLSMVSKIIKFKDIHLYRHLENLEAEDCFFVYRMVVVLFRRELTFEQTLCLWEVMWADQAAIRTGIAKATWGRIRLRAPPTEDLLLYAIAASVLQRRKTIIEKYSGMDEIMKECNSMAGHLDVWKLLDDAHDLVVNLHDKI

SEQ ID NO: 25726 - protein, 548 aa, Arabidopsis thaliana
  peptide (1)..(548): Ceres Seq. ID no. 12580062
  misc_feature (86)..(165): Homolog of NCBI NO: 15239749 NR Description: putative protein; protein id: At5g54780.1
  misc_feature (326)..(464): Homolog of NCBI NO: 15239749 NR Description: putative protein; protein id: At5g54780.1
  misc_feature (86)..(165): Homolog of NCBI NO: 23296366 NR Description: unknown protein [Arabidopsis thaliana]
  misc_feature (326)..(464): Homolog of NCBI NO: 23296366 NR Description: unknown protein [Arabidopsis thaliana]
  misc_feature (154)..(548): Homolog of NCBI NO: 15229125 NR Description: GTPase activating -like protein; protein id:
  misc_feature (175)..(548): Homolog of NCBI NO: 37536102 NR Description: putative GTPase activating protein
  misc_feature (77)..(548): Homolog of NCBI NO: 15238518 NR Description: GTPase activator-like protein of Rab-like small
  misc_feature (77)..(548): Homolog of NCBI NO: 9759196 NR Description: GTPase activator protein of Rab-like small
  misc_feature (24)..(548): Homolog of NCBI NO: 15238777 NR Description: GTPase activator protein of Rab-like small
  misc_feature (53)..(548): Homolog of NCBI NO: 15238237 NR Description: GTPase activator protein of Rab-like small
MFPRLRLTKVFFSPIIAGKWIVFADGSSGGGVGRNGYYGGLWSSAVIPSNVGLAVAVTVMAVAVAFTVYSRRGSIGSPWSLRRRKRVLQPKQWNAFFTEEGRLSDGGVKFLKKVRSGGVHPSIRPEVWPFLLGVYDLKSNKEERDSIRQLKLTEYENLRRQCREIHERYENVCDSKETAQSSNTEDSQVLESHDIEEVESSTRTITVDESEKLNSESIMQDENCEKSDVTTEDAAGNDSDSTNPEETETSPFLANEEVESHNTVNQEKEISSPSSKPKSQAADEDFMSTWQRIIRLDAVRANDEWVPYSPTQAAVSETKARGIAIQVGLNDYDHLEPCRIFHAARLVGILEAYAVYDPEIGYCQGMSDLLSPLIAVMEDDVLAFWCFVGFMSKARHNFRLDEVGIRRQLSMVSKIIKFKDIHLYRHLENLEAEDCFFVYRMVVVLFRRELTFEQTLCLWEVMWADQAAIRTGIAKATWGRIRLRAPPTEDLLLYAIAASVLQRRKTIIEKYSGMDEIMKECNSMAGHLDVWKLLDDAHDLVVNLHDKI

SEQ ID NO: 25727 - protein, 489 aa, Arabidopsis thaliana
  peptide (1)..(489): Ceres Seq. ID no. 12580063
  misc_feature (116)..(489): Homolog of NCBI NO: 37536102 NR Description: putative GTPase activating protein
  misc_feature (18)..(489): Homolog of NCBI NO: 15238518 NR Description: GTPase activator-like protein of Rab-like small
  misc_feature (18)..(489): Homolog of NCBI NO: 9759196 NR Description: GTPase activator protein of Rab-like small
  misc_feature (1)..(489): Homolog of NCBI NO: 15238777 NR Description: GTPase activator protein of Rab-like small
  misc_feature (1)..(489): Homolog of NCBI NO: 15238237 NR Description: GTPase activator protein of Rab-like small
  misc_feature (27)..(106): Homolog of NCBI NO: 15239749 NR Description: putative protein; protein id: At5g54780.1
  misc_feature (267)..(405): Homolog of NCBI NO: 15239749 NR Description: putative protein; protein id: At5g54780.1
  misc_feature (27)..(106): Homolog of NCBI NO: 23296366 NR Description: unknown protein [Arabidopsis thaliana]
  misc_feature (267)..(405): Homolog of NCBI NO: 23296366 NR Description: unknown protein [Arabidopsis thaliana]
  misc_feature (95)..(489): Homolog of NCBI NO: 15229125 NR Description: GTPase activating -like protein; protein id:
MAVAVAFTVYSRRGSIGSPWSLRRRKRVLQPKQWNAFFTEEGRLSDGGVKFLKKVRSGGVHPSIRPEVWPFLLGVYDLKSNKEERDSIRQLKLTEYENLRRQCREIHERYENVCDSKETAQSSNTEDSQVLESHDIEEVESSTRTITVDESEKLNSESIMQDENCEKSDVTTEDAAGNDSDSTNPEETETSPFLANEEVESHNTVNQEKEISSPSSKPKSQAADEDFMSTWQRIIRLDAVRANDEWVPYSPTQAAVSETKARGIAIQVGLNDYDHLEPCRIFHAARLVGILEAYAVYDPEIGYCQGMSDLLSPLIAVMEDDVLAFWCFVGFMSKARHNFRLDEVGIRRQLSMVSKIIKFKDIHLYRHLENLEAEDCFFVYRMVVVLFRRELTFEQTLCLWEVMWADQAAIRTGIAKATWGRIRLRAPPTEDLLLYAIAASVLQRRKTIIEKYSGMDEIMKECNSMAGHLDVWKLLDDAHDLVVNLHDKI

SEQ ID NO: 25728 - DNA, 1677 bp, Arabidopsis thaliana
  misc_feature (1)..(1677): Ceres Seq. ID no. 13486930
  misc_feature: MA Experiment ID: 108474 Result: Down-regulated in Transcription
  misc_feature: MA Experiment 108474 PARAMETER Experiment Name: At_Drought_Flowers_cDNA_P Parameter: Timepoint (hr) Value: null
  misc_feature: MA Experiment 108474 PARAMETER Experiment Name: At_Drought_Flowers_cDNA_P Parameter: Treatment Value: Drought vs. No Drought
  misc_feature: MA Experiment ID: 108488 Result: Down-regulated in Transcription
  misc_feature: MA Experiment ID: 108573 Result: Up-regulated in Transcription
  misc_feature: MA Experiment 108573 PARAMETER Experiment Name: At_Drought_cDNA_P Parameter: Timepoint (hr) Value: 6
  misc_feature: MA Experiment 108573 PARAMETER Experiment Name: At_Drought_cDNA_P Parameter: Tissue Value: Aerial
  misc_feature: MA Experiment 108573 PARAMETER Experiment Name: At_Drought_cDNA_P Parameter: Treatment Value: Drought vs. No Drought
  misc_feature: MA Experiment ID: 20000184 Result: Down-regulated in Transcription
  misc_feature: MA Experiment 20000184 PARAMETER Experiment Name: At_Shoots__P Parameter: Age (day) Value: 7
  misc_feature: MA Experiment 20000184 PARAMETER Experiment Name: At_Shoots__P Parameter: Tissue Value: Shoots vs. Whole Plant
  misc_feature: MA Experiment ID: 20000794 Result: Up-regulated in Transcription
  misc_feature: MA Experiment 20000794 PARAMETER Experiment Name: At_Petals_P Parameter: Age (day) Value: 23-25 days
  misc_feature: MA Experiment 20000794 PARAMETER Experiment Name: At_Petals_P Parameter: Plant Line Value: WS
  misc_feature: MA Experiment 20000794 PARAMETER Experiment Name: At_Petals_P Parameter: Tissue Value: Petals vs. Whole plant
  misc_feature: MA Experiment ID: 20001905 Result: Up-regulated in Transcription
  misc_feature: MA Experiment 20001905 PARAMETER Experiment Name: At_Drought_Reproduction_P Parameter: Age (day) Value: 40
  misc_feature: MA Experiment 20001905 PARAMETER Experiment Name: At_Drought_Reproduction_P Parameter: Organism Value: A. thaliana
  misc_feature: MA Experiment 20001905 PARAMETER Experiment Name: At_Drought_Reproduction_P Parameter: Plant Line Value: WS
  misc_feature: MA Experiment 20001905 PARAMETER Experiment Name: At_Drought_Reproduction_P Parameter: Timepoint (day) Value: 10
  misc_feature: MA Experiment 20001905 PARAMETER Experiment Name: At_Drought_Reproduction_P Parameter: Tissue Value: Rosettes
  misc_feature: MA Experiment 20001905 PARAMETER Experiment Name: At_Drought_Reproduction_P Parameter: Treatment Value: Drought vs. No Drought
agtccaaacaaaaatctgaaacggaagctcagagagacaaggatgagatttttctcttcctttgataaatcccaatacctaattcccaaattcccttacttttaggcgccgaaagatagagagaaacatagatacgcattggttttttcttttttgaagattctcgcttcttactacatgtgtatcaatcgatctctacccagattctccggaggagctttgagtcttgtcgtatagatgcagtgaaggtcctttgttagatgggaaaacttgttcttgagttgtcaaaaggtattttctatgtttttggagtagaactgtttacaaggaagcagccaatatggagtttgattttggagaaatgtttttagtgttgttgtgaagaaatatcagttttgattgtttttggatttgatgggtaaagagaatcagttggagactaccgattgtggagtcagtgatcacggttctccacctatcaagaatgaagaacatgaggcaccacgttacagttcagacaaagacacgggtttaccaacttgccgtgtatgccagtgtgcagaatctgatagaagaggagatgctgctttagggtttttgggaattactcctccggtttcagaacctcgtagaagcaatgcgggtgaagaaaccgttgatcagagaagctcggttgtcaaatctagcggattcatcgaactgataagtcctgatggagaagtttttgtttgtgcaaacgacgatatagaaatgggagcgtggcagcatcgagataagttgctagaacttggatgttcttgcaagaatgatctcgctttggtacactatgcttgtgcattgaaatggtttgtcaaccacggatcaactgtttgtgagatatgcggaaaaaccacggagaatataagaacagttgatttcaacaaagtggttatcgccttaaaagattacgcagcgctaagagaaagaacagcggatggagatccaaatcctgtagtggttaacaacaacaccagttcgtcagggattgatcctgatgcagttgcagccattcgaaggcaacgacttagtgagatatcgttatggtttggtcctcattgttcaaccaacaacaacaatagtagtaattccgctgctgcagggacggcttcttctcaggttacatctgaacaacctgtgggtatagtaaactttgatatcttgcctatggaaagccgtgcgactaaatgggcggtggaaggtaccggaatactacttgcaaccggattactcacagttactttggcttggctcattgctcctcgtgtcggaaagagaactgcaaagagtggtctacacatacttctaggtggtctctgtgctttaacagtagtcatcttcttcagattcgttgtgctgacaagaatcaggtacggaccagcacgttactgggcaatattgttcgtcttctggtttcttgtgtttggcatttgggcttcacgttcacacgcttctcactcctccacatgataaattctccatcatccttcaagacacaaaatgtactctttttggtctctgtcaatatcatgtacgttattctctttcaagacacaaaatgtacaattaattactcttatcaaaaagaaaaaaaggggtgaaactgaatgttatcatctcacaacaaagtctcttggtcgc

SEQ ID NO: 25729 - protein, 363 aa, Arabidopsis thaliana
  peptide (1)..(363): Ceres Seq. ID no. 13486931
  misc_feature (105)..(156): Pfam Name: Zinc finger, C3HC4 type (RING finger) Pfam Description: Zinc finger, C3HC4 type (RING finger)
  misc_feature (121)..(188): Homolog of NCBI NO: 29725746 NR Description: hypothetical protein [Arabidopsis thaliana]
  misc_feature (26)..(353): Homolog of NCBI NO: 38567835 NR Description: OSJNBb0020J19.13 [Oryza sativa (japonica
  misc_feature (1)..(306): Homolog of NCBI NO: 10177059 NR Description: gb|AAD32776.1~gene_id:MBK5.26~similar to unknown
  misc_feature (1)..(362): Homolog of NCBI NO: 30697894 NR Description: zinc finger (C3HC4-type RING finger) protein
  misc_feature (1)..(363): Homolog of NCBI NO: 16209722 NR Description: AT5g63780/MBK5_26 [Arabidopsis thaliana]
  misc_feature (1)..(363): Homolog of NCBI NO: 18415916 NR Description: zinc finger (C3HC4-type RING finger) protein
MGKENQLETTDCGVSDHGSPPIKNEEHEAPRYSSDKDTGLPTCRVCQCAESDRRGDAALGFLGITPPVSEPRRSNAGEETVDQRSSVVKSSGFIELISPDGEVFVCANDDIEMGAWQHRDKLLELGCSCKNDLALVHYACALKWFVNHGSTVCEICGKTTENIRTVDFNKVVIALKDYAALRERTADGDPNPVVVNNNTSSSGIDPDAVAAIRRQRLSEISLWFGPHCSTNNNNSSNSAAAGTASSQVTSEQPVGIVNFDILPMESRATKWAVEGTGILLATGLLTVTLAWLIAPRVGKRTAKSGLHILLGGLCALTVVIFFRFVVLTRIRYGPARYWAILFVFWFLVFGIWASRSHASHSST

SEQ ID NO: 25730 - protein, 251 aa, Arabidopsis thaliana
  peptide (1)..(251): Ceres Seq. ID no. 13486932
  misc_feature (1)..(44): Pfam Name: Zinc finger, C3HC4 type (RING finger) Pfam Description: Zinc finger, C3HC4 type (RING finger)
  misc_feature (9)..(76): Homolog of NCBI NO: 29725746 NR Description: hypothetical protein [Arabidopsis thaliana]
  misc_feature (1)..(241): Homolog of NCBI NO: 38567835 NR Description: OSJNBb0020J19.13 [Oryza sativa (japonica
  misc_feature (1)..(194): Homolog of NCBI NO: 10177059 NR Description: gb|AAD32776.1~gene_id:MBK5.26~similar to unknown
  misc_feature (1)..(250): Homolog of NCBI NO: 30697894 NR Description: zinc finger (C3HC4-type RING finger) protein
  misc_feature (1)..(251): Homolog of NCBI NO: 16209722 NR Description: AT5g63780/MBK5_26 [Arabidopsis thaliana]
  misc_feature (1)..(251): Homolog of NCBI NO: 18415916 NR Description: zinc finger (C3HC4-type RING finger) protein
MGAWQHRDKLLELGCSCKNDLALVHYACALKWFVNHGSTVCEICGKTTENIRTVDFNKVVIALKDYAALRERTADGDPNPVVVNNNTSSSGIDPDAVAAIRRQRLSEISLWFGPHCSTNNNNSSNSAAAGTASSQVTSEQPVGIVNFDILPMESRATKWAVEGTGILLATGLLTVTLAWLIAPRVGKRTAKSGLHILLGGLCALTVVIFFRFVVLTRIRYGPARYWAILFVFWFLVFGIWASRSHASHSST

SEQ ID NO: 25731 - DNA, 495 bp, Arabidopsis thaliana
  misc_feature (1)..(495): Ceres Seq. ID no. 12321141
  misc_feature: MA Experiment ID: 108434 Result: Down-regulated in Transcription
  misc_feature: MA Experiment 108434 PARAMETER Experiment Name: At_Root_Tips_cDNA_P Parameter: Tissue Value: Root Tips
  misc_feature: MA Experiment ID: 108463 Result: Up-regulated in Transcription
  misc_feature: MA Experiment 108463 PARAMETER Experiment Name: At_Germinating_Seeds_cDNA_P Parameter: Age (day) Value: 3 vs. 0
  misc_feature: MA Experiment 108463 PARAMETER Experiment Name: At_Germinating_Seeds_cDNA_P Parameter: Tissue Value: Germinating Seeds
  misc_feature: MA Experiment ID: 108464 Result: Up-regulated in Transcription
  misc_feature: MA Experiment 108464 PARAMETER Experiment Name: At_Germinating_Seeds_cDNA_P Parameter: Age (day) Value: 4 vs. 0
  misc_feature: MA Experiment 108464 PARAMETER Experiment Name: At_Germinating_Seeds_cDNA_P Parameter: Tissue Value: Germinating Seeds
  misc_feature: MA Experiment ID: 108579 Result: Up-regulated in Transcription
  misc_feature: MA Experiment 108579 PARAMETER Experiment Name: At_4deg_Cold_cDNA_P Parameter: Temperature (deg C) Value: 4 vs. 22
  misc_feature: MA Experiment 108579 PARAMETER Experiment Name: At_4deg_Cold_cDNA_P Parameter: Timepoint (hr) Value: 6
  misc_feature: MA Experiment 108579 PARAMETER Experiment Name: At_4deg_Cold_cDNA_P Parameter: Tissue Value: Aerial
  misc_feature: MA Experiment ID: 20000087 Result: Up-regulated in Transcription
  misc_feature: MA Experiment 20000087 PARAMETER Experiment Name: At_100uM_ABA_Mutants_cDNA_P Parameter: Plant Line Value: WS
  misc_feature: MA Experiment 20000087 PARAMETER Experiment Name: At_100uM_ABA_Mutants_cDNA_P Parameter: Timepoint (hr) Value: 6
  misc_feature: MA Experiment 20000087 PARAMETER Experiment Name: At_100uM_ABA_Mutants_cDNA_P Parameter: Tissue Value: Aerial
  misc_feature: MA Experiment 20000087 PARAMETER Experiment Name: At_100uM_ABA_Mutants_cDNA_P Parameter: Treatment Value: 100uM ABA vs. No Treatment
  misc_feature: MA Experiment ID: 20000180 Result: Up-regulated in Transcription
  misc_feature: MA Experiment 20000180 PARAMETER Experiment Name: At_Germinating_Seeds_P Parameter: Age (hr) Value: 24 vs. 0
  misc_feature: MA Experiment 20000180 PARAMETER Experiment Name: At_Germinating_Seeds_P Parameter: Tissue Value: Germinating Seeds
  misc_feature: MA Experiment ID: 20000185 Result: Up-regulated in Transcription
  misc_feature: MA Experiment 20000185 PARAMETER Experiment Name: At_Roots__P Parameter: Age (day) Value: 7 vs. 21
  misc_feature: MA Experiment 20000185 PARAMETER Experiment Name: At_Roots__P Parameter: Organism Value: A. thaliana
  misc_feature: MA Experiment 20000185 PARAMETER Experiment Name: At_Roots__P Parameter: Tissue Value: Roots vs. Whole Plant
  misc_feature: MA Experiment ID: 20001560 Result: Up-regulated in Transcription
  misc_feature: MA Experiment 20001560 PARAMETER Experiment Name: At_Drought_Soil_Dry_P Parameter: Age (day) Value: 28
  misc_feature: MA Experiment 20001560 PARAMETER Experiment Name: At_Drought_Soil_Dry_P Parameter: Organism Value: A. thaliana
  misc_feature: MA Experiment 20001560 PARAMETER Experiment Name: At_Drought_Soil_Dry_P Parameter: Plant Line Value: WS
  misc_feature: MA Experiment 20001560 PARAMETER Experiment Name: At_Drought_Soil_Dry_P Parameter: Post Timepoint (hr) Value: None
  misc_feature: MA Experiment 20001560 PARAMETER Experiment Name: At_Drought_Soil_Dry_P Parameter: Post-Treatment Value: None
  misc_feature: MA Experiment 20001560 PARAMETER Experiment Name: At_Drought_Soil_Dry_P Parameter: Timepoint (day) Value: 14
  misc_feature: MA Experiment 20001560 PARAMETER Experiment Name: At_Drought_Soil_Dry_P Parameter: Treatment Value: Drought vs. No Drought
  misc_feature: MA Experiment ID: 20001904 Result: Up-regulated in Transcription
  misc_feature: MA Experiment 20001904 PARAMETER Experiment Name: At_Drought_Reproduction_P Parameter: Age (day) Value: 37
  misc_feature: MA Experiment 20001904 PARAMETER Experiment Name: At_Drought_Reproduction_P Parameter: Organism Value: A. thaliana
  misc_feature: MA Experiment 20001904 PARAMETER Experiment Name: At_Drought_Reproduction_P Parameter: Plant Line Value: WS
  misc_feature: MA Experiment 20001904 PARAMETER Experiment Name: At_Drought_Reproduction_P Parameter: Timepoint (day) Value: 7
  misc_feature: MA Experiment 20001904 PARAMETER Experiment Name: At_Drought_Reproduction_P Parameter: Tissue Value: Rosettes
  misc_feature: MA Experiment 20001904 PARAMETER Experiment Name: At_Drought_Reproduction_P Parameter: Treatment Value: Drought vs. No Drought
acttcctcattagcattctacagtctgcacacttatcacttctttcgaaatctctctctatccctctcaaaaatgaagctctctgtgcgttttatctccgctgctcttctcttgttcatggtattcattgccacagggatgggtccagtcaccgtggaggcacgcacgtgtgagtcaaagagccataggttcaagggtccatgtgtgagcacacacaactgtgcaaacgtgtgccacaacgaaggcttcggcggaggtaaatgccgtggattccgtcgtcgttgctactgcacaagacactgctgatccatccattctcatgactcaaatcttcgatccatcgtcagtgtgttacttctttcttatctaaatcttccgtacggtaccatatcgtaccgtacatgagtgttttctcaaataagtcgttggtttgtgtgtttccggttttaatgtaatgttaaatcaattaatggcttttaatatattgtattatgg

SEQ ID NO: 25732 - protein, 101 aa, Arabidopsis thaliana
  peptide (1)..(101): Ceres Seq. ID no. 12321142
  misc_feature (55)..(101): Pfam Name: Gamma-thionins family Pfam Description: Gamma-thionins family
  misc_feature (25)..(101): Homolog of NCBI NO: 17066707 NR Description: defensin protein precursor [Capsicum annuum]
  misc_feature (25)..(101): Homolog of NCBI NO: 16225423 NR Description: putative gamma-thionin [Castanea sativa]
  misc_feature (25)..(101): Homolog of NCBI NO: 28624546 NR Description: defensin protein 1 [Prunus persica]
  misc_feature (25)..(101): Homolog of NCBI NO: 11387188 NR Description: Flower-specific gamma-thionin precursor (Defensin
  misc_feature (25)..(101): Homolog of NCBI NO: 22330359 NR Description: plant defensin protein, putative (PDF2.4)
  misc_feature (25)..(101): Homolog of NCBI NO: 21553559 NR Description: protease inhibitor II [Arabidopsis thaliana]
  misc_feature (25)..(101): Homolog of NCBI NO: 15226876 NR Description: plant defensin protein, putative (PDF2.1)
  misc_feature (25)..(101): Homolog of NCBI NO: 15226872 NR Description: plant defensin protein, putative (PDF2.2)
  misc_feature (25)..(101): Homolog of NCBI NO: 7488534 NR Description: proteinase inhibitor II - turnip
  misc_feature (25)..(101): Homolog of NCBI NO: 15226878 NR Description: plant defensin protein, putative (PDF2.3)
TSSLAFYSLHTYHFFRNLSLSLSKMKLSVRFISAALLLFMVFIATGMGPVTVEARTCESKSHRFKGPCVSTHNCANVCHNEGFGGGKCRGFRRRCYCTRHC

SEQ ID NO: 25733 - protein, 77 aa, Arabidopsis thaliana
  peptide (1)..(77): Ceres Seq. ID no. 12321143
  misc_feature (31)..(77): Pfam Name: Gamma-thionins family Pfam Description: Gamma-thionins family
  misc_feature (1)..(77): Homolog of NCBI NO: 17066707 NR Description: defensin protein precursor [Capsicum annuum]
  misc_feature (1)..(77): Homolog of NCBI NO: 16225423 NR Description: putative gamma-thionin [Castanea sativa]
  misc_feature (1)..(77): Homolog of NCBI NO: 28624546 NR Description: defensin protein 1 [Prunus persica]
  misc_feature (1)..(77): Homolog of NCBI NO: 11387188 NR Description: Flower-specific gamma-thionin precursor (Defensin
  misc_feature (1)..(77): Homolog of NCBI NO: 22330359 NR Description: plant defensin protein, putative (PDF2.4)
  misc_feature (1)..(77): Homolog of NCBI NO: 21553559 NR Description: protease inhibitor II [Arabidopsis thaliana]
  misc_feature (1)..(77): Homolog of NCBI NO: 15226876 NR Description: plant defensin protein, putative (PDF2.1)
  misc_feature (1)..(77): Homolog of NCBI NO: 15226872 NR Description: plant defensin protein, putative (PDF2.2)
  misc_feature (1)..(77): Homolog of NCBI NO: 7488534 NR Description: proteinase inhibitor II - turnip
  misc_feature (1)..(77): Homolog of NCBI NO: 15226878 NR Description: plant defensin protein, putative (PDF2.3)
MKLSVRFISAALLLFMVFIATGMGPVTVEARTCESKSHRFKGPCVSTHNCANVCHNEGFGGGKCRGFRRRCYCTRHC

SEQ ID NO: 25734 - protein, 62 aa, Arabidopsis thaliana
  peptide (1)..(62): Ceres Seq. ID no. 12321144
  misc_feature (16)..(62): Pfam Name: Gamma-thionins family Pfam Description: Gamma-thionins family
  misc_feature (1)..(62): Homolog of NCBI NO: 17066707 NR Description: defensin protein precursor [Capsicum annuum]
  misc_feature (1)..(62): Homolog of NCBI NO: 16225423 NR Description: putative gamma-thionin [Castanea sativa]
  misc_feature (1)..(62): Homolog of NCBI NO: 28624546 NR Description: defensin protein 1 [Prunus persica]
  misc_feature (1)..(62): Homolog of NCBI NO: 11387188 NR Description: Flower-specific gamma-thionin precursor (Defensin
  misc_feature (1)..(62): Homolog of NCBI NO: 22330359 NR Description: plant defensin protein, putative (PDF2.4)
  misc_feature (1)..(62): Homolog of NCBI NO: 21553559 NR Description: protease inhibitor II [Arabidopsis thaliana]
  misc_feature (1)..(62): Homolog of NCBI NO: 15226876 NR Description: plant defensin protein, putative (PDF2.1)
  misc_feature (1)..(62): Homolog of NCBI NO: 15226872 NR Description: plant defensin protein, putative (PDF2.2)
  misc_feature (1)..(62): Homolog of NCBI NO: 7488534 NR Description: proteinase inhibitor II - turnip
  misc_feature (1)..(62): Homolog of NCBI NO: 15226878 NR Description: plant defensin protein, putative (PDF2.3)
MVFIATGMGPVTVEARTCESKSHRFKGPCVSTHNCANVCHNEGFGGGKCRGFRRRCYCTRHC

SEQ ID NO: 25735 - DNA, 1032 bp, Arabidopsis thaliana
  misc_feature (1)..(1032): Ceres Seq. ID no. 13493740
  misc_feature: MA Experiment ID: 108576 Result: Up-regulated in Transcription
  misc_feature: MA Experiment 108576 PARAMETER Experiment Name: At_42deg_Heat_cDNA_P Parameter: Temperature (deg C) Value: 42 vs. 22
  misc_feature: MA Experiment 108576 PARAMETER Experiment Name: At_42deg_Heat_cDNA_P Parameter: Timepoint (hr) Value: 1
  misc_feature: MA Experiment 108576 PARAMETER Experiment Name: At_42deg_Heat_cDNA_P Parameter: Tissue Value: Aerial
  misc_feature: MA Experiment ID: 108577 Result: Up-regulated in Transcription
  misc_feature: MA Experiment 108577 PARAMETER Experiment Name: At_42deg_Heat_cDNA_P Parameter: Temperature (deg C) Value: 42 vs. 22
  misc_feature: MA Experiment 108577 PARAMETER Experiment Name: At_42deg_Heat_cDNA_P Parameter: Timepoint (hr) Value: 6
  misc_feature: MA Experiment 108577 PARAMETER Experiment Name: At_42deg_Heat_cDNA_P Parameter: Tissue Value: Aerial
  misc_feature: MA Experiment ID: 20000093 Result: Up-regulated in Transcription
  misc_feature: MA Experiment 20000093 PARAMETER Experiment Name: At_42deg_Heat_cDNA_P Parameter: Temperature (deg C) Value: 42 vs. 22
  misc_feature: MA Experiment 20000093 PARAMETER Experiment Name: At_42deg_Heat_cDNA_P Parameter: Timepoint (hr) Value: 0.5
  misc_feature: MA Experiment 20000093 PARAMETER Experiment Name: At_42deg_Heat_cDNA_P Parameter: Tissue Value: Aerial
  misc_feature: MA Experiment ID: 20000111 Result: Up-regulated in Transcription
  misc_feature: MA Experiment 20000111 PARAMETER Experiment Name: At_42deg_Heat_cDNA_P Parameter: Temperature (deg C) Value: 42 vs. 22
  misc_feature: MA Experiment 20000111 PARAMETER Experiment Name: At_42deg_Heat_cDNA_P Parameter: Timepoint (hr) Value: 6
  misc_feature: MA Experiment 20000111 PARAMETER Experiment Name: At_42deg_Heat_cDNA_P Parameter: Tissue Value: Aerial
  misc_feature: MA Experiment ID: 20000112 Result: Up-regulated in Transcription
  misc_feature: MA Experiment 20000112 PARAMETER Experiment Name: At_42deg_Heat_cDNA_P Parameter: Temperature (deg C) Value: 42 vs. 22
  misc_feature: MA Experiment 20000112 PARAMETER Experiment Name: At_42deg_Heat_cDNA_P Parameter: Timepoint (hr) Value: 2
  misc_feature: MA Experiment 20000112 PARAMETER Experiment Name: At_42deg_Heat_cDNA_P Parameter: Tissue Value: Aerial
  misc_feature: MA Experiment ID: 20000113 Result: Up-regulated in Transcription
  misc_feature: MA Experiment 20000113 PARAMETER Experiment Name: At_42deg_Heat_cDNA_P Parameter: Temperature (deg C) Value: 42 vs. 22
  misc_feature: MA Experiment 20000113 PARAMETER Experiment Name: At_42deg_Heat_cDNA_P Parameter: Timepoint (hr) Value: 8
  misc_feature: MA Experiment 20000113 PARAMETER Experiment Name: At_42deg_Heat_cDNA_P Parameter: Tissue Value: Aerial
  misc_feature: MA Experiment ID: 20000144 Result: Up-regulated in Transcription
  misc_feature: MA Experiment 20000144 PARAMETER Experiment Name: At_42deg_Heat_cDNA_P Parameter: Temperature (deg C) Value: 42 vs. 22
  misc_feature: MA Experiment 20000144 PARAMETER Experiment Name: At_42deg_Heat_cDNA_P Parameter: Timepoint (hr) Value: 1
  misc_feature: MA Experiment 20000144 PARAMETER Experiment Name: At_42deg_Heat_cDNA_P Parameter: Tissue Value: Aerial
  misc_feature: MA Experiment ID: 20000171 Result: Up-regulated in Transcription
  misc_feature: MA Experiment 20000171 PARAMETER Experiment Name: At_42deg_Heat_P Parameter: Age (day) Value: 14
  misc_feature: MA Experiment 20000171 PARAMETER Experiment Name: At_42deg_Heat_P Parameter: Organism Value: A. thaliana
  misc_feature: MA Experiment 20000171 PARAMETER Experiment Name: At_42deg_Heat_P Parameter: Plant Line Value: WS
  misc_feature: MA Experiment 20000171 PARAMETER Experiment Name: At_42deg_Heat_P Parameter: Temperature (deg C) Value: 42 vs. 22
  misc_feature: MA Experiment 20000171 PARAMETER Experiment Name: At_42deg_Heat_P Parameter: Timepoint (hr) Value: 1
  misc_feature: MA Experiment 20000171 PARAMETER Experiment Name: At_42deg_Heat_P Parameter: Tissue Value: Aerial
  misc_feature: MA Experiment ID: 20000173 Result: Up-regulated in Transcription
  misc_feature: MA Experiment 20000173 PARAMETER Experiment Name: At_42deg_Heat_P Parameter: Age (day) Value: 14
  misc_feature: MA Experiment 20000173 PARAMETER Experiment Name: At_42deg_Heat_P Parameter: Organism Value: A. thaliana
  misc_feature: MA Experiment 20000173 PARAMETER Experiment Name: At_42deg_Heat_P Parameter: Plant Line Value: WS
  misc_feature: MA Experiment 20000173 PARAMETER Experiment Name: At_42deg_Heat_P Parameter: Temperature (deg C) Value: 42 vs. 22
  misc_feature: MA Experiment 20000173 PARAMETER Experiment Name: At_42deg_Heat_P Parameter: Timepoint (hr) Value: 6
  misc_feature: MA Experiment 20000173 PARAMETER Experiment Name: At_42deg_Heat_P Parameter: Tissue Value: Aerial
aagaataaaccgcgtcgcgtctcttttctggaaaaaacgagaaactgtgatcttggcccttttattacccctatcctcttcttcttcaatctctccgatcaaaatccttttaagctctgtagacccaggttacgcagagaagaagaacagaacaaggaattatataatcattggcttgatcaatctgaattgcagttcatggcgctaaaccctcaattactacccaatgggatgcctgttccctttgttaatgaaatgttcgtcctagtccgagatggtgttgagtttgaagtcgacaagatccctggagggcatggaggtcatgttaaggccaagggggtgatttacttgtctaatatacggatggtctttgtttcaagcaagcctgttgacaactttgttgcttttgacatgcccctgctttacatccatgccgagaaatttaatcagccaatatttcactgcaacaatattgctggacaagtggagcctgtggtgccagaaaatgagcatagagctctatattcaacacacagtttcaagatcctatttaaggaaggtggttgtgggacatttgttcctctcttcttgaatctcatatcatcagtgagacaatacaacagacaaatgcaacaagcagcagaagcagcagcggcagctcctcatgttgatcctcttcaagccgctcagacacctgtggacgaaatgatgagacatgcgtacgtggaccctaatgatccaacgaggatatatctgcaacagccatcaggggaatctcagttgaggcgtagagcttaccattcgggtgcggcggaacattgagatacacggaaaaaaaaaatacaaaggctatgaatacagaaacagcaacagattagtgttgctaataagcaaaacgtgttgtttgtttgtttaaagttgaaaactaaaagtctaaaaccatctgtgtaaagaaagatgagacttgtttggtgtgtggatgtatctggtaaaattggagtcgtaataatcataagtttggtttatatattg

SEQ ID NO: 25736 - protein, 273 aa, Arabidopsis thaliana
  peptide (1)..(273): Ceres Seq. ID no. 13493741
  misc_feature (67)..(210): Homolog of NCBI NO: 23619609 NR Description: hypothetical protein [Plasmodium falciparum 3D7]
  misc_feature (67)..(205): Homolog of NCBI NO: 23479181 NR Description: arabinogalactan protein [Plasmodium yoelii yoelii]
  misc_feature (67)..(273): Homolog of NCBI NO: 15239148 NR Description: expressed protein [Arabidopsis thaliana]
KNKPRRVSFLEKTRNCDLGPFITPILFFFNLSDQNPFKLCRPRLRREEEQNKELYNHWLDQSELQFMALNPQLLPNGMPVPFVNEMFVLVRDGVEFEVDKIPGGHGGHVKAKGVIYLSNIRMVFVSSKPVDNFVAFDMPLLYIHAEKFNQPIFHCNNIAGQVEPVVPENEHRALYSTHSFKILFKEGGCGTFVPLFLNLISSVRQYNRQMQQAAEAAAAAPHVDPLQAAQTPVDEMMRHAYVDPNDPTRIYLQQPSGESQLRRRAYHSGAAEH

SEQ ID NO: 25737 - protein, 207 aa, Arabidopsis thaliana
  peptide (1)..(207): Ceres Seq. ID no. 13493742
  misc_feature (1)..(144): Homolog of NCBI NO: 23619609 NR Description: hypothetical protein [Plasmodium falciparum 3D7]
  misc_feature (1)..(139): Homolog of NCBI NO: 23479181 NR Description: arabinogalactan protein [Plasmodium yoelii yoelii]
  misc_feature (1)..(207): Homolog of NCBI NO: 15239148 NR Description: expressed protein [Arabidopsis thaliana]
MALNPQLLPNGMPVPFVNEMFVLVRDGVEFEVDKIPGGHGGHVKAKGVIYLSNIRMVFVSSKPVDNFVAFDMPLLYIHAEKFNQPIFHCNNIAGQVEPVVPENEHRALYSTHSFKILFKEGGCGTFVPLFLNLISSVRQYNRQMQQAAEAAAAAPHVDPLQAAQTPVDEMMRHAYVDPNDPTRIYLQQPSGESQLRRRAYHSGAAEH

SEQ ID NO: 25738 - protein, 196 aa, Arabidopsis thaliana
  peptide (1)..(196): Ceres Seq. ID no. 13493743
  misc_feature (1)..(133): Homolog of NCBI NO: 23619609 NR Description: hypothetical protein [Plasmodium falciparum 3D7]
  misc_feature (1)..(128): Homolog of NCBI NO: 23479181 NR Description: arabinogalactan protein [Plasmodium yoelii yoelii]
  misc_feature (1)..(196): Homolog of NCBI NO: 15239148 NR Description: expressed protein [Arabidopsis thaliana]
MPVPFVNEMFVLVRDGVEFEVDKIPGGHGGHVKAKGVIYLSNIRMVFVSSKPVDNFVAFDMPLLYIHAEKFNQPIFHCNNIAGQVEPVVPENEHRALYSTHSFKILFKEGGCGTFVPLFLNLISSVRQYNRQMQQAAEAAAAAPHVDPLQAAQTPVDEMMRHAYVDPNDPTRIYLQQPSGESQLRRRAYHSGAAEH

SEQ ID NO: 25739 - DNA, 1320 bp, Arabidopsis thaliana
  misc_feature (1)..(1320): Ceres Seq. ID no. 12345026
  misc_feature: MA Experiment ID: 108595 Result: Down-regulated in Transcription
  misc_feature: MA Experiment 108595 PARAMETER Experiment Name: At_Ler-pi_Ovule_cDNA_P Parameter: Plant Line Value: null
  misc_feature: MA Experiment ID: 20000184 Result: Up-regulated in Transcription
  misc_feature: MA Experiment 20000184 PARAMETER Experiment Name: At_Shoots__P Parameter: Age (day) Value: 7
  misc_feature: MA Experiment 20000184 PARAMETER Experiment Name: At_Shoots__P Parameter: Tissue Value: Shoots vs. Whole Plant
  misc_feature: MA Experiment ID: 20000185 Result: Up-regulated in Transcription
  misc_feature: MA Experiment 20000185 PARAMETER Experiment Name: At_Roots__P Parameter: Age (day) Value: 7 vs. 21
  misc_feature: MA Experiment 20000185 PARAMETER Experiment Name: At_Roots__P Parameter: Organism Value: A. thaliana
  misc_feature: MA Experiment 20000185 PARAMETER Experiment Name: At_Roots__P Parameter: Tissue Value: Roots vs. Whole Plant
  misc_feature: MA Experiment ID: 20000227 Result: Up-regulated in Transcription
  misc_feature: MA Experiment 20000227 PARAMETER Experiment Name: At_Root-Tips-vs-Tops_P Parameter: Tissue Value: Root Tips vs. Root Tops
  misc_feature: MA Experiment ID: 20000234 Result: Up-regulated in Transcription
  misc_feature: MA Experiment 20000234 PARAMETER Experiment Name: At_Siliques_P Parameter: Age (day) Value: 21
  misc_feature: MA Experiment 20000234 PARAMETER Experiment Name: At_Siliques_P Parameter: Organism Value: A. thaliana
  misc_feature: MA Experiment 20000234 PARAMETER Experiment Name: At_Siliques_P Parameter: Plant Line Value: WS
  misc_feature: MA Experiment 20000234 PARAMETER Experiment Name: At_Siliques_P Parameter: Tissue Value: Less Than 5mm Siliques vs. Whole Plant
  misc_feature: MA Experiment ID: 20000264 Result: Up-regulated in Transcription
  misc_feature: MA Experiment 20000264 PARAMETER Experiment Name: At_Open_Flower_P Parameter: Age (day) Value: 21
  misc_feature: MA Experiment 20000264 PARAMETER Experiment Name: At_Open_Flower_P Parameter: Plant Line Value: WS
  misc_feature: MA Experiment 20000264 PARAMETER Experiment Name: At_Open_Flower_P Parameter: Tissue Value: Open Flower vs. Whole Plant
  misc_feature: MA Experiment ID: 20000265 Result: Up-regulated in Transcription
  misc_feature: MA Experiment 20000265 PARAMETER Experiment Name: At_Open_Flower_P Parameter: Age (day) Value: 21
  misc_feature: MA Experiment 20000265 PARAMETER Experiment Name: At_Open_Flower_P Parameter: Plant Line Value: WS
  misc_feature: MA Experiment 20000265 PARAMETER Experiment Name: At_Open_Flower_P Parameter: Tissue Value: Closed Flower vs. Whole Plant
  misc_feature: MA Experiment ID: 20000286 Result: Up-regulated in Transcription
  misc_feature: MA Experiment 20000286 PARAMETER Experiment Name: At_Open_Flower_P Parameter: Age (day) Value: 21
  misc_feature: MA Experiment 20000286 PARAMETER Experiment Name: At_Open_Flower_P Parameter: Plant Line Value: WS
  misc_feature: MA Experiment 20000286 PARAMETER Experiment Name: At_Open_Flower_P Parameter: Tissue Value: Half Open vs. Whole Plant
  misc_feature: MA Experiment ID: 20000439 Result: Up-regulated in Transcription
  misc_feature: MA Experiment 20000439 PARAMETER Experiment Name: At_Roots__P Parameter: Age (day) Value: 14 vs. 21
  misc_feature: MA Experiment 20000439 PARAMETER Experiment Name: At_Roots__P Parameter: Organism Value: A. thaliana
  misc_feature: MA Experiment 20000439 PARAMETER Experiment Name: At_Roots__P Parameter: Tissue Value: Roots vs. Whole Plant
  misc_feature: MA Experiment ID: 20000441 Result: Down-regulated in Transcription
  misc_feature: MA Experiment 20000441 PARAMETER Experiment Name: At_1uM_BR-BRZ__P Parameter: Tissue Value: Shoot Apices
  misc_feature: MA Experiment 20000441 PARAMETER Experiment Name: At_1uM_BR-BRZ__P Parameter: Treatment Value: 1uM BR vs. No Treatment
  misc_feature: MA Experiment ID: 20000527 Result: Down-regulated in Transcription
  misc_feature: MA Experiment 20000527 PARAMETER Experiment Name: At_10percent_PEG_P Parameter: Age (day) Value: 20
  misc_feature: MA Experiment 20000527 PARAMETER Experiment Name: At_10percent_PEG_P Parameter: Organism Value: A. thaliana
  misc_feature: MA Experiment 20000527 PARAMETER Experiment Name: At_10percent_PEG_P Parameter: Plant Line Value: WS
  misc_feature: MA Experiment 20000527 PARAMETER Experiment Name: At_10percent_PEG_P Parameter: Timepoint (day) Value: 20
  misc_feature: MA Experiment 20000527 PARAMETER Experiment Name: At_10percent_PEG_P Parameter: Tissue Value: Whole Plant
  misc_feature: MA Experiment 20000527 PARAMETER Experiment Name: At_10percent_PEG_P Parameter: Treatment Value: 10percent PEG vs. No Treatment
  misc_feature: MA Experiment ID: 20001451 Result: Down-regulated in Transcription
  misc_feature: MA Experiment 20001451 PARAMETER Experiment Name: At_Far-red-induction_P Parameter: Age (day) Value: 7
  misc_feature: MA Experiment 20001451 PARAMETER Experiment Name: At_Far-red-induction_P Parameter: Light Value: Far-red vs. White
  misc_feature: MA Experiment 20001451 PARAMETER Experiment Name: At_Far-red-induction_P Parameter: Organism Value: A. thaliana
  misc_feature: MA Experiment 20001451 PARAMETER Experiment Name: At_Far-red-induction_P Parameter: Plant Line Value: Columbia
  misc_feature: MA Experiment 20001451 PARAMETER Experiment Name: At_Far-red-induction_P Parameter: Timepoint (hr) Value: 24
  misc_feature: MA Experiment 20001451 PARAMETER Experiment Name: At_Far-red-induction_P Parameter: Tissue Value: Whole Plant
  misc_feature: MA Experiment ID: 20001558 Result: Up-regulated in Transcription
  misc_feature: MA Experiment 20001558 PARAMETER Experiment Name: At_Drought_Soil_Dry_P Parameter: Age (day) Value: 27
  misc_feature: MA Experiment 20001558 PARAMETER Experiment Name: At_Drought_Soil_Dry_P Parameter: Organism Value: A. thaliana
  misc_feature: MA Experiment 20001558 PARAMETER Experiment Name: At_Drought_Soil_Dry_P Parameter: Plant Line Value: WS
  misc_feature: MA Experiment 20001558 PARAMETER Experiment Name: At_Drought_Soil_Dry_P Parameter: Post Timepoint (hr) Value: 6
  misc_feature: MA Experiment 20001558 PARAMETER Experiment Name: At_Drought_Soil_Dry_P Parameter: Post-Treatment Value: Re-Water vs. No Drought
  misc_feature: MA Experiment 20001558 PARAMETER Experiment Name: At_Drought_Soil_Dry_P Parameter: Timepoint (day) Value: 13
  misc_feature: MA Experiment 20001558 PARAMETER Experiment Name: At_Drought_Soil_Dry_P Parameter: Treatment Value: Drought vs. No Drought
  misc_feature: MA Experiment ID: 20001560 Result: Up-regulated in Transcription
  misc_feature: MA Experiment 20001560 PARAMETER Experiment Name: At_Drought_Soil_Dry_P Parameter: Age (day) Value: 28
  misc_feature: MA Experiment 20001560 PARAMETER Experiment Name: At_Drought_Soil_Dry_P Parameter: Organism Value: A. thaliana
  misc_feature: MA Experiment 20001560 PARAMETER Experiment Name: At_Drought_Soil_Dry_P Parameter: Plant Line Value: WS
  misc_feature: MA Experiment 20001560 PARAMETER Experiment Name: At_Drought_Soil_Dry_P Parameter: Post Timepoint (hr) Value: None
  misc_feature: MA Experiment 20001560 PARAMETER Experiment Name: At_Drought_Soil_Dry_P Parameter: Post-Treatment Value: None
  misc_feature: MA Experiment 20001560 PARAMETER Experiment Name: At_Drought_Soil_Dry_P Parameter: Timepoint (day) Value: 14
  misc_feature: MA Experiment 20001560 PARAMETER Experiment Name: At_Drought_Soil_Dry_P Parameter: Treatment Value: Drought vs. No Drought
aacaacaacaacaacaatgtcttcttctctccgatctaccaccgccgcttctcttctcctccgctcctcctcctcctcctccagatccactctcactctctccgcttcctcctctctctccttcgtcagatctctcgtctcttctccacgtctctcttcttcttcacccctctctcagaagaaatgtcgaattgcgtcggtgaatcggagtttcaactccaccaccgccgctactaaatcttcatcttcagatcctgatcagttgaagaacgctagagaagatatcaaagagcttctcagcaccaaattctgccatccgattttggttagattaggttggcatgatgctggtacgtataacaagaacattaaggaatggccacaaagaggtggagctaatggaagtttgagattcgatattgagcttaaacatgctgctaatgctggtcttgtgaatgctttaaacttgattaaggatatcaaagagaaatactctgggatcagttatgctgatttgttccagttagctagtgctactgctatagaggaagctggaggaccgaaaataccgatgaaatatggtagagttgatgcctctggtcctgaggattgtccagaagaaggaaggcttccagatgctggtcctccttcacctgctactcatctcagagaagttttttacagaatgggattagatgacaaggacatagttgcattatctggtgctcacacgttaggaagatctaggccagaacgtagtggttgggggaagcctgagacgaagtacacgaaagaaggacctggagcaccaggaggacagtcatggacaccagagtggctaaagtttgataattcgtacttcaaggagatcaaggaaaagagagatgaagatctccttgtcctacccactgatgctgccatcttcgaagattcttctttcaaggtctatgctgaaaagtatgctgcagatcaggatgcatttttcaaggattacgctgtagcgcatgcgaaactcagcaatcttggcgcagaatttaaccctccggagggtatcattatctaatggggcacctaatttactcaaccagacttatgattttagagaaacgtagttcaataatgaaagagaagaaaaagttgacggagaacttttcatgcgagtacttttcgagataccttttggacaaatgtttctggctgttcaaaggattttgtttagccgaaagtatttgatcgttttcatggttttgtgctttcatgtttttttcttgtaataaattgcggaagtgattatccaaaatctatacaaattttgtctgg

SEQ ID NO: 25740 - protein, 353 aa, Arabidopsis thaliana
  peptide (1)..(353): Ceres Seq. ID no. 12345027
  misc_feature (91)..(323): Pfam Name: Peroxidase Pfam Description: Peroxidase
  misc_feature (5)..(353): Homolog of NCBI NO: 4996602 NR Description: thylakoid-bound ascorbate peroxidase [Nicotiana
  misc_feature (3)..(350): Homolog of NCBI NO: 7484621 NR Description: L-ascorbate peroxidase (EC 1.11.1.11) precursor -
  misc_feature (3)..(350): Homolog of NCBI NO: 3202026 NR Description: stromal L-ascorbate peroxidase precursor
  misc_feature (6)..(353): Homolog of NCBI NO: 2832921 NR Description: stromal ascorbate peroxidase [Spinacia oleracea]
  misc_feature (6)..(353): Homolog of NCBI NO: 2832920 NR Description: thylakoid-bound ascorbate peroxidase [Spinacia
  misc_feature (6)..(353): Homolog of NCBI NO: 1944507 NR Description: thylakoid-bound ascorbate peroxidase [Spinacia
  misc_feature (6)..(353): Homolog of NCBI NO: 1369920 NR Description: stromal ascorbate peroxidase [Spinacia oleracea]
  misc_feature (1)..(353): Homolog of NCBI NO: 2146725 NR Description: L-ascorbate peroxidase (EC 1.11.1.11) precursor -
  misc_feature (1)..(353): Homolog of NCBI NO: 15236483 NR Description: stromal ascorbate peroxidase, putative (sAPX)
  misc_feature (1)..(353): Homolog of NCBI NO: 1419388 NR Description: stromal ascorbate peroxidase [Arabidopsis
TTTTTMSSSLRSTTAASLLLRSSSSSSRSTLTLSASSSLSFVRSLVSSPRLSSSSPLSQKKCRIASVNRSFNSTTAATKSSSSDPDQLKNAREDIKELLSTKFCHPILVRLGWHDAGTYNKNIKEWPQRGGANGSLRFDIELKHAANAGLVNALNLIKDIKEKYSGISYADLFQLASATAIEEAGGPKIPMKYGRVDASGPEDCPEEGRLPDAGPPSPATHLREVFYRMGLDDKDIVALSGAHTLGRSRPERSGWGKPETKYTKEGPGAPGGQSWTPEWLKFDNSYFKEIKEKRDEDLLVLPTDAAIFEDSSFKVYAEKYAADQDAFFKDYAVAHAKLSNLGAEFNPPEGIII

SEQ ID NO: 25741 - protein, 348 aa, Arabidopsis thaliana
  peptide (1)..(348): Ceres Seq. ID no. 12345028
  misc_feature (86)..(318): Pfam Name: Peroxidase Pfam Description: Peroxidase
  misc_feature (1)..(348): Homolog of NCBI NO: 4996602 NR Description: thylakoid-bound ascorbate peroxidase [Nicotiana
  misc_feature (1)..(345): Homolog of NCBI NO: 7484621 NR Description: L-ascorbate peroxidase (EC 1.11.1.11) precursor -
  misc_feature (1)..(345): Homolog of NCBI NO: 3202026 NR Description: stromal L-ascorbate peroxidase precursor
  misc_feature (1)..(348): Homolog of NCBI NO: 2832921 NR Description: stromal ascorbate peroxidase [Spinacia oleracea]
  misc_feature (1)..(348): Homolog of NCBI NO: 2832920 NR Description: thylakoid-bound ascorbate peroxidase [Spinacia
  misc_feature (1)..(348): Homolog of NCBI NO: 1944507 NR Description: thylakoid-bound ascorbate peroxidase [Spinacia
  misc_feature (1)..(348): Homolog of NCBI NO: 1369920 NR Description: stromal ascorbate peroxidase [Spinacia oleracea]
  misc_feature (1)..(348): Homolog of NCBI NO: 2146725 NR Description: L-ascorbate peroxidase (EC 1.11.1.11) precursor -
  misc_feature (1)..(348): Homolog of NCBI NO: 15236483 NR Description: stromal ascorbate peroxidase, putative (sAPX)
  misc_feature (1)..(348): Homolog of NCBI NO: 1419388 NR Description: stromal ascorbate peroxidase [Arabidopsis
MSSSLRSTTAASLLLRSSSSSSRSTLTLSASSSLSFVRSLVSSPRLSSSSPLSQKKCRIASVNRSFNSTTAATKSSSSDPDQLKNAREDIKELLSTKFCHPILVRLGWHDAGTYNKNIKEWPQRGGANGSLRFDIELKHAANAGLVNALNLIKDIKEKYSGISYADLFQLASATAIEEAGGPKIPMKYGRVDASGPEDCPEEGRLPDAGPPSPATHLREVFYRMGLDDKDIVALSGAHTLGRSRPERSGWGKPETKYTKEGPGAPGGQSWTPEWLKFDNSYFKEIKEKRDEDLLVLPTDAAIFEDSSFKVYAEKYAADQDAFFKDYAVAHAKLSNLGAEFNPPEGIII

SEQ ID NO: 25742 - DNA, 1146 bp, Arabidopsis thaliana
  misc_feature (1)..(1146): Ceres Seq. ID no. 12371428
  misc_feature: MA Experiment ID: 108434 Result: Up-regulated in Transcription
  misc_feature: MA Experiment 108434 PARAMETER Experiment Name: At_Root_Tips_cDNA_P Parameter: Tissue Value: Root Tips
  misc_feature: MA Experiment ID: 108461 Result: Down-regulated in Transcription
  misc_feature: MA Experiment 108461 PARAMETER Experiment Name: At_Germinating_Seeds_cDNA_P Parameter: Age (day) Value: 1 vs. 0
  misc_feature: MA Experiment 108461 PARAMETER Experiment Name: At_Germinating_Seeds_cDNA_P Parameter: Tissue Value: Germinating Seeds
  misc_feature: MA Experiment ID: 108462 Result: Down-regulated in Transcription
  misc_feature: MA Experiment 108462 PARAMETER Experiment Name: At_Germinating_Seeds_cDNA_P Parameter: Age (day) Value: 2 vs. 0
  misc_feature: MA Experiment 108462 PARAMETER Experiment Name: At_Germinating_Seeds_cDNA_P Parameter: Tissue Value: Germinating Seeds
  misc_feature: MA Experiment ID: 108463 Result: Down-regulated in Transcription
  misc_feature: MA Experiment 108463 PARAMETER Experiment Name: At_Germinating_Seeds_cDNA_P Parameter: Age (day) Value: 3 vs. 0
  misc_feature: MA Experiment 108463 PARAMETER Experiment Name: At_Germinating_Seeds_cDNA_P Parameter: Tissue Value: Germinating Seeds
  misc_feature: MA Experiment ID: 108464 Result: Down-regulated in Transcription
  misc_feature: MA Experiment 108464 PARAMETER Experiment Name: At_Germinating_Seeds_cDNA_P Parameter: Age (day) Value: 4 vs. 0
  misc_feature: MA Experiment 108464 PARAMETER Experiment Name: At_Germinating_Seeds_cDNA_P Parameter: Tissue Value: Germinating Seeds
  misc_feature: MA Experiment ID: 108573 Result: Down-regulated in Transcription
  misc_feature: MA Experiment 108573 PARAMETER Experiment Name: At_Drought_cDNA_P Parameter: Timepoint (hr) Value: 6
  misc_feature: MA Experiment 108573 PARAMETER Experiment Name: At_Drought_cDNA_P Parameter: Tissue Value: Aerial
  misc_feature: MA Experiment 108573 PARAMETER Experiment Name: At_Drought_cDNA_P Parameter: Treatment Value: Drought vs. No Drought
  misc_feature: MA Experiment ID: 20000090 Result: Up-regulated in Transcription
  misc_feature: MA Experiment ID: 20000111 Result: Up-regulated in Transcription
  misc_feature: MA Experiment 20000111 PARAMETER Experiment Name: At_42deg_Heat_cDNA_P Parameter: Temperature (deg C) Value: 42 vs. 22
  misc_feature: MA Experiment 20000111 PARAMETER Experiment Name: At_42deg_Heat_cDNA_P Parameter: Timepoint (hr) Value: 6
  misc_feature: MA Experiment 20000111 PARAMETER Experiment Name: At_42deg_Heat_cDNA_P Parameter: Tissue Value: Aerial
  misc_feature: MA Experiment ID: 20000113 Result: Up-regulated in Transcription
  misc_feature: MA Experiment 20000113 PARAMETER Experiment Name: At_42deg_Heat_cDNA_P Parameter: Temperature (deg C) Value: 42 vs. 22
  misc_feature: MA Experiment 20000113 PARAMETER Experiment Name: At_42deg_Heat_cDNA_P Parameter: Timepoint (hr) Value: 8
  misc_feature: MA Experiment 20000113 PARAMETER Experiment Name: At_42deg_Heat_cDNA_P Parameter: Tissue Value: Aerial
  misc_feature: MA Experiment ID: 20000171 Result: Up-regulated in Transcription
  misc_feature: MA Experiment 20000171 PARAMETER Experiment Name: At_42deg_Heat_P Parameter: Age (day) Value: 14
  misc_feature: MA Experiment 20000171 PARAMETER Experiment Name: At_42deg_Heat_P Parameter: Organism Value: A. thaliana
  misc_feature: MA Experiment 20000171 PARAMETER Experiment Name: At_42deg_Heat_P Parameter: Plant Line Value: WS
  misc_feature: MA Experiment 20000171 PARAMETER Experiment Name: At_42deg_Heat_P Parameter: Temperature (deg C) Value: 42 vs. 22
  misc_feature: MA Experiment 20000171 PARAMETER Experiment Name: At_42deg_Heat_P Parameter: Timepoint (hr) Value: 1
  misc_feature: MA Experiment 20000171 PARAMETER Experiment Name: At_42deg_Heat_P Parameter: Tissue Value: Aerial
  misc_feature: MA Experiment ID: 20000173 Result: Up-regulated in Transcription
  misc_feature: MA Experiment 20000173 PARAMETER Experiment Name: At_42deg_Heat_P Parameter: Age (day) Value: 14
  misc_feature: MA Experiment 20000173 PARAMETER Experiment Name: At_42deg_Heat_P Parameter: Organism Value: A. thaliana
  misc_feature: MA Experiment 20000173 PARAMETER Experiment Name: At_42deg_Heat_P Parameter: Plant Line Value: WS
  misc_feature: MA Experiment 20000173 PARAMETER Experiment Name: At_42deg_Heat_P Parameter: Temperature (deg C) Value: 42 vs. 22
  misc_feature: MA Experiment 20000173 PARAMETER Experiment Name: At_42deg_Heat_P Parameter: Timepoint (hr) Value: 6
  misc_feature: MA Experiment 20000173 PARAMETER Experiment Name: At_42deg_Heat_P Parameter: Tissue Value: Aerial
  misc_feature: MA Experiment ID: 20001558 Result: Up-regulated in Transcription
  misc_feature: MA Experiment 20001558 PARAMETER Experiment Name: At_Drought_Soil_Dry_P Parameter: Age (day) Value: 27
  misc_feature: MA Experiment 20001558 PARAMETER Experiment Name: At_Drought_Soil_Dry_P Parameter: Organism Value: A. thaliana
  misc_feature: MA Experiment 20001558 PARAMETER Experiment Name: At_Drought_Soil_Dry_P Parameter: Plant Line Value: WS
  misc_feature: MA Experiment 20001558 PARAMETER Experiment Name: At_Drought_Soil_Dry_P Parameter: Post Timepoint (hr) Value: 6
  misc_feature: MA Experiment 20001558 PARAMETER Experiment Name: At_Drought_Soil_Dry_P Parameter: Post-Treatment Value: Re-Water vs. No Drought
  misc_feature: MA Experiment 20001558 PARAMETER Experiment Name: At_Drought_Soil_Dry_P Parameter: Timepoint (day) Value: 13
  misc_feature: MA Experiment 20001558 PARAMETER Experiment Name: At_Drought_Soil_Dry_P Parameter: Treatment Value: Drought vs. No Drought
  misc_feature: MA Experiment ID: 20001757 Result: Up-regulated in Transcription
  misc_feature: MA Experiment 20001757 PARAMETER Experiment Name: At_50mM_NH4NO3_L-to-H_P Parameter: Timepoint (hr) Value: 6
  misc_feature: MA Experiment 20001757 PARAMETER Experiment Name: At_50mM_NH4NO3_L-to-H_P Parameter: Tissue Value: Leaf
  misc_feature: MA Experiment 20001757 PARAMETER Experiment Name: At_50mM_NH4NO3_L-to-H_P Parameter: Treatment Value: 50mM NH4NO3 vs 100mM Mannitol
aaacacttcgctatttttcttcagtcgtcttcttcttccggcttctctcgaaacccttacctaaaaccctaatccgccacatccgtgttttagcctcacgacgaatcacgatgcaacgcagactcgtaaggttaaaaaaagagtatatctacaggaaaagcttggaaggtgatgagcgtaaggtctatgagcagaagcggctgataagagaagcccttcaagaaggaaagccgattcctactgagctccgaaacgtcgaagccaagcttcgacaagaaattgatcttgaagaccaaaacacagctgttccgcggagtcatatcgatgatgaatatgcaaatgctacggaagcagatccaaagattttgttgacaacttctaggaatccaagtgctccgctcatccgattcactaaggaattgaagtttgtgtttcctaactctcagagaataaatcgtggtagtcaggtcatttctgagatcattgaaactgctcgttcccatgattttactgatgttatattggttcatgagcaccgtggtgtgcctgatggtctcattatctctcatctcccatttggaccaactgcatactttggattacttaatgtggtaacaagacatgatatttcagacaagaaatccattggaaaaatgcctgagcaatatcctcatctcatttttaacaactttactactcagatgggtcaaagagttggaaacatcttaaaacatatcttccctgctccaaaactggatgcaaaacgtatagttactttttctaatcaatccgattatatatcattcaggaatcatgtctatgataaaggagagggaggtccaaaatcaatcgagcttaaagaaatcggtcctcgatttgagttgcggctctaccaggtgaaattaggaactgtggaacaaaatgaagcagagatcgaatgggttataagaccgtacatgaacacctctaaaaagcgcaagttcatcggtgaatgatgactaaacggaacagctttgaaccctttatctaaattctgttttacttatcattctgttggaagagctgttcagtttttgtgtccttagagaaaattgcgatgattttgttttaacgtttagcttataaaaacaaaactttcttgtctcc

SEQ ID NO: 25743 - protein, 330 aa, Arabidopsis thaliana
  peptide (1)..(330): Ceres Seq. ID no. 12371429
  misc_feature (37)..(330): Homolog of NCBI NO: 19114697 NR Description: hypothetical protein [Schizosaccharomyces pombe]
  misc_feature (37)..(328): Homolog of NCBI NO: 17544642 NR Description: IMP4 family (34.0 kD) [Caenorhabditis elegans]
  misc_feature (37)..(328): Homolog of NCBI NO: 4262378 NR Description: stage specific peptide 24 [Trypanosoma cruzi]
  misc_feature (33)..(330): Homolog of NCBI NO: 31198339 NR Description: ENSANGP00000017149 [Anopheles gambiae]
  misc_feature (37)..(328): Homolog of NCBI NO: 39587892 NR Description: Hypothetical protein CBG13507 [Caenorhabditis
  misc_feature (37)..(328): Homolog of NCBI NO: 30519917 NR Description: U3 snoRNP protein 4 homolog
  misc_feature (37)..(328): Homolog of NCBI NO: 15529982 NR Description: hypothetical protein MGC19606 [Homo sapiens]
  misc_feature (37)..(328): Homolog of NCBI NO: 34874626 NR Description: similar to IMP4 [Rattus norvegicus]
  misc_feature (32)..(328): Homolog of NCBI NO: 22902285 NR Description: Unknown (protein for IMAGE:5135392) [Mus musculus]
  misc_feature (37)..(330): Homolog of NCBI NO: 15222534 NR Description: putative U3 small nucleolar ribonucleoprotein
TLRYFSSVVFFFRLLSKPLPKTLIRHIRVLASRRITMQRRLVRLKKEYIYRKSLEGDERKVYEQKRLIREALQEGKPIPTELRNVEAKLRQEIDLEDQNTAVPRSHIDDEYANATEADPKILLTTSRNPSAPLIRFTKELKFVFPNSQRINRGSQVISEIIETARSHDFTDVILVHEHRGVPDGLIISHLPFGPTAYFGLLNVVTRHDISDKKSIGKMPEQYPHLIFNNFTTQMGQRVGNILKHIFPAPKLDAKRIVTFSNQSDYISFRNHVYDKGEGGPKSIELKEIGPRFELRLYQVKLGTVEQNEAEIEWVIRPYMNTSKKRKFIGE

SEQ ID NO: 25744 - protein, 294 aa, Arabidopsis thaliana
  peptide (1)..(294): Ceres Seq. ID no. 12371430
  misc_feature (1)..(292): Homolog of NCBI NO: 15529982 NR Description: hypothetical protein MGC19606 [Homo sapiens]
  misc_feature (1)..(292): Homolog of NCBI NO: 34874626 NR Description: similar to IMP4 [Rattus norvegicus]
  misc_feature (1)..(292): Homolog of NCBI NO: 22902285 NR Description: Unknown (protein for IMAGE:5135392) [Mus musculus]
  misc_feature (1)..(294): Homolog of NCBI NO: 15222534 NR Description: putative U3 small nucleolar ribonucleoprotein
  misc_feature (1)..(294): Homolog of NCBI NO: 19114697 NR Description: hypothetical protein [Schizosaccharomyces pombe]
  misc_feature (1)..(292): Homolog of NCBI NO: 17544642 NR Description: IMP4 family (34.0 kD) [Caenorhabditis elegans]
  misc_feature (1)..(292): Homolog of NCBI NO: 4262378 NR Description: stage specific peptide 24 [Trypanosoma cruzi]
  misc_feature (1)..(294): Homolog of NCBI NO: 31198339 NR Description: ENSANGP00000017149 [Anopheles gambiae]
  misc_feature (1)..(292): Homolog of NCBI NO: 39587892 NR Description: Hypothetical protein CBG13507 [Caenorhabditis
  misc_feature (1)..(292): Homolog of NCBI NO: 30519917 NR Description: U3 snoRNP protein 4 homolog
MQRRLVRLKKEYIYRKSLEGDERKVYEQKRLIREALQEGKPIPTELRNVEAKLRQEIDLEDQNTAVPRSHIDDEYANATEADPKILLTTSRNPSAPLIRFTKELKFVFPNSQRINRGSQVISEIIETARSHDFTDVILVHEHRGVPDGLIISHLPFGPTAYFGLLNVVTRHDISDKKSIGKMPEQYPHLIFNNFTTQMGQRVGNILKHIFPAPKLDAKRIVTFSNQSDYISFRNHVYDKGEGGPKSIELKEIGPRFELRLYQVKLGTVEQNEAEIEWVIRPYMNTSKKRKFIGE

SEQ ID NO: 25745 - DNA, 776 bp, Arabidopsis thaliana
  misc_feature (1)..(776): Ceres Seq. ID no. 13489299
  misc_feature: MA Experiment ID: 108435 Result: Down-regulated in Transcription
  misc_feature: MA Experiment 108435 PARAMETER Experiment Name: At_stm_Mutants_cDNA_P Parameter: Plant Line Value: wt Landsburg vs stm
  misc_feature: MA Experiment 108435 PARAMETER Experiment Name: At_stm_Mutants_cDNA_P Parameter: Tissue Value: Shoot Apical Meristem Region
  misc_feature: MA Experiment ID: 108464 Result: Up-regulated in Transcription
  misc_feature: MA Experiment 108464 PARAMETER Experiment Name: At_Germinating_Seeds_cDNA_P Parameter: Age (day) Value: 4 vs. 0
  misc_feature: MA Experiment 108464 PARAMETER Experiment Name: At_Germinating_Seeds_cDNA_P Parameter: Tissue Value: Germinating Seeds
  misc_feature: MA Experiment ID: 108489 Result: Down-regulated in Transcription
  misc_feature: MA Experiment ID: 108579 Result: Up-regulated in Transcription
  misc_feature: MA Experiment 108579 PARAMETER Experiment Name: At_4deg_Cold_cDNA_P Parameter: Temperature (deg C) Value: 4 vs. 22
  misc_feature: MA Experiment 108579 PARAMETER Experiment Name: At_4deg_Cold_cDNA_P Parameter: Timepoint (hr) Value: 6
  misc_feature: MA Experiment 108579 PARAMETER Experiment Name: At_4deg_Cold_cDNA_P Parameter: Tissue Value: Aerial
  misc_feature: MA Experiment ID: 20000068 Result: Down-regulated in Transcription
  misc_feature: MA Experiment ID: 20000113 Result: Up-regulated in Transcription
  misc_feature: MA Experiment 20000113 PARAMETER Experiment Name: At_42deg_Heat_cDNA_P Parameter: Temperature (deg C) Value: 42 vs. 22
  misc_feature: MA Experiment 20000113 PARAMETER Experiment Name: At_42deg_Heat_cDNA_P Parameter: Timepoint (hr) Value: 8
  misc_feature: MA Experiment 20000113 PARAMETER Experiment Name: At_42deg_Heat_cDNA_P Parameter: Tissue Value: Aerial
  misc_feature: MA Experiment ID: 20000185 Result: Down-regulated in Transcription
  misc_feature: MA Experiment 20000185 PARAMETER Experiment Name: At_Roots__P Parameter: Age (day) Value: 7 vs. 21
  misc_feature: MA Experiment 20000185 PARAMETER Experiment Name: At_Roots__P Parameter: Organism Value: A. thaliana
  misc_feature: MA Experiment 20000185 PARAMETER Experiment Name: At_Roots__P Parameter: Tissue Value: Roots vs. Whole Plant
  misc_feature: MA Experiment ID: 20000439 Result: Down-regulated in Transcription
  misc_feature: MA Experiment 20000439 PARAMETER Experiment Name: At_Roots__P Parameter: Age (day) Value: 14 vs. 21
  misc_feature: MA Experiment 20000439 PARAMETER Experiment Name: At_Roots__P Parameter: Organism Value: A. thaliana
  misc_feature: MA Experiment 20000439 PARAMETER Experiment Name: At_Roots__P Parameter: Tissue Value: Roots vs. Whole Plant
  misc_feature: MA Experiment ID: 20000573 Result: Up-regulated in Transcription
  misc_feature: MA Experiment 20000573 PARAMETER Experiment Name: At_100uM_ABA_Mutants__P Parameter: Organism Value: A. thaliana
  misc_feature: MA Experiment 20000573 PARAMETER Experiment Name: At_100uM_ABA_Mutants__P Parameter: Plant Line Value: CS22 vs. Ler wt
  misc_feature: MA Experiment 20000573 PARAMETER Experiment Name: At_100uM_ABA_Mutants__P Parameter: Timepoint (hr) Value: N/A
  misc_feature: MA Experiment 20000573 PARAMETER Experiment Name: At_100uM_ABA_Mutants__P Parameter: Tissue Value: Whole Plant
  misc_feature: MA Experiment 20000573 PARAMETER Experiment Name: At_100uM_ABA_Mutants__P Parameter: Treatment Value: None
  misc_feature: MA Experiment ID: 20000574 Result: Up-regulated in Transcription
  misc_feature: MA Experiment 20000574 PARAMETER Experiment Name: At_100uM_ABA_Mutants__P Parameter: Organism Value: A. thaliana
  misc_feature: MA Experiment 20000574 PARAMETER Experiment Name: At_100uM_ABA_Mutants__P Parameter: Plant Line Value: CS23 vs. Ler wt
  misc_feature: MA Experiment 20000574 PARAMETER Experiment Name: At_100uM_ABA_Mutants__P Parameter: Timepoint (hr) Value: N/A
  misc_feature: MA Experiment 20000574 PARAMETER Experiment Name: At_100uM_ABA_Mutants__P Parameter: Tissue Value: Whole Plant
  misc_feature: MA Experiment 20000574 PARAMETER Experiment Name: At_100uM_ABA_Mutants__P Parameter: Treatment Value: None
  misc_feature: MA Experiment ID: 20001451 Result: Down-regulated in Transcription
  misc_feature: MA Experiment 20001451 PARAMETER Experiment Name: At_Far-red-induction_P Parameter: Age (day) Value: 7
  misc_feature: MA Experiment 20001451 PARAMETER Experiment Name: At_Far-red-induction_P Parameter: Light Value: Far-red vs. White
  misc_feature: MA Experiment 20001451 PARAMETER Experiment Name: At_Far-red-induction_P Parameter: Organism Value: A. thaliana
  misc_feature: MA Experiment 20001451 PARAMETER Experiment Name: At_Far-red-induction_P Parameter: Plant Line Value: Columbia
  misc_feature: MA Experiment 20001451 PARAMETER Experiment Name: At_Far-red-induction_P Parameter: Timepoint (hr) Value: 24
  misc_feature: MA Experiment 20001451 PARAMETER Experiment Name: At_Far-red-induction_P Parameter: Tissue Value: Whole Plant
  misc_feature: MA Experiment ID: 20001557 Result: Down-regulated in Transcription
  misc_feature: MA Experiment 20001557 PARAMETER Experiment Name: At_Drought_Soil_Dry_P Parameter: Age (day) Value: 27
  misc_feature: MA Experiment 20001557 PARAMETER Experiment Name: At_Drought_Soil_Dry_P Parameter: Organism Value: A. thaliana
  misc_feature: MA Experiment 20001557 PARAMETER Experiment Name: At_Drought_Soil_Dry_P Parameter: Plant Line Value: WS
  misc_feature: MA Experiment 20001557 PARAMETER Experiment Name: At_Drought_Soil_Dry_P Parameter: Post Timepoint (hr) Value: 3
  misc_feature: MA Experiment 20001557 PARAMETER Experiment Name: At_Drought_Soil_Dry_P Parameter: Post-Treatment Value: Re-Water vs. No Drought
  misc_feature: MA Experiment 20001557 PARAMETER Experiment Name: At_Drought_Soil_Dry_P Parameter: Timepoint (day) Value: 13
  misc_feature: MA Experiment 20001557 PARAMETER Experiment Name: At_Drought_Soil_Dry_P Parameter: Treatment Value: Drought vs. No Drought
aaagctaagccaaactcagtggctctccggtgaagctttgagatggcgatccttattccggcgagtttcgggcgattaacaattacgtcgcgtgcacaagttagagtgagagtttctgcttctgctaaccaacgcactattcgtcgcgattcagtggattgggttaaggaaacttcaagctttttcgaagaagataaaaggccgatcatgttgttcgacggtgtttgtaatctctgtaatggaggtgtgaaatttgttagagaccatgatcgaaacaggagcataaggtttgaagcattacagagtgaagcgggcaagaaactgttattgcggtcaggaagagctcctgacgatatatcgagtgtcgtactagtcgaaaacgataggtcttacataaagtcagaagcagttttgaagatcatgaaatacattgacttaccatttccacagcttgcgttcttcttgcagtttgctcctctgtttgtgagagactttttgtatgaaaatgttgcaaacaatcgatatgcaatgtttggtcgatctgattcatgtgagctctaagaatacatatgtgatcctactttgccacaaaaaaaaaatctagatatgtaatcctacagattaatataagcttttatacagatgtatagtttacaacagccattaaacaatagatacatatgtactacttttcgaatcatgtactcgtcaaatgtataacctttccgatgttgatatttgtgttatatatatggaaaaaaacttgggattgtgtg

SEQ ID NO: 25746 - protein, 172 aa, Arabidopsis thaliana
  peptide (1)..(172): Ceres Seq. ID no. 13489300
  misc_feature (50)..(167): Pfam Name: Protein of unknown function, DUF393 Pfam Description: Protein of unknown function, DUF393
  misc_feature (55)..(169): Homolog of NCBI NO: 22126482 NR Description: hypothetical [Yersinia pestis KIM]
  misc_feature (55)..(169): Homolog of NCBI NO: 16121834 NR Description: putative membrane protein [Yersinia pestis]
  misc_feature (55)..(172): Homolog of NCBI NO: 15613415 NR Description: BH0852~unknown conserved protein [Bacillus
  misc_feature (53)..(172): Homolog of NCBI NO: 21243940 NR Description: conserved hypothetical protein
  misc_feature (55)..(172): Homolog of NCBI NO: 28871571 NR Description: conserved hypothetical protein
  misc_feature (49)..(172): Homolog of NCBI NO: 16080202 NR Description: alternate gene name: yugD [Bacillus subtilis]
  misc_feature (42)..(172): Homolog of NCBI NO: 23470059 NR Description: hypothetical protein [Pseudomonas syringae pv.
  misc_feature (17)..(172): Homolog of NCBI NO: 34910238 NR Description: OSJNBa0089K24.3 [Oryza sativa (japonica
  misc_feature (1)..(172): Homolog of NCBI NO: 21593813 NR Description: unknown [Arabidopsis thaliana]
  misc_feature (1)..(172): Homolog of NCBI NO: 18404093 NR Description: expressed protein [Arabidopsis thaliana]
MAILIPASFGRLTITSRAQVRVRVSASANQRTIRRDSVDWVKETSSFFEEDKRPIMLFDGVCNLCNGGVKFVRDHDRNRSIRFEALQSEAGKKLLLRSGRAPDDISSVVLVENDRSYIKSEAVLKIMKYIDLPFPQLAFFLQFAPLFVRDFLYENVANNRYAMFGRSDSCEL

SEQ ID NO: 25747 - protein, 117 aa, Arabidopsis thaliana
  peptide (1)..(117): Ceres Seq. ID no. 13489301
  misc_feature (1)..(112): Pfam Name: Protein of unknown function, DUF393 Pfam Description: Protein of unknown function, DUF393
  misc_feature (1)..(114): Homolog of NCBI NO: 22126482 NR Description: hypothetical [Yersinia pestis KIM]
  misc_feature (1)..(114): Homolog of NCBI NO: 16121834 NR Description: putative membrane protein [Yersinia pestis]
  misc_feature (1)..(117): Homolog of NCBI NO: 15613415 NR Description: BH0852~unknown conserved protein [Bacillus
  misc_feature (1)..(117): Homolog of NCBI NO: 21243940 NR Description: conserved hypothetical protein
  misc_feature (1)..(117): Homolog of NCBI NO: 28871571 NR Description: conserved hypothetical protein
  misc_feature (1)..(117): Homolog of NCBI NO: 16080202 NR Description: alternate gene name: yugD [Bacillus subtilis]
  misc_feature (1)..(117): Homolog of NCBI NO: 23470059 NR Description: hypothetical protein [Pseudomonas syringae pv.
  misc_feature (1)..(117): Homolog of NCBI NO: 34910238 NR Description: OSJNBa0089K24.3 [Oryza sativa (japonica
  misc_feature (1)..(117): Homolog of NCBI NO: 21593813 NR Description: unknown [Arabidopsis thaliana]
  misc_feature (1)..(117): Homolog of NCBI NO: 18404093 NR Description: expressed protein [Arabidopsis thaliana]
MLFDGVCNLCNGGVKFVRDHDRNRSIRFEALQSEAGKKLLLRSGRAPDDISSVVLVENDRSYIKSEAVLKIMKYIDLPFPQLAFFLQFAPLFVRDFLYENVANNRYAMFGRSDSCEL

SEQ ID NO: 25748 - DNA, 1165 bp, Arabidopsis thaliana
  misc_feature (1)..(1165): Ceres Seq. ID no. 12324048
  misc_feature: MA Experiment ID: 20000090 Result: Up-regulated in Transcription
  misc_feature: MA Experiment ID: 20000182 Result: Up-regulated in Transcription
  misc_feature: MA Experiment 20000182 PARAMETER Experiment Name: At_2mM_SA_P Parameter: Age (day) Value: 14
  misc_feature: MA Experiment 20000182 PARAMETER Experiment Name: At_2mM_SA_P Parameter: Organism Value: A. thaliana
  misc_feature: MA Experiment 20000182 PARAMETER Experiment Name: At_2mM_SA_P Parameter: Plant Line Value: WS
  misc_feature: MA Experiment 20000182 PARAMETER Experiment Name: At_2mM_SA_P Parameter: Timepoint (hr) Value: 6
  misc_feature: MA Experiment 20000182 PARAMETER Experiment Name: At_2mM_SA_P Parameter: Tissue Value: Aerial
  misc_feature: MA Experiment 20000182 PARAMETER Experiment Name: At_2mM_SA_P Parameter: Treatment Value: 2mM SA vs. No Treatment
  misc_feature: MA Experiment ID: 20000224 Result: Up-regulated in Transcription
  misc_feature: MA Experiment ID: 20000234 Result: Down-regulated in Transcription
  misc_feature: MA Experiment 20000234 PARAMETER Experiment Name: At_Siliques_P Parameter: Age (day) Value: 21
  misc_feature: MA Experiment 20000234 PARAMETER Experiment Name: At_Siliques_P Parameter: Organism Value: A. thaliana
  misc_feature: MA Experiment 20000234 PARAMETER Experiment Name: At_Siliques_P Parameter: Plant Line Value: WS
  misc_feature: MA Experiment 20000234 PARAMETER Experiment Name: At_Siliques_P Parameter: Tissue Value: Less Than 5mm Siliques vs. Whole Plant
  misc_feature: MA Experiment ID: 20000264 Result: Down-regulated in Transcription
  misc_feature: MA Experiment 20000264 PARAMETER Experiment Name: At_Open_Flower_P Parameter: Age (day) Value: 21
  misc_feature: MA Experiment 20000264 PARAMETER Experiment Name: At_Open_Flower_P Parameter: Plant Line Value: WS
  misc_feature: MA Experiment 20000264 PARAMETER Experiment Name: At_Open_Flower_P Parameter: Tissue Value: Open Flower vs. Whole Plant
  misc_feature: MA Experiment ID: 20000265 Result: Down-regulated in Transcription
  misc_feature: MA Experiment 20000265 PARAMETER Experiment Name: At_Open_Flower_P Parameter: Age (day) Value: 21
  misc_feature: MA Experiment 20000265 PARAMETER Experiment Name: At_Open_Flower_P Parameter: Plant Line Value: WS
  misc_feature: MA Experiment 20000265 PARAMETER Experiment Name: At_Open_Flower_P Parameter: Tissue Value: Closed Flower vs. Whole Plant
  misc_feature: MA Experiment ID: 20000286 Result: Down-regulated in Transcription
  misc_feature: MA Experiment 20000286 PARAMETER Experiment Name: At_Open_Flower_P Parameter: Age (day) Value: 21
  misc_feature: MA Experiment 20000286 PARAMETER Experiment Name: At_Open_Flower_P Parameter: Plant Line Value: WS
  misc_feature: MA Experiment 20000286 PARAMETER Experiment Name: At_Open_Flower_P Parameter: Tissue Value: Half Open vs. Whole Plant
  misc_feature: MA Experiment ID: 20000495 Result: Up-regulated in Transcription
  misc_feature: MA Experiment 20000495 PARAMETER Experiment Name: At_Guard_Cells_P Parameter: Harvest Date Value: 8/2/2002
  misc_feature: MA Experiment 20000495 PARAMETER Experiment Name: At_Guard_Cells_P Parameter: Organism Value: A. thaliana
  misc_feature: MA Experiment 20000495 PARAMETER Experiment Name: At_Guard_Cells_P Parameter: Tissue Value: Guard Cells vs. Leaves
  misc_feature: MA Experiment ID: 20001451 Result: Up-regulated in Transcription
  misc_feature: MA Experiment 20001451 PARAMETER Experiment Name: At_Far-red-induction_P Parameter: Age (day) Value: 7
  misc_feature: MA Experiment 20001451 PARAMETER Experiment Name: At_Far-red-induction_P Parameter: Light Value: Far-red vs. White
  misc_feature: MA Experiment 20001451 PARAMETER Experiment Name: At_Far-red-induction_P Parameter: Organism Value: A. thaliana
  misc_feature: MA Experiment 20001451 PARAMETER Experiment Name: At_Far-red-induction_P Parameter: Plant Line Value: Columbia
  misc_feature: MA Experiment 20001451 PARAMETER Experiment Name: At_Far-red-induction_P Parameter: Timepoint (hr) Value: 24
  misc_feature: MA Experiment 20001451 PARAMETER Experiment Name: At_Far-red-induction_P Parameter: Tissue Value: Whole Plant
  misc_feature: MA Experiment ID: 20001558 Result: Down-regulated in Transcription
  misc_feature: MA Experiment 20001558 PARAMETER Experiment Name: At_Drought_Soil_Dry_P Parameter: Age (day) Value: 27
  misc_feature: MA Experiment 20001558 PARAMETER Experiment Name: At_Drought_Soil_Dry_P Parameter: Organism Value: A. thaliana
  misc_feature: MA Experiment 20001558 PARAMETER Experiment Name: At_Drought_Soil_Dry_P Parameter: Plant Line Value: WS
  misc_feature: MA Experiment 20001558 PARAMETER Experiment Name: At_Drought_Soil_Dry_P Parameter: Post Timepoint (hr) Value: 6
  misc_feature: MA Experiment 20001558 PARAMETER Experiment Name: At_Drought_Soil_Dry_P Parameter: Post-Treatment Value: Re-Water vs. No Drought
  misc_feature: MA Experiment 20001558 PARAMETER Experiment Name: At_Drought_Soil_Dry_P Parameter: Timepoint (day) Value: 13
  misc_feature: MA Experiment 20001558 PARAMETER Experiment Name: At_Drought_Soil_Dry_P Parameter: Treatment Value: Drought vs. No Drought
  misc_feature: MA Experiment ID: 20001911 Result: Up-regulated in Transcription
  misc_feature: MA Experiment 20001911 PARAMETER Experiment Name: At_Drought_Reproduction_P Parameter: Age (day) Value: 40
  misc_feature: MA Experiment 20001911 PARAMETER Experiment Name: At_Drought_Reproduction_P Parameter: Organism Value: A. thaliana
  misc_feature: MA Experiment 20001911 PARAMETER Experiment Name: At_Drought_Reproduction_P Parameter: Plant Line Value: WS
  misc_feature: MA Experiment 20001911 PARAMETER Experiment Name: At_Drought_Reproduction_P Parameter: Timepoint (day) Value: 10
  misc_feature: MA Experiment 20001911 PARAMETER Experiment Name: At_Drought_Reproduction_P Parameter: Tissue Value: Flowers
  misc_feature: MA Experiment 20001911 PARAMETER Experiment Name: At_Drought_Reproduction_P Parameter: Treatment Value: Drought vs. No Drought
caataattctcagcttgccgcagtgctacagaactcagctaagctttttgtgagtgaagatggaaagaaagtgagacgcttaaatccgattactgagtctgctatagaagagcttcagtctcgcattattgttgctgagaatctacctgaggatcattgctaccaaaacctgatgaagattttttcaactgttggaagtgtgaagaacatccgtacctgccagccacaaaataatggaagcggtgctccacccgcagcaagatcagcagccaaaagcaatggtacgcttttcagtaacaaggtccatgcttttgttgagtatgagatggttgagctagccgagaaagcagttaccgagttaagtgaagggggaaattggaggagcggtcttaaagtccggttgatgctaaagcatcagacgaaggaaccaaaacaaggtcaagggcgaggaagaaaaggacatgatgcagatgtagaacatgaggaagatgatgctacaacatccgagcagcagccgattgagaaacaatctgatgactgttctggggaatgggatacacatatgcaagagcagccaataggagaggatcaagggaatgagaaagcggctgggcagagaaaagggcgtaacagaggtagaggaaagggacgaggacgaggtcaaccacaccagaaccaaaaccagaacaacaaccacagccataaccaaaaccacaaccacaatgggcgaggaaatcatcatcatcatcatcatcatcaagtgggaacacaaccttcgaacaatccaatgaacaacatggagcaaccaggcatggggaaacagcaaccacctggaccacgaatgcctgatgggaccagaggattctcaatgggacgggggaagccggttatggttcaggcagagtgatccagagctgttttgaaaaggaggtgatgtggaattgtgaatggttcaaaaagggagataaatagagagagagaaagagagagatttatccttcccatggggattggctagttttgcagactttatatttgtcttacttacttcgaaatacttttcaattacaaggaaacaacaaaaaaaaaaactacattttcctcatatagtgtacgtgtaatgaaacagcaatttcagttaatattttgtactaaaagcttatct

SEQ ID NO: 25749 - protein, 301 aa, Arabidopsis thaliana
  peptide (1)..(301): Ceres Seq. ID no. 12324049
  misc_feature (43)..(134): Pfam Name: RNA recognition motif. (a.k.a. RRM, RBD, or RNP domain) Pfam Description: RNA recognition motif. (a.k.a. RRM, RBD, or RNP
  misc_feature (1)..(277): Homolog of NCBI NO: 30694922 NR Description: RNA recognition motif (RRM)-containing protein
  misc_feature (1)..(277): Homolog of NCBI NO: 10177706 NR Description: contains similarity to RNA-binding
  misc_feature (5)..(172): Homolog of NCBI NO: 6449448 NR Description: RNA-binding protein homolog [Brassica napus]
  misc_feature (2)..(178): Homolog of NCBI NO: 34896588 NR Description: putative RNA-binding protein [Oryza sativa]
  misc_feature (2)..(227): Homolog of NCBI NO: 34394175 NR Description: putative RNA-binding protein homolog
  misc_feature (273)..(295): Homolog of NCBI NO: 15230287 NR Description: RNA-binding protein, putative; protein id:
  misc_feature (1)..(231): Homolog of NCBI NO: 15230287 NR Description: RNA-binding protein, putative; protein id:
  misc_feature (1)..(301): Homolog of NCBI NO: 30689565 NR Description: VirF-interacting protein FIP1 [Arabidopsis
  misc_feature (1)..(301): Homolog of NCBI NO: 18406414 NR Description: VirF-interacting protein FIP1
  misc_feature (1)..(301): Homolog of NCBI NO: 15724224 NR Description: At2g43970/F6E13.10 [Arabidopsis thaliana]
NNSQLAAVLQNSAKLFVSEDGKKVRRLNPITESAIEELQSRIIVAENLPEDHCYQNLMKIFSTVGSVKNIRTCQPQNNGSGAPPAARSAAKSNGTLFSNKVHAFVEYEMVELAEKAVTELSEGGNWRSGLKVRLMLKHQTKEPKQGQGRGRKGHDADVEHEEDDATTSEQQPIEKQSDDCSGEWDTHMQEQPIGEDQGNEKAAGQRKGRNRGRGKGRGRGQPHQNQNQNNNHSHNQNHNHNGRGNHHHHHHHQVGTQPSNNPMNNMEQPGMGKQQPPGPRMPDGTRGFSMGRGKPVMVQAE

SEQ ID NO: 25750 - protein, 244 aa, Arabidopsis thaliana
  peptide (1)..(244): Ceres Seq. ID no. 12324050
  misc_feature (1)..(77): Pfam Name: RNA recognition motif. (a.k.a. RRM, RBD, or RNP domain) Pfam Description: RNA recognition motif. (a.k.a. RRM, RBD, or RNP
  misc_feature (1)..(220): Homolog of NCBI NO: 30694922 NR Description: RNA recognition motif (RRM)-containing protein
  misc_feature (1)..(220): Homolog of NCBI NO: 10177706 NR Description: contains similarity to RNA-binding
  misc_feature (1)..(115): Homolog of NCBI NO: 6449448 NR Description: RNA-binding protein homolog [Brassica napus]
  misc_feature (1)..(121): Homolog of NCBI NO: 34896588 NR Description: putative RNA-binding protein [Oryza sativa]
  misc_feature (1)..(170): Homolog of NCBI NO: 34394175 NR Description: putative RNA-binding protein homolog
  misc_feature (216)..(238): Homolog of NCBI NO: 15230287 NR Description: RNA-binding protein, putative; protein id:
  misc_feature (1)..(174): Homolog of NCBI NO: 15230287 NR Description: RNA-binding protein, putative; protein id:
  misc_feature (1)..(244): Homolog of NCBI NO: 30689565 NR Description: VirF-interacting protein FIP1 [Arabidopsis
  misc_feature (1)..(244): Homolog of NCBI NO: 18406414 NR Description: VirF-interacting protein FIP1
  misc_feature (1)..(244): Homolog of NCBI NO: 15724224 NR Description: At2g43970/F6E13.10 [Arabidopsis thaliana]
MKIFSTVGSVKNIRTCQPQNNGSGAPPAARSAAKSNGTLFSNKVHAFVEYEMVELAEKAVTELSEGGNWRSGLKVRLMLKHQTKEPKQGQGRGRKGHDADVEHEEDDATTSEQQPIEKQSDDCSGEWDTHMQEQPIGEDQGNEKAAGQRKGRNRGRGKGRGRGQPHQNQNQNNNHSHNQNHNHNGRGNHHHHHHHQVGTQPSNNPMNNMEQPGMGKQQPPGPRMPDGTRGFSMGRGKPVMVQAE

SEQ ID NO: 25751 - protein, 193 aa, Arabidopsis thaliana
  peptide (1)..(193): Ceres Seq. ID no. 12324051
  misc_feature (31)..(186): Pfam Name: High molecular weight glutenin subunit Pfam Description: High molecular weight glutenin subunit
  misc_feature (1)..(169): Homolog of NCBI NO: 30694922 NR Description: RNA recognition motif (RRM)-containing protein
  misc_feature (1)..(169): Homolog of NCBI NO: 10177706 NR Description: contains similarity to RNA-binding
  misc_feature (1)..(64): Homolog of NCBI NO: 6449448 NR Description: RNA-binding protein homolog [Brassica napus]
  misc_feature (1)..(70): Homolog of NCBI NO: 34896588 NR Description: putative RNA-binding protein [Oryza sativa]
  misc_feature (1)..(119): Homolog of NCBI NO: 34394175 NR Description: putative RNA-binding protein homolog
  misc_feature (165)..(187): Homolog of NCBI NO: 15230287 NR Description: RNA-binding protein, putative; protein id:
  misc_feature (1)..(123): Homolog of NCBI NO: 15230287 NR Description: RNA-binding protein, putative; protein id:
  misc_feature (1)..(193): Homolog of NCBI NO: 30689565 NR Description: VirF-interacting protein FIP1 [Arabidopsis
  misc_feature (1)..(193): Homolog of NCBI NO: 18406414 NR Description: VirF-interacting protein FIP1
  misc_feature (1)..(193): Homolog of NCBI NO: 15724224 NR Description: At2g43970/F6E13.10 [Arabidopsis thaliana]
MVELAEKAVTELSEGGNWRSGLKVRLMLKHQTKEPKQGQGRGRKGHDADVEHEEDDATTSEQQPIEKQSDDCSGEWDTHMQEQPIGEDQGNEKAAGQRKGRNRGRGKGRGRGQPHQNQNQNNNHSHNQNHNHNGRGNHHHHHHHQVGTQPSNNPMNNMEQPGMGKQQPPGPRMPDGTRGFSMGRGKPVMVQAE

SEQ ID NO: 25752 - DNA, 1011 bp, Arabidopsis thaliana
  misc_feature (1)..(1011): Ceres Seq. ID no. 12397194
  misc_feature: MA Experiment ID: 108462 Result: Up-regulated in Transcription
  misc_feature: MA Experiment 108462 PARAMETER Experiment Name: At_Germinating_Seeds_cDNA_P Parameter: Age (day) Value: 2 vs. 0
  misc_feature: MA Experiment 108462 PARAMETER Experiment Name: At_Germinating_Seeds_cDNA_P Parameter: Tissue Value: Germinating Seeds
  misc_feature: MA Experiment ID: 108463 Result: Up-regulated in Transcription
  misc_feature: MA Experiment 108463 PARAMETER Experiment Name: At_Germinating_Seeds_cDNA_P Parameter: Age (day) Value: 3 vs. 0
  misc_feature: MA Experiment 108463 PARAMETER Experiment Name: At_Germinating_Seeds_cDNA_P Parameter: Tissue Value: Germinating Seeds
  misc_feature: MA Experiment ID: 108464 Result: Up-regulated in Transcription
  misc_feature: MA Experiment 108464 PARAMETER Experiment Name: At_Germinating_Seeds_cDNA_P Parameter: Age (day) Value: 4 vs. 0
  misc_feature: MA Experiment 108464 PARAMETER Experiment Name: At_Germinating_Seeds_cDNA_P Parameter: Tissue Value: Germinating Seeds
  misc_feature: MA Experiment ID: 108594 Result: Up-regulated in Transcription
  misc_feature: MA Experiment 108594 PARAMETER Experiment Name: At_Ler-rhl_Root_cDNA_P Parameter: Plant Line Value: null
  misc_feature: MA Experiment ID: 108595 Result: Up-regulated in Transcription
  misc_feature: MA Experiment 108595 PARAMETER Experiment Name: At_Ler-pi_Ovule_cDNA_P Parameter: Plant Line Value: null
  misc_feature: MA Experiment ID: 20000184 Result: Down-regulated in Transcription
  misc_feature: MA Experiment 20000184 PARAMETER Experiment Name: At_Shoots__P Parameter: Age (day) Value: 7
  misc_feature: MA Experiment 20000184 PARAMETER Experiment Name: At_Shoots__P Parameter: Tissue Value: Shoots vs. Whole Plant
  misc_feature: MA Experiment ID: 20000264 Result: Up-regulated in Transcription
  misc_feature: MA Experiment 20000264 PARAMETER Experiment Name: At_Open_Flower_P Parameter: Age (day) Value: 21
  misc_feature: MA Experiment 20000264 PARAMETER Experiment Name: At_Open_Flower_P Parameter: Plant Line Value: WS
  misc_feature: MA Experiment 20000264 PARAMETER Experiment Name: At_Open_Flower_P Parameter: Tissue Value: Open Flower vs. Whole Plant
  misc_feature: MA Experiment ID: 20000794 Result: Up-regulated in Transcription
  misc_feature: MA Experiment 20000794 PARAMETER Experiment Name: At_Petals_P Parameter: Age (day) Value: 23-25 days
  misc_feature: MA Experiment 20000794 PARAMETER Experiment Name: At_Petals_P Parameter: Plant Line Value: WS
  misc_feature: MA Experiment 20000794 PARAMETER Experiment Name: At_Petals_P Parameter: Tissue Value: Petals vs. Whole plant
  misc_feature: MA Experiment ID: 20001560 Result: Up-regulated in Transcription
  misc_feature: MA Experiment 20001560 PARAMETER Experiment Name: At_Drought_Soil_Dry_P Parameter: Age (day) Value: 28
  misc_feature: MA Experiment 20001560 PARAMETER Experiment Name: At_Drought_Soil_Dry_P Parameter: Organism Value: A. thaliana
  misc_feature: MA Experiment 20001560 PARAMETER Experiment Name: At_Drought_Soil_Dry_P Parameter: Plant Line Value: WS
  misc_feature: MA Experiment 20001560 PARAMETER Experiment Name: At_Drought_Soil_Dry_P Parameter: Post Timepoint (hr) Value: None
  misc_feature: MA Experiment 20001560 PARAMETER Experiment Name: At_Drought_Soil_Dry_P Parameter: Post-Treatment Value: None
  misc_feature: MA Experiment 20001560 PARAMETER Experiment Name: At_Drought_Soil_Dry_P Parameter: Timepoint (day) Value: 14
  misc_feature: MA Experiment 20001560 PARAMETER Experiment Name: At_Drought_Soil_Dry_P Parameter: Treatment Value: Drought vs. No Drought
gaagggtattagtctttttacgattagtctctatgcataatcttgttgaagagtcatctcccaaaactaatgagcatgtataggctcttgttgaagggtcatttcccaaagctggcaaatcataattacataatcttgttgaatggtcatctcaggatcacagtttgtcaaatagaaacaatgtcatctgggttaagaaagttgaaagtggacatgattgacttggcttagatgattgtgtctctatggttgtactttgtgaagccttctttatcattatttgtactatgtaaccttttgtttgtgtatttctttttcatatcttcttgacccgtttttatctcgttcattcagaaactgaagacgcgtgtgattaataataactgtaatccagtgtggaacgaacaactgaccctttccatcaaagatgtgaatgatcctatccgtctgacggtgtttgataaagatagattctcgggagatgacaaaatgggtgatgcagaaatagactttaggccgttcctagaagcgcatcaaatggagttagatttccagaagctccccaatggttgtgcaatcaagaggatccgtccaggcaggaccaactgtttagctgaagagagcagcatcacttggagcaatgggaagatcatgcaagagatgattcttagactaaagaatgtggagtgtggggaagtagagctcatgcttgagtggactgatggtccaggctgcaagggtctgggacgcgaaggatccaagaagacaccatggatgccgacaaaacgattggactaagatgcagaaatgttaaaacagagaccgtgaagatgtgatggtattttttcgttatgttcatggaaagacgagtttgtctttgtctcatcagagtttaaattgacaaaaaaggctctgctttggtctttagttgtacatgtcgaataactcaacccttatatatattgtatctgtttctactaattgaagaaataaagcaaaccctgaatttct

SEQ ID NO: 25753 - protein, 102 aa, Arabidopsis thaliana
  peptide (1)..(102): Ceres Seq. ID no. 12397195
  misc_feature (1)..(81): Homolog of NCBI NO: 15238792 NR Description: putative protein
  misc_feature (1)..(85): Homolog of NCBI NO: 15240322 NR Description: putative protein
  misc_feature (1)..(85): Homolog of NCBI NO: 25405940 NR Description: protein T1N15.21 [imported] - Arabidopsis
  misc_feature (1)..(85): Homolog of NCBI NO: 15221907 NR Description: unknown protein; protein id: At1g48590.1
  misc_feature (1)..(85): Homolog of NCBI NO: 30684739 NR Description: C2 domain-containing protein [Arabidopsis
  misc_feature (1)..(85): Homolog of NCBI NO: 15223248 NR Description: unknown protein; protein id: At1g70800.1
  misc_feature (1)..(85): Homolog of NCBI NO: 13430460 NR Description: unknown protein [Arabidopsis thaliana]
  misc_feature (1)..(85): Homolog of NCBI NO: 18409682 NR Description: expressed protein
  misc_feature (1)..(85): Homolog of NCBI NO: 15226306 NR Description: hypothetical protein
  misc_feature (1)..(102): Homolog of NCBI NO: 18409675 NR Description: zinc finger and C2 domain protein, putative
MGDAEIDFRPFLEAHQMELDFQKLPNGCAIKRIRPGRTNCLAEESSITWSNGKIMQEMILRLKNVECGEVELMLEWTDGPGCKGLGREGSKKTPWMPTKRLD

SEQ ID NO: 25754 - protein, 86 aa, Arabidopsis thaliana
  peptide (1)..(86): Ceres Seq. ID no. 12397196
  misc_feature (1)..(69): Homolog of NCBI NO: 15240322 NR Description: putative protein
  misc_feature (1)..(69): Homolog of NCBI NO: 25405940 NR Description: protein T1N15.21 [imported] - Arabidopsis
  misc_feature (1)..(69): Homolog of NCBI NO: 15221907 NR Description: unknown protein; protein id: At1g48590.1
  misc_feature (1)..(69): Homolog of NCBI NO: 30684739 NR Description: C2 domain-containing protein [Arabidopsis
  misc_feature (1)..(69): Homolog of NCBI NO: 15223248 NR Description: unknown protein; protein id: At1g70800.1
  misc_feature (1)..(69): Homolog of NCBI NO: 13430460 NR Description: unknown protein [Arabidopsis thaliana]
  misc_feature (1)..(69): Homolog of NCBI NO: 18409682 NR Description: expressed protein
  misc_feature (1)..(69): Homolog of NCBI NO: 15226306 NR Description: hypothetical protein
  misc_feature (1)..(86): Homolog of NCBI NO: 18409675 NR Description: zinc finger and C2 domain protein, putative
  misc_feature (1)..(65): Homolog of NCBI NO: 15238792 NR Description: putative protein
MELDFQKLPNGCAIKRIRPGRTNCLAEESSITWSNGKIMQEMILRLKNVECGEVELMLEWTDGPGCKGLGREGSKKTPWMPTKRLD

SEQ ID NO: 25755 - protein, 53 aa, Arabidopsis thaliana
  peptide (1)..(53): Ceres Seq. ID no. 12397197
MSMYRLLLKGHFPKLANHNYIILLNGHLRITVCQIETMSSGLRKLKVDMIDLA

SEQ ID NO: 25756 - DNA, 929 bp, Arabidopsis thaliana
  misc_feature (1)..(929): Ceres Seq. ID no. 12370095
  misc_feature: MA Experiment ID: 108501 Result: Up-regulated in Transcription
  misc_feature: MA Experiment 108501 PARAMETER Experiment Name: At_ap2_floral_buds_cDNA_P Parameter: Plant Line Value: ap2 (Ler.)
  misc_feature: MA Experiment 108501 PARAMETER Experiment Name: At_ap2_floral_buds_cDNA_P Parameter: Tissue Value: Closed Flower
  misc_feature: MA Experiment ID: 108595 Result: Up-regulated in Transcription
  misc_feature: MA Experiment 108595 PARAMETER Experiment Name: At_Ler-pi_Ovule_cDNA_P Parameter: Plant Line Value: null
  misc_feature: MA Experiment ID: 20000184 Result: Down-regulated in Transcription
  misc_feature: MA Experiment 20000184 PARAMETER Experiment Name: At_Shoots__P Parameter: Age (day) Value: 7
  misc_feature: MA Experiment 20000184 PARAMETER Experiment Name: At_Shoots__P Parameter: Tissue Value: Shoots vs. Whole Plant
  misc_feature: MA Experiment ID: 20000234 Result: Up-regulated in Transcription
  misc_feature: MA Experiment 20000234 PARAMETER Experiment Name: At_Siliques_P Parameter: Age (day) Value: 21
  misc_feature: MA Experiment 20000234 PARAMETER Experiment Name: At_Siliques_P Parameter: Organism Value: A. thaliana
  misc_feature: MA Experiment 20000234 PARAMETER Experiment Name: At_Siliques_P Parameter: Plant Line Value: WS
  misc_feature: MA Experiment 20000234 PARAMETER Experiment Name: At_Siliques_P Parameter: Tissue Value: Less Than 5mm Siliques vs. Whole Plant
  misc_feature: MA Experiment ID: 20000235 Result: Up-regulated in Transcription
  misc_feature: MA Experiment 20000235 PARAMETER Experiment Name: At_Siliques_P Parameter: Age (day) Value: 21
  misc_feature: MA Experiment 20000235 PARAMETER Experiment Name: At_Siliques_P Parameter: Organism Value: A. thaliana
  misc_feature: MA Experiment 20000235 PARAMETER Experiment Name: At_Siliques_P Parameter: Plant Line Value: WS
  misc_feature: MA Experiment 20000235 PARAMETER Experiment Name: At_Siliques_P Parameter: Tissue Value: 5-10mm Siliques vs. Whole Plant
  misc_feature: MA Experiment ID: 20000264 Result: Up-regulated in Transcription
  misc_feature: MA Experiment 20000264 PARAMETER Experiment Name: At_Open_Flower_P Parameter: Age (day) Value: 21
  misc_feature: MA Experiment 20000264 PARAMETER Experiment Name: At_Open_Flower_P Parameter: Plant Line Value: WS
  misc_feature: MA Experiment 20000264 PARAMETER Experiment Name: At_Open_Flower_P Parameter: Tissue Value: Open Flower vs. Whole Plant
  misc_feature: MA Experiment ID: 20000438 Result: Down-regulated in Transcription
  misc_feature: MA Experiment 20000438 PARAMETER Experiment Name: At_Shoots__P Parameter: Age (day) Value: 14
  misc_feature: MA Experiment 20000438 PARAMETER Experiment Name: At_Shoots__P Parameter: Tissue Value: Shoots vs. Whole Plant
  misc_feature: MA Experiment ID: 20000439 Result: Down-regulated in Transcription
  misc_feature: MA Experiment 20000439 PARAMETER Experiment Name: At_Roots__P Parameter: Age (day) Value: 14 vs. 21
  misc_feature: MA Experiment 20000439 PARAMETER Experiment Name: At_Roots__P Parameter: Organism Value: A. thaliana
  misc_feature: MA Experiment 20000439 PARAMETER Experiment Name: At_Roots__P Parameter: Tissue Value: Roots vs. Whole Plant
  misc_feature: MA Experiment ID: 20000794 Result: Down-regulated in Transcription
  misc_feature: MA Experiment 20000794 PARAMETER Experiment Name: At_Petals_P Parameter: Age (day) Value: 23-25 days
  misc_feature: MA Experiment 20000794 PARAMETER Experiment Name: At_Petals_P Parameter: Plant Line Value: WS
  misc_feature: MA Experiment 20000794 PARAMETER Experiment Name: At_Petals_P Parameter: Tissue Value: Petals vs. Whole plant
  misc_feature: MA Experiment ID: 20001911 Result: Up-regulated in Transcription
  misc_feature: MA Experiment 20001911 PARAMETER Experiment Name: At_Drought_Reproduction_P Parameter: Age (day) Value: 40
  misc_feature: MA Experiment 20001911 PARAMETER Experiment Name: At_Drought_Reproduction_P Parameter: Organism Value: A. thaliana
  misc_feature: MA Experiment 20001911 PARAMETER Experiment Name: At_Drought_Reproduction_P Parameter: Plant Line Value: WS
  misc_feature: MA Experiment 20001911 PARAMETER Experiment Name: At_Drought_Reproduction_P Parameter: Timepoint (day) Value: 10
  misc_feature: MA Experiment 20001911 PARAMETER Experiment Name: At_Drought_Reproduction_P Parameter: Tissue Value: Flowers
  misc_feature: MA Experiment 20001911 PARAMETER Experiment Name: At_Drought_Reproduction_P Parameter: Treatment Value: Drought vs. No Drought
agcactcaacttaaactcttttagtaacaatggtttcttcttctttaaccaagcttgtgttctttggttgtctcctcctgctcacattcacggacaaccttgtggctggaaaatctggcaaagtgaagctcaatctttactacgaatcactttgtcccggttgtcaggaattcatcgtcgatgacctaggtaaaatctttgactacgatctctacacaatcactgatctcaagctgtttccatttggtaatgccgaactctccgataatctgactgtcacttgccagcatggtgaagaggaatgcaaactaaacgcccttgaagcttgcgcattaagaacttggcccgatcagaaatcacaatactcgttcatacggtgcgtcgaaagcgatacgaaaggctgggaatcatgtgttaaaaactctggacgtgagaaagcaatcaatgattgttacaatggtgatctttctagaaagctgatacttgggtacgcaaccaaaaccaagaatttgaagccgccacatgaatacgtaccatgggtcacactcaacggcaagccactcgatgacagcgtacaaagtacggatgatctcgtagctcaaatctgcaatgcatacaaaggaaagactactctcccaaaagtttgcaattcatccgcctcaatgtctaagtcgcctgagaggaaatggaagcttcaagtctcttatgccaataaagctaccaattattaagttaactatcaaacttcgtattgaactaagatggatttaagctttatgttataagtggaatgatgaataaaggcctgttctaaacttttatggttacgaattgatgtattaaaaaagaacatgaaaaacgcctgaactgaactacaagtattttatatgacgtcttatcgacgaaagtgttatgtaactcggtttatc

SEQ ID NO: 25757 - protein, 233 aa, Arabidopsis thaliana
  peptide (1)..(233): Ceres Seq. ID no. 12370096
  misc_feature (32)..(136): Pfam Name: Gamma interferon inducible lysosomal thiol Pfam Description: Gamma interferon inducible lysosomal thiol
  misc_feature (29)..(221): Homolog of NCBI NO: 18390723 NR Description: expressed protein
  misc_feature (1)..(150): Homolog of NCBI NO: 7487271 NR Description: hypothetical protein T20K18.220 - Arabidopsis
  misc_feature (49)..(232): Homolog of NCBI NO: 18252829 NR Description: putative protein [Arabidopsis thaliana]
  misc_feature (1)..(180): Homolog of NCBI NO: 7487272 NR Description: hypothetical protein T20K18.240 - Arabidopsis
  misc_feature (1)..(233): Homolog of NCBI NO: 22328587 NR Description: putative protein
  misc_feature (1)..(232): Homolog of NCBI NO: 21593076 NR Description: unknown [Arabidopsis thaliana]
  misc_feature (1)..(232): Homolog of NCBI NO: 18413888 NR Description: putative protein
  misc_feature (4)..(233): Homolog of NCBI NO: 15235523 NR Description: putative protein; protein id: At4g12900.1
  misc_feature (1)..(233): Homolog of NCBI NO: 21593852 NR Description: unknown [Arabidopsis thaliana]
  misc_feature (1)..(233): Homolog of NCBI NO: 15235540 NR Description: putative protein
MVSSSLTKLVFFGCLLLLTFTDNLVAGKSGKVKLNLYYESLCPGCQEFIVDDLGKIFDYDLYTITDLKLFPFGNAELSDNLTVTCQHGEEECKLNALEACALRTWPDQKSQYSFIRCVESDTKGWESCVKNSGREKAINDCYNGDLSRKLILGYATKTKNLKPPHEYVPWVTLNGKPLDDSVQSTDDLVAQICNAYKGKTTLPKVCNSSASMSKSPERKWKLQVSYANKATNY

SEQ ID NO: 25758 - DNA, 1199 bp, Arabidopsis thaliana
  misc_feature (1)..(1199): Ceres Seq. ID no. 12324227
  misc_feature: MA Experiment ID: 108462 Result: Down-regulated in Transcription
  misc_feature: MA Experiment 108462 PARAMETER Experiment Name: At_Germinating_Seeds_cDNA_P Parameter: Age (day) Value: 2 vs. 0
  misc_feature: MA Experiment 108462 PARAMETER Experiment Name: At_Germinating_Seeds_cDNA_P Parameter: Tissue Value: Germinating Seeds
  misc_feature: MA Experiment ID: 108463 Result: Down-regulated in Transcription
  misc_feature: MA Experiment 108463 PARAMETER Experiment Name: At_Germinating_Seeds_cDNA_P Parameter: Age (day) Value: 3 vs. 0
  misc_feature: MA Experiment 108463 PARAMETER Experiment Name: At_Germinating_Seeds_cDNA_P Parameter: Tissue Value: Germinating Seeds
  misc_feature: MA Experiment ID: 108464 Result: Down-regulated in Transcription
  misc_feature: MA Experiment 108464 PARAMETER Experiment Name: At_Germinating_Seeds_cDNA_P Parameter: Age (day) Value: 4 vs. 0
  misc_feature: MA Experiment 108464 PARAMETER Experiment Name: At_Germinating_Seeds_cDNA_P Parameter: Tissue Value: Germinating Seeds
  misc_feature: MA Experiment ID: 108561 Result: Down-regulated in Transcription
  misc_feature: MA Experiment 108561 PARAMETER Experiment Name: At_100uM_ABA_cDNA_P Parameter: Timepoint (hr) Value: 6
  misc_feature: MA Experiment 108561 PARAMETER Experiment Name: At_100uM_ABA_cDNA_P Parameter: Tissue Value: Aerial
  misc_feature: MA Experiment 108561 PARAMETER Experiment Name: At_100uM_ABA_cDNA_P Parameter: Treatment Value: 100uM ABA vs. No Treatment
  misc_feature: MA Experiment ID: 108572 Result: Down-regulated in Transcription
  misc_feature: MA Experiment 108572 PARAMETER Experiment Name: At_Drought_cDNA_P Parameter: Timepoint (hr) Value: 1
  misc_feature: MA Experiment 108572 PARAMETER Experiment Name: At_Drought_cDNA_P Parameter: Tissue Value: Aerial
  misc_feature: MA Experiment 108572 PARAMETER Experiment Name: At_Drought_cDNA_P Parameter: Treatment Value: Drought vs. No Drought
  misc_feature: MA Experiment ID: 108573 Result: Down-regulated in Transcription
  misc_feature: MA Experiment 108573 PARAMETER Experiment Name: At_Drought_cDNA_P Parameter: Timepoint (hr) Value: 6
  misc_feature: MA Experiment 108573 PARAMETER Experiment Name: At_Drought_cDNA_P Parameter: Tissue Value: Aerial
  misc_feature: MA Experiment 108573 PARAMETER Experiment Name: At_Drought_cDNA_P Parameter: Treatment Value: Drought vs. No Drought
  misc_feature: MA Experiment ID: 108595 Result: Down-regulated in Transcription
  misc_feature: MA Experiment 108595 PARAMETER Experiment Name: At_Ler-pi_Ovule_cDNA_P Parameter: Plant Line Value: null
  misc_feature: MA Experiment ID: 108607 Result: Down-regulated in Transcription
  misc_feature: MA Experiment 108607 PARAMETER Experiment Name: At_100uM_ABA_cDNA_P Parameter: Timepoint (hr) Value: 4
  misc_feature: MA Experiment 108607 PARAMETER Experiment Name: At_100uM_ABA_cDNA_P Parameter: Tissue Value: Aerial
  misc_feature: MA Experiment 108607 PARAMETER Experiment Name: At_100uM_ABA_cDNA_P Parameter: Treatment Value: 100uM ABA vs. No Treatment
  misc_feature: MA Experiment ID: 20000185 Result: Down-regulated in Transcription
  misc_feature: MA Experiment 20000185 PARAMETER Experiment Name: At_Roots__P Parameter: Age (day) Value: 7 vs. 21
  misc_feature: MA Experiment 20000185 PARAMETER Experiment Name: At_Roots__P Parameter: Organism Value: A. thaliana
  misc_feature: MA Experiment 20000185 PARAMETER Experiment Name: At_Roots__P Parameter: Tissue Value: Roots vs. Whole Plant
  misc_feature: MA Experiment ID: 20000437 Result: Down-regulated in Transcription
  misc_feature: MA Experiment 20000437 PARAMETER Experiment Name: At_Drought_P Parameter: Age (day) Value: 8
  misc_feature: MA Experiment 20000437 PARAMETER Experiment Name: At_Drought_P Parameter: Organism Value: A. thaliana
  misc_feature: MA Experiment 20000437 PARAMETER Experiment Name: At_Drought_P Parameter: Plant Line Value: WS
  misc_feature: MA Experiment 20000437 PARAMETER Experiment Name: At_Drought_P Parameter: Timepoint (hr) Value: 24
  misc_feature: MA Experiment 20000437 PARAMETER Experiment Name: At_Drought_P Parameter: Tissue Value: Whole Plant
  misc_feature: MA Experiment 20000437 PARAMETER Experiment Name: At_Drought_P Parameter: Treatment Value: Drought vs. No Drought
  misc_feature: MA Experiment ID: 20000495 Result: Down-regulated in Transcription
  misc_feature: MA Experiment 20000495 PARAMETER Experiment Name: At_Guard_Cells_P Parameter: Harvest Date Value: 8/2/2002
  misc_feature: MA Experiment 20000495 PARAMETER Experiment Name: At_Guard_Cells_P Parameter: Organism Value: A. thaliana
  misc_feature: MA Experiment 20000495 PARAMETER Experiment Name: At_Guard_Cells_P Parameter: Tissue Value: Guard Cells vs. Leaves
  misc_feature: MA Experiment ID: 20001451 Result: Down-regulated in Transcription
  misc_feature: MA Experiment 20001451 PARAMETER Experiment Name: At_Far-red-induction_P Parameter: Age (day) Value: 7
  misc_feature: MA Experiment 20001451 PARAMETER Experiment Name: At_Far-red-induction_P Parameter: Light Value: Far-red vs. White
  misc_feature: MA Experiment 20001451 PARAMETER Experiment Name: At_Far-red-induction_P Parameter: Organism Value: A. thaliana
  misc_feature: MA Experiment 20001451 PARAMETER Experiment Name: At_Far-red-induction_P Parameter: Plant Line Value: Columbia
  misc_feature: MA Experiment 20001451 PARAMETER Experiment Name: At_Far-red-induction_P Parameter: Timepoint (hr) Value: 24
  misc_feature: MA Experiment 20001451 PARAMETER Experiment Name: At_Far-red-induction_P Parameter: Tissue Value: Whole Plant
gagaaactgtgaggccaaaaagtttggttcttgagaaatgatggcggctcgtactcattgtatcaaccttatccccaaagtatgtcttccacaatccttcagaactggagaatcagtgactaatctcagatttgattgcgtctctaagtcatcgaagctttctctcaagacatcatgtggaagatcaagaacgcatcaccggaggcaaaatctcagcatccggtccgtgtttactggaatcgtggaggaaatgggtgaagtcaaggacttgggaatggccgatcacggaggattcgacctcaaaatcggagcgagagtggtgttagaggacgtgaagctcggtgacagtatcgccgtgaacggtacttgtttaacggtgacggagtttaacgcagaggagttcacagtagggttagcaccggagacgctgagaaaaacatcgttggaggagttaaagaaaggatctccggtgaatctggagcgtgcgttgcagccagtgagcaggatgggtggacacgtggttcagggacacgtggatgggacgggagtgattgaatcaatggaggtagagggtgattctttgtgggtgaaggtgaaagctgacaagggtttgttgaaatacattgtgcctaaaggatttgtggctgttgatgggactagcttgacggttgttgatgtgtttgatgaagagagctgtttcaatttcatgatgattgcttatacgcaacagaatgtagtgattccgactaagaagattgggcagaaagtgaatcttgaggttgatatcatggggaagtatgttgagaggcttctcaccagtggtggcttctccaaaggaaaagaaaatatttgatttgatgggacttgggagtgggagctttgttgagcggagcttgaccttttggcctggggttatatgtatcttaacctctgtttcttcgtaatggtgctagtgaacagtccacgcatttaggcgcggtgagaaaagtaaatcaaccttattgagtaatgatgatcaaatcattcgtgtaataaacccagaataaattttgtaatatggcagtgccccttttaaaacttagattctgttatgcttttgttagaccttcatatgtatatctttaagtgtttcgagaagtttataagaaagggagttgtatacataagaccaagaggcatatataaatgtgtttttaccc

SEQ ID NO: 25759 - protein, 271 aa, Arabidopsis thaliana
  peptide (1)..(271): Ceres Seq. ID no. 12324228
  misc_feature (163)..(249): Pfam Name: Lumazine binding domain Pfam Description: Lumazine binding domain
  misc_feature (64)..(257): Homolog of NCBI NO: 18252608 NR Description: riboflavin synthase [Pichia guilliermondii]
  misc_feature (64)..(271): Homolog of NCBI NO: 1710403 NR Description: Riboflavin synthase alpha chain
  misc_feature (64)..(271): Homolog of NCBI NO: 32034736 NR Description: hypothetical protein
  misc_feature (64)..(259): Homolog of NCBI NO: 19075812 NR Description: riboflavin synthase alpha chain
  misc_feature (64)..(259): Homolog of NCBI NO: 23020140 NR Description: hypothetical protein [Clostridium thermocellum
  misc_feature (64)..(269): Homolog of NCBI NO: 28210396 NR Description: riboflavin synthase alpha chain [Clostridium
  misc_feature (54)..(259): Homolog of NCBI NO: 22971150 NR Description: hypothetical protein [Chloroflexus aurantiacus]
  misc_feature (72)..(267): Homolog of NCBI NO: 25287068 NR Description: probable riboflavin synthase alpha chain
  misc_feature (2)..(271): Homolog of NCBI NO: 21593865 NR Description: putative riboflavin synthase alpha chain
  misc_feature (1)..(271): Homolog of NCBI NO: 18399445 NR Description: putative riboflavin synthase alpha chain
MMAARTHCINLIPKVCLPQSFRTGESVTNLRFDCVSKSSKLSLKTSCGRSRTHHRRQNLSIRSVFTGIVEEMGEVKDLGMADHGGFDLKIGARVVLEDVKLGDSIAVNGTCLTVTEFNAEEFTVGLAPETLRKTSLEELKKGSPVNLERALQPVSRMGGHVVQGHVDGTGVIESMEVEGDSLWVKVKADKGLLKYIVPKGFVAVDGTSLTVVDVFDEESCFNFMMIAYTQQNVVIPTKKIGQKVNLEVDIMGKYVERLLTSGGFSKGKENI

SEQ ID NO: 25760 - protein, 270 aa, Arabidopsis thaliana
  peptide (1)..(270): Ceres Seq. ID no. 12324229
  misc_feature (162)..(248): Pfam Name: Lumazine binding domain Pfam Description: Lumazine binding domain
  misc_feature (63)..(256): Homolog of NCBI NO: 18252608 NR Description: riboflavin synthase [Pichia guilliermondii]
  misc_feature (63)..(270): Homolog of NCBI NO: 1710403 NR Description: Riboflavin synthase alpha chain
  misc_feature (63)..(270): Homolog of NCBI NO: 32034736 NR Description: hypothetical protein
  misc_feature (63)..(258): Homolog of NCBI NO: 19075812 NR Description: riboflavin synthase alpha chain
  misc_feature (63)..(258): Homolog of NCBI NO: 23020140 NR Description: hypothetical protein [Clostridium thermocellum
  misc_feature (63)..(268): Homolog of NCBI NO: 28210396 NR Description: riboflavin synthase alpha chain [Clostridium
  misc_feature (53)..(258): Homolog of NCBI NO: 22971150 NR Description: hypothetical protein [Chloroflexus aurantiacus]
  misc_feature (71)..(266): Homolog of NCBI NO: 25287068 NR Description: probable riboflavin synthase alpha chain
  misc_feature (1)..(270): Homolog of NCBI NO: 21593865 NR Description: putative riboflavin synthase alpha chain
  misc_feature (1)..(270): Homolog of NCBI NO: 18399445 NR Description: putative riboflavin synthase alpha chain
MAARTHCINLIPKVCLPQSFRTGESVTNLRFDCVSKSSKLSLKTSCGRSRTHHRRQNLSIRSVFTGIVEEMGEVKDLGMADHGGFDLKIGARVVLEDVKLGDSIAVNGTCLTVTEFNAEEFTVGLAPETLRKTSLEELKKGSPVNLERALQPVSRMGGHVVQGHVDGTGVIESMEVEGDSLWVKVKADKGLLKYIVPKGFVAVDGTSLTVVDVFDEESCFNFMMIAYTQQNVVIPTKKIGQKVNLEVDIMGKYVERLLTSGGFSKGKENI

SEQ ID NO: 25761 - protein, 200 aa, Arabidopsis thaliana
  peptide (1)..(200): Ceres Seq. ID no. 12324230
  misc_feature (92)..(178): Pfam Name: Lumazine binding domain Pfam Description: Lumazine binding domain
  misc_feature (1)..(186): Homolog of NCBI NO: 18252608 NR Description: riboflavin synthase [Pichia guilliermondii]
  misc_feature (1)..(200): Homolog of NCBI NO: 1710403 NR Description: Riboflavin synthase alpha chain
  misc_feature (1)..(200): Homolog of NCBI NO: 32034736 NR Description: hypothetical protein
  misc_feature (1)..(188): Homolog of NCBI NO: 19075812 NR Description: riboflavin synthase alpha chain
  misc_feature (1)..(188): Homolog of NCBI NO: 23020140 NR Description: hypothetical protein [Clostridium thermocellum
  misc_feature (1)..(198): Homolog of NCBI NO: 28210396 NR Description: riboflavin synthase alpha chain [Clostridium
  misc_feature (1)..(188): Homolog of NCBI NO: 22971150 NR Description: hypothetical protein [Chloroflexus aurantiacus]
  misc_feature (1)..(196): Homolog of NCBI NO: 25287068 NR Description: probable riboflavin synthase alpha chain
  misc_feature (1)..(200): Homolog of NCBI NO: 21593865 NR Description: putative riboflavin synthase alpha chain
  misc_feature (1)..(200): Homolog of NCBI NO: 18399445 NR Description: putative riboflavin synthase alpha chain
MGEVKDLGMADHGGFDLKIGARVVLEDVKLGDSIAVNGTCLTVTEFNAEEFTVGLAPETLRKTSLEELKKGSPVNLERALQPVSRMGGHVVQGHVDGTGVIESMEVEGDSLWVKVKADKGLLKYIVPKGFVAVDGTSLTVVDVFDEESCFNFMMIAYTQQNVVIPTKKIGQKVNLEVDIMGKYVERLLTSGGFSKGKENI

SEQ ID NO: 25762 - DNA, 1090 bp, Arabidopsis thaliana
  misc_feature (1)..(1090): Ceres Seq. ID no. 12384969
  misc_feature: MA Experiment ID: 108434 Result: Down-regulated in Transcription
  misc_feature: MA Experiment 108434 PARAMETER Experiment Name: At_Root_Tips_cDNA_P Parameter: Tissue Value: Root Tips
  misc_feature: MA Experiment ID: 20000069 Result: Up-regulated in Transcription
  misc_feature: MA Experiment 20000069 PARAMETER Experiment Name: At_100uM_ABA_Mutants_cDNA_P Parameter: Plant Line Value: CS23
  misc_feature: MA Experiment 20000069 PARAMETER Experiment Name: At_100uM_ABA_Mutants_cDNA_P Parameter: Timepoint (hr) Value: 6
  misc_feature: MA Experiment 20000069 PARAMETER Experiment Name: At_100uM_ABA_Mutants_cDNA_P Parameter: Tissue Value: Aerial
  misc_feature: MA Experiment 20000069 PARAMETER Experiment Name: At_100uM_ABA_Mutants_cDNA_P Parameter: Treatment Value: 100uM ABA vs. No Treatment
  misc_feature: MA Experiment ID: 20000072 Result: Up-regulated in Transcription
  misc_feature: MA Experiment 20000072 PARAMETER Experiment Name: At_100uM_ABA_Mutants_cDNA_P Parameter: Plant Line Value: CS8105
  misc_feature: MA Experiment 20000072 PARAMETER Experiment Name: At_100uM_ABA_Mutants_cDNA_P Parameter: Timepoint (hr) Value: 6
  misc_feature: MA Experiment 20000072 PARAMETER Experiment Name: At_100uM_ABA_Mutants_cDNA_P Parameter: Tissue Value: Aerial
  misc_feature: MA Experiment 20000072 PARAMETER Experiment Name: At_100uM_ABA_Mutants_cDNA_P Parameter: Treatment Value: 100uM ABA vs. No Treatment
  misc_feature: MA Experiment ID: 20000088 Result: Up-regulated in Transcription
  misc_feature: MA Experiment 20000088 PARAMETER Experiment Name: At_100uM_ABA_Mutants_cDNA_P Parameter: Plant Line Value: Landsberg
  misc_feature: MA Experiment 20000088 PARAMETER Experiment Name: At_100uM_ABA_Mutants_cDNA_P Parameter: Timepoint (hr) Value: 6
  misc_feature: MA Experiment 20000088 PARAMETER Experiment Name: At_100uM_ABA_Mutants_cDNA_P Parameter: Tissue Value: Aerial
  misc_feature: MA Experiment 20000088 PARAMETER Experiment Name: At_100uM_ABA_Mutants_cDNA_P Parameter: Treatment Value: 100uM ABA vs. No Treatment
  misc_feature: MA Experiment ID: 20000451 Result: Up-regulated in Transcription
  misc_feature: MA Experiment 20000451 PARAMETER Experiment Name: At_CS6879_Shoots-Roots_P Parameter: Age (day) Value: 14
  misc_feature: MA Experiment 20000451 PARAMETER Experiment Name: At_CS6879_Shoots-Roots_P Parameter: Organism Value: A. thaliana
  misc_feature: MA Experiment 20000451 PARAMETER Experiment Name: At_CS6879_Shoots-Roots_P Parameter: Plant Line Value: CS6879 vs. WS
  misc_feature: MA Experiment 20000451 PARAMETER Experiment Name: At_CS6879_Shoots-Roots_P Parameter: Tissue Value: Roots
  misc_feature: MA Experiment ID: 20000794 Result: Up-regulated in Transcription
  misc_feature: MA Experiment 20000794 PARAMETER Experiment Name: At_Petals_P Parameter: Age (day) Value: 23-25 days
  misc_feature: MA Experiment 20000794 PARAMETER Experiment Name: At_Petals_P Parameter: Plant Line Value: WS
  misc_feature: MA Experiment 20000794 PARAMETER Experiment Name: At_Petals_P Parameter: Tissue Value: Petals vs. Whole plant
attttattttgtcttaaagcttttggcgagtttgcttgtgtgtgagtgtgtggttatggactctccgttcaaacctgatgtcgtcagaggtcaagtggctctcatcaccggtggtggatccggtatcggttttgagatctcttctcagtttggcaaacatggagcttctatcgctatcatgggacgacgaaaacaagtcctcgatgacgccgtctctgctcttcgatctcttggaatccaggctattggattggaaggtgatgttcgtaagcaagaagatgcgagaagagttgtggaagcaacttttcagcattttggtaaacttgatattcttgttaacgccgctgctggcaattttctggctgctgctgaggatttgtctcctaatggcttcagaacagtcttagacattgatgcggtaggaacattcaacatgtgtcacgcagctctcaagtatcttaagaaaggagcgcctggaagagactcatcaagcggtggaggttcgattattaacattagcgcgactttgcactacacggcttcttggtaccaaatacatgtctctgcagccaaggctgcagttgatgctaccacaagaaacttggcattggagtggggaactgactatgatattagagtgaacgggattgctccaggtcctattggaggtacacctggaatgagtaaacttgtacctgaggagattgaaaacaaaaccagagagtacatgcctctttataaagttggagagaagtgggatatcgctatggctgcactctacctcagctgtgattctgggaaatatgtgagcggactaacaatggtggtagatggaggactgtggcttagcaaacctcgccacttgcctaaagaagcggtgaagcaactctctcgtgcggtggagaagaggtctagggccaagcctgttggtctcccaaccagcaagctgtagatcatttgaatttcagatatcaaataagtgcacattgaaaaaatgttttggtttattgaattacattggagactgagaaaatggtattaagattatgtagatcaaactatcttatgcacaataaagtagctttctttc

SEQ ID NO: 25763 - protein, 316 aa, Arabidopsis thaliana
  peptide (1)..(316): Ceres Seq. ID no. 12384970
  misc_feature (30)..(298): Homolog of NCBI NO: 23026255 NR Description: hypothetical protein [Microbulbifer degradans
  misc_feature (23)..(279): Homolog of NCBI NO: 15805153 NR Description: oxidoreductase, short-chain
  misc_feature (23)..(285): Homolog of NCBI NO: 10190704 NR Description: peroxisomal 2,4-dienoyl-CoA reductase [Homo
  misc_feature (23)..(288): Homolog of NCBI NO: 25282441 NR Description: 2-4-dienoyl-Coenzyme A reductase 2, peroxisomal
  misc_feature (179)..(307): Homolog of NCBI NO: 25518735 NR Description: hypothetical protein F28J9.2 - Arabidopsis
  misc_feature (23)..(285): Homolog of NCBI NO: 6753622 NR Description: 2-4-dienoyl-Coenzyme A reductase 2, peroxisomal
  misc_feature (23)..(288): Homolog of NCBI NO: 39795780 NR Description: Unknown (protein for IMAGE:5307739) [Silurana
  misc_feature (145)..(291): Homolog of NCBI NO: 15226036 NR Description: unknown protein; protein id: At2g07640.1
  misc_feature (17)..(316): Homolog of NCBI NO: 38347363 NR Description: OSJNBa0070C17.24 [Oryza sativa (japonica
  misc_feature (19)..(316): Homolog of NCBI NO: 30682333 NR Description: expressed protein [Arabidopsis thaliana]
FYFVLKLLASLLVCECVVMDSPFKPDVVRGQVALITGGGSGIGFEISSQFGKHGASIAIMGRRKQVLDDAVSALRSLGIQAIGLEGDVRKQEDARRVVEATFQHFGKLDILVNAAAGNFLAAAEDLSPNGFRTVLDIDAVGTFNMCHAALKYLKKGAPGRDSSSGGGSIINISATLHYTASWYQIHVSAAKAAVDATTRNLALEWGTDYDIRVNGIAPGPIGGTPGMSKLVPEEIENKTREYMPLYKVGEKWDIAMAALYLSCDSGKYVSGLTMVVDGGLWLSKPRHLPKEAVKQLSRAVEKRSRAKPVGLPTSKL

SEQ ID NO: 25764 - protein, 298 aa, Arabidopsis thaliana
  peptide (1)..(298): Ceres Seq. ID no. 12384971
  misc_feature (12)..(280): Homolog of NCBI NO: 23026255 NR Description: hypothetical protein [Microbulbifer degradans
  misc_feature (5)..(261): Homolog of NCBI NO: 15805153 NR Description: oxidoreductase, short-chain
  misc_feature (5)..(267): Homolog of NCBI NO: 10190704 NR Description: peroxisomal 2,4-dienoyl-CoA reductase [Homo
  misc_feature (5)..(270): Homolog of NCBI NO: 25282441 NR Description: 2-4-dienoyl-Coenzyme A reductase 2, peroxisomal
  misc_feature (161)..(289): Homolog of NCBI NO: 25518735 NR Description: hypothetical protein F28J9.2 - Arabidopsis
  misc_feature (5)..(267): Homolog of NCBI NO: 6753622 NR Description: 2-4-dienoyl-Coenzyme A reductase 2, peroxisomal
  misc_feature (5)..(270): Homolog of NCBI NO: 39795780 NR Description: Unknown (protein for IMAGE:5307739) [Silurana
  misc_feature (127)..(273): Homolog of NCBI NO: 15226036 NR Description: unknown protein; protein id: At2g07640.1
  misc_feature (1)..(298): Homolog of NCBI NO: 38347363 NR Description: OSJNBa0070C17.24 [Oryza sativa (japonica
  misc_feature (1)..(298): Homolog of NCBI NO: 30682333 NR Description: expressed protein [Arabidopsis thaliana]
MDSPFKPDVVRGQVALITGGGSGIGFEISSQFGKHGASIAIMGRRKQVLDDAVSALRSLGIQAIGLEGDVRKQEDARRVVEATFQHFGKLDILVNAAAGNFLAAAEDLSPNGFRTVLDIDAVGTFNMCHAALKYLKKGAPGRDSSSGGGSIINISATLHYTASWYQIHVSAAKAAVDATTRNLALEWGTDYDIRVNGIAPGPIGGTPGMSKLVPEEIENKTREYMPLYKVGEKWDIAMAALYLSCDSGKYVSGLTMVVDGGLWLSKPRHLPKEAVKQLSRAVEKRSRAKPVGLPTSKL

SEQ ID NO: 25765 - protein, 257 aa, Arabidopsis thaliana
  peptide (1)..(257): Ceres Seq. ID no. 12384972
  misc_feature (1)..(239): Homolog of NCBI NO: 23026255 NR Description: hypothetical protein [Microbulbifer degradans
  misc_feature (1)..(220): Homolog of NCBI NO: 15805153 NR Description: oxidoreductase, short-chain
  misc_feature (1)..(226): Homolog of NCBI NO: 10190704 NR Description: peroxisomal 2,4-dienoyl-CoA reductase [Homo
  misc_feature (1)..(229): Homolog of NCBI NO: 25282441 NR Description: 2-4-dienoyl-Coenzyme A reductase 2, peroxisomal
  misc_feature (120)..(248): Homolog of NCBI NO: 25518735 NR Description: hypothetical protein F28J9.2 - Arabidopsis
  misc_feature (1)..(226): Homolog of NCBI NO: 6753622 NR Description: 2-4-dienoyl-Coenzyme A reductase 2, peroxisomal
  misc_feature (1)..(229): Homolog of NCBI NO: 39795780 NR Description: Unknown (protein for IMAGE:5307739) [Silurana
  misc_feature (86)..(232): Homolog of NCBI NO: 15226036 NR Description: unknown protein; protein id: At2g07640.1
  misc_feature (1)..(257): Homolog of NCBI NO: 38347363 NR Description: OSJNBa0070C17.24 [Oryza sativa (japonica
  misc_feature (1)..(257): Homolog of NCBI NO: 30682333 NR Description: expressed protein [Arabidopsis thaliana]
MGRRKQVLDDAVSALRSLGIQAIGLEGDVRKQEDARRVVEATFQHFGKLDILVNAAAGNFLAAAEDLSPNGFRTVLDIDAVGTFNMCHAALKYLKKGAPGRDSSSGGGSIINISATLHYTASWYQIHVSAAKAAVDATTRNLALEWGTDYDIRVNGIAPGPIGGTPGMSKLVPEEIENKTREYMPLYKVGEKWDIAMAALYLSCDSGKYVSGLTMVVDGGLWLSKPRHLPKEAVKQLSRAVEKRSRAKPVGLPTSKL

SEQ ID NO: 25766 - DNA, 767 bp, Arabidopsis thaliana
  misc_feature (1)..(767): Ceres Seq. ID no. 12323688
  misc_feature: MA Experiment ID: 108461 Result: Up-regulated in Transcription
  misc_feature: MA Experiment 108461 PARAMETER Experiment Name: At_Germinating_Seeds_cDNA_P Parameter: Age (day) Value: 1 vs. 0
  misc_feature: MA Experiment 108461 PARAMETER Experiment Name: At_Germinating_Seeds_cDNA_P Parameter: Tissue Value: Germinating Seeds
  misc_feature: MA Experiment ID: 108462 Result: Up-regulated in Transcription
  misc_feature: MA Experiment 108462 PARAMETER Experiment Name: At_Germinating_Seeds_cDNA_P Parameter: Age (day) Value: 2 vs. 0
  misc_feature: MA Experiment 108462 PARAMETER Experiment Name: At_Germinating_Seeds_cDNA_P Parameter: Tissue Value: Germinating Seeds
  misc_feature: MA Experiment ID: 108463 Result: Up-regulated in Transcription
  misc_feature: MA Experiment 108463 PARAMETER Experiment Name: At_Germinating_Seeds_cDNA_P Parameter: Age (day) Value: 3 vs. 0
  misc_feature: MA Experiment 108463 PARAMETER Experiment Name: At_Germinating_Seeds_cDNA_P Parameter: Tissue Value: Germinating Seeds
  misc_feature: MA Experiment ID: 108464 Result: Up-regulated in Transcription
  misc_feature: MA Experiment 108464 PARAMETER Experiment Name: At_Germinating_Seeds_cDNA_P Parameter: Age (day) Value: 4 vs. 0
  misc_feature: MA Experiment 108464 PARAMETER Experiment Name: At_Germinating_Seeds_cDNA_P Parameter: Tissue Value: Germinating Seeds
  misc_feature: MA Experiment ID: 108595 Result: Up-regulated in Transcription
  misc_feature: MA Experiment 108595 PARAMETER Experiment Name: At_Ler-pi_Ovule_cDNA_P Parameter: Plant Line Value: null
  misc_feature: MA Experiment ID: 20000112 Result: Up-regulated in Transcription
  misc_feature: MA Experiment 20000112 PARAMETER Experiment Name: At_42deg_Heat_cDNA_P Parameter: Temperature (deg C) Value: 42 vs. 22
  misc_feature: MA Experiment 20000112 PARAMETER Experiment Name: At_42deg_Heat_cDNA_P Parameter: Timepoint (hr) Value: 2
  misc_feature: MA Experiment 20000112 PARAMETER Experiment Name: At_42deg_Heat_cDNA_P Parameter: Tissue Value: Aerial
  misc_feature: MA Experiment ID: 20000113 Result: Up-regulated in Transcription
  misc_feature: MA Experiment 20000113 PARAMETER Experiment Name: At_42deg_Heat_cDNA_P Parameter: Temperature (deg C) Value: 42 vs. 22
  misc_feature: MA Experiment 20000113 PARAMETER Experiment Name: At_42deg_Heat_cDNA_P Parameter: Timepoint (hr) Value: 8
  misc_feature: MA Experiment 20000113 PARAMETER Experiment Name: At_42deg_Heat_cDNA_P Parameter: Tissue Value: Aerial
  misc_feature: MA Experiment ID: 20000180 Result: Up-regulated in Transcription
  misc_feature: MA Experiment 20000180 PARAMETER Experiment Name: At_Germinating_Seeds_P Parameter: Age (hr) Value: 24 vs. 0
  misc_feature: MA Experiment 20000180 PARAMETER Experiment Name: At_Germinating_Seeds_P Parameter: Tissue Value: Germinating Seeds
  misc_feature: MA Experiment ID: 20000185 Result: Up-regulated in Transcription
  misc_feature: MA Experiment 20000185 PARAMETER Experiment Name: At_Roots__P Parameter: Age (day) Value: 7 vs. 21
  misc_feature: MA Experiment 20000185 PARAMETER Experiment Name: At_Roots__P Parameter: Organism Value: A. thaliana
  misc_feature: MA Experiment 20000185 PARAMETER Experiment Name: At_Roots__P Parameter: Tissue Value: Roots vs. Whole Plant
  misc_feature: MA Experiment ID: 20000227 Result: Up-regulated in Transcription
  misc_feature: MA Experiment 20000227 PARAMETER Experiment Name: At_Root-Tips-vs-Tops_P Parameter: Tissue Value: Root Tips vs. Root Tops
  misc_feature: MA Experiment ID: 20000307 Result: Up-regulated in Transcription
  misc_feature: MA Experiment 20000307 PARAMETER Experiment Name: At_Germinating_Seeds_Sub_P Parameter: Age (hr) Value: 24 vs. 0
  misc_feature: MA Experiment 20000307 PARAMETER Experiment Name: At_Germinating_Seeds_Sub_P Parameter: Organism Value: A. thaliana
  misc_feature: MA Experiment 20000307 PARAMETER Experiment Name: At_Germinating_Seeds_Sub_P Parameter: Plant Line Value: WS
  misc_feature: MA Experiment 20000307 PARAMETER Experiment Name: At_Germinating_Seeds_Sub_P Parameter: Tissue Value: Germinating Seeds
  misc_feature: MA Experiment ID: 20000314 Result: Up-regulated in Transcription
  misc_feature: MA Experiment 20000314 PARAMETER Experiment Name: At_14day_Shoots-Roots_Sub_P Parameter: Age (day) Value: 14
  misc_feature: MA Experiment 20000314 PARAMETER Experiment Name: At_14day_Shoots-Roots_Sub_P Parameter: Organism Value: A. thaliana
  misc_feature: MA Experiment 20000314 PARAMETER Experiment Name: At_14day_Shoots-Roots_Sub_P Parameter: Plant Line Value: WS
  misc_feature: MA Experiment 20000314 PARAMETER Experiment Name: At_14day_Shoots-Roots_Sub_P Parameter: Tissue Value: Roots vs. Whole Plant
  misc_feature: MA Experiment ID: 20000439 Result: Up-regulated in Transcription
  misc_feature: MA Experiment 20000439 PARAMETER Experiment Name: At_Roots__P Parameter: Age (day) Value: 14 vs. 21
  misc_feature: MA Experiment 20000439 PARAMETER Experiment Name: At_Roots__P Parameter: Organism Value: A. thaliana
  misc_feature: MA Experiment 20000439 PARAMETER Experiment Name: At_Roots__P Parameter: Tissue Value: Roots vs. Whole Plant
  misc_feature: MA Experiment ID: 20000527 Result: Down-regulated in Transcription
  misc_feature: MA Experiment 20000527 PARAMETER Experiment Name: At_10percent_PEG_P Parameter: Age (day) Value: 20
  misc_feature: MA Experiment 20000527 PARAMETER Experiment Name: At_10percent_PEG_P Parameter: Organism Value: A. thaliana
  misc_feature: MA Experiment 20000527 PARAMETER Experiment Name: At_10percent_PEG_P Parameter: Plant Line Value: WS
  misc_feature: MA Experiment 20000527 PARAMETER Experiment Name: At_10percent_PEG_P Parameter: Timepoint (day) Value: 20
  misc_feature: MA Experiment 20000527 PARAMETER Experiment Name: At_10percent_PEG_P Parameter: Tissue Value: Whole Plant
  misc_feature: MA Experiment 20000527 PARAMETER Experiment Name: At_10percent_PEG_P Parameter: Treatment Value: 10percent PEG vs. No Treatment
aaatatggcaacaacgtgacagcatctaagtcttcttggttttaagacgtgaccagcctaacgacccaaccaaactacttgtctattcttcctcccaccctctaaaacccccctaccttctctactttcagatcatcaagccccaatttcaagcagagaacaatggctaattcagcgtctgggatgcacgttagcgatgagtgcaagctcaagttcttggagttaaaagcaaagaggaactataggttcattgtgttcaaaattgatgagaaggctcagcaagttatgatagacaagcttgggaatccagaagaaacttacgaagatttcaccagatctattcccgaggatgagtgccgatatgctgtctatgactatgatttcaccacccctgagaactgccagaagagcaaaatctttttcatcgcatggtcacctgatacatcaagagtgaggagtaagatgttgtatgcaagctcaaaggacaggttcaagagggaattggatgggattcaagttgaattgcaagcaacagatcctagcgagatgagcctcgacatcatcaagggacgagtcaatctctgaatggaacttaccgcatcttaattcgtttcagtcaaaattcatattttctgctttcgttttcttgggtatttttcatttaacttctttactatttgtatcttctgtgattcaagatctcacctctttcttttttccttttcggtacgcaataatcatcccaatagataattactttgcttccc

SEQ ID NO: 25767 - protein, 140 aa, Arabidopsis thaliana
  peptide (1)..(140): Ceres Seq. ID no. 12323689
  misc_feature (12)..(139): Pfam Name: Cofilin/tropomyosin-type actin-binding protein Pfam Description: Cofilin/tropomyosin-type actin-binding protein
  misc_feature (1)..(137): Homolog of NCBI NO: 22857914 NR Description: pollen specific actin-depolymerizing factor 2
  misc_feature (1)..(137): Homolog of NCBI NO: 231509 NR Description: Actin-depolymerizing factor (ADF)
  misc_feature (8)..(140): Homolog of NCBI NO: 7441448 NR Description: actin-depolymerizing factor F6N23.12 -
  misc_feature (1)..(137): Homolog of NCBI NO: 22857912 NR Description: pollen specific actin-depolymerizing factor 1
  misc_feature (1)..(137): Homolog of NCBI NO: 18423381 NR Description: actin depolymerizing factor-like
  misc_feature (1)..(137): Homolog of NCBI NO: 38345587 NR Description: OSJNBb0012E24.5 [Oryza sativa (japonica
  misc_feature (1)..(137): Homolog of NCBI NO: 21537061 NR Description: actin depolymerizing factor-like [Arabidopsis
  misc_feature (1)..(139): Homolog of NCBI NO: 17366768 NR Description: Actin-depolymerizing factor 1 (ADF 1)
  misc_feature (1)..(140): Homolog of NCBI NO: 18411410 NR Description: putative actin-depolymerizing factor
  misc_feature (1)..(140): Homolog of NCBI NO: 15223471 NR Description: actin depolymerizing factor, putative
MANSASGMHVSDECKLKFLELKAKRNYRFIVFKIDEKAQQVMIDKLGNPEETYEDFTRSIPEDECRYAVYDYDFTTPENCQKSKIFFIAWSPDTSRVRSKMLYASSKDRFKRELDGIQVELQATDPSEMSLDIIKGRVNL

SEQ ID NO: 25768 - protein, 133 aa, Arabidopsis thaliana
  peptide (1)..(133): Ceres Seq. ID no. 12323690
  misc_feature (5)..(132): Pfam Name: Cofilin/tropomyosin-type actin-binding protein Pfam Description: Cofilin/tropomyosin-type actin-binding protein
  misc_feature (1)..(132): Homolog of NCBI NO: 17366768 NR Description: Actin-depolymerizing factor 1 (ADF 1)
  misc_feature (1)..(130): Homolog of NCBI NO: 22857912 NR Description: pollen specific actin-depolymerizing factor 1
  misc_feature (1)..(130): Homolog of NCBI NO: 21537061 NR Description: actin depolymerizing factor-like [Arabidopsis
  misc_feature (1)..(130): Homolog of NCBI NO: 18423381 NR Description: actin depolymerizing factor-like
  misc_feature (1)..(130): Homolog of NCBI NO: 38345587 NR Description: OSJNBb0012E24.5 [Oryza sativa (japonica
  misc_feature (1)..(130): Homolog of NCBI NO: 22857914 NR Description: pollen specific actin-depolymerizing factor 2
  misc_feature (1)..(130): Homolog of NCBI NO: 231509 NR Description: Actin-depolymerizing factor (ADF)
  misc_feature (1)..(133): Homolog of NCBI NO: 7441448 NR Description: actin-depolymerizing factor F6N23.12 -
  misc_feature (1)..(133): Homolog of NCBI NO: 18411410 NR Description: putative actin-depolymerizing factor
  misc_feature (1)..(133): Homolog of NCBI NO: 15223471 NR Description: actin depolymerizing factor, putative
MHVSDECKLKFLELKAKRNYRFIVFKIDEKAQQVMIDKLGNPEETYEDFTRSIPEDECRYAVYDYDFTTPENCQKSKIFFIAWSPDTSRVRSKMLYASSKDRFKRELDGIQVELQATDPSEMSLDIIKGRVNL

SEQ ID NO: 25769 - protein, 99 aa, Arabidopsis thaliana
  peptide (1)..(99): Ceres Seq. ID no. 12323691
  misc_feature (1)..(98): Pfam Name: Cofilin/tropomyosin-type actin-binding protein Pfam Description: Cofilin/tropomyosin-type actin-binding protein
  misc_feature (1)..(98): Homolog of NCBI NO: 17366768 NR Description: Actin-depolymerizing factor 1 (ADF 1)
  misc_feature (1)..(96): Homolog of NCBI NO: 22857912 NR Description: pollen specific actin-depolymerizing factor 1
  misc_feature (1)..(96): Homolog of NCBI NO: 21537061 NR Description: actin depolymerizing factor-like [Arabidopsis
  misc_feature (1)..(96): Homolog of NCBI NO: 18423381 NR Description: actin depolymerizing factor-like
  misc_feature (1)..(96): Homolog of NCBI NO: 38345587 NR Description: OSJNBb0012E24.5 [Oryza sativa (japonica
  misc_feature (1)..(96): Homolog of NCBI NO: 22857914 NR Description: pollen specific actin-depolymerizing factor 2
  misc_feature (1)..(96): Homolog of NCBI NO: 231509 NR Description: Actin-depolymerizing factor (ADF)
  misc_feature (1)..(99): Homolog of NCBI NO: 7441448 NR Description: actin-depolymerizing factor F6N23.12 -
  misc_feature (1)..(99): Homolog of NCBI NO: 18411410 NR Description: putative actin-depolymerizing factor
  misc_feature (1)..(99): Homolog of NCBI NO: 15223471 NR Description: actin depolymerizing factor, putative
MIDKLGNPEETYEDFTRSIPEDECRYAVYDYDFTTPENCQKSKIFFIAWSPDTSRVRSKMLYASSKDRFKRELDGIQVELQATDPSEMSLDIIKGRVNL

SEQ ID NO: 25770 - DNA, 848 bp, Arabidopsis thaliana
  misc_feature (1)..(848): Ceres Seq. ID no. 13487287
  misc_feature: MA Experiment ID: 108434 Result: Up-regulated in Transcription
  misc_feature: MA Experiment 108434 PARAMETER Experiment Name: At_Root_Tips_cDNA_P Parameter: Tissue Value: Root Tips
  misc_feature: MA Experiment ID: 108462 Result: Down-regulated in Transcription
  misc_feature: MA Experiment 108462 PARAMETER Experiment Name: At_Germinating_Seeds_cDNA_P Parameter: Age (day) Value: 2 vs. 0
  misc_feature: MA Experiment 108462 PARAMETER Experiment Name: At_Germinating_Seeds_cDNA_P Parameter: Tissue Value: Germinating Seeds
  misc_feature: MA Experiment ID: 108463 Result: Down-regulated in Transcription
  misc_feature: MA Experiment 108463 PARAMETER Experiment Name: At_Germinating_Seeds_cDNA_P Parameter: Age (day) Value: 3 vs. 0
  misc_feature: MA Experiment 108463 PARAMETER Experiment Name: At_Germinating_Seeds_cDNA_P Parameter: Tissue Value: Germinating Seeds
  misc_feature: MA Experiment ID: 108488 Result: Up-regulated in Transcription
  misc_feature: MA Experiment ID: 108561 Result: Down-regulated in Transcription
  misc_feature: MA Experiment 108561 PARAMETER Experiment Name: At_100uM_ABA_cDNA_P Parameter: Timepoint (hr) Value: 6
  misc_feature: MA Experiment 108561 PARAMETER Experiment Name: At_100uM_ABA_cDNA_P Parameter: Tissue Value: Aerial
  misc_feature: MA Experiment 108561 PARAMETER Experiment Name: At_100uM_ABA_cDNA_P Parameter: Treatment Value: 100uM ABA vs. No Treatment
  misc_feature: MA Experiment ID: 108573 Result: Down-regulated in Transcription
  misc_feature: MA Experiment 108573 PARAMETER Experiment Name: At_Drought_cDNA_P Parameter: Timepoint (hr) Value: 6
  misc_feature: MA Experiment 108573 PARAMETER Experiment Name: At_Drought_cDNA_P Parameter: Tissue Value: Aerial
  misc_feature: MA Experiment 108573 PARAMETER Experiment Name: At_Drought_cDNA_P Parameter: Treatment Value: Drought vs. No Drought
  misc_feature: MA Experiment ID: 108595 Result: Down-regulated in Transcription
  misc_feature: MA Experiment 108595 PARAMETER Experiment Name: At_Ler-pi_Ovule_cDNA_P Parameter: Plant Line Value: null
  misc_feature: MA Experiment ID: 20000112 Result: Down-regulated in Transcription
  misc_feature: MA Experiment 20000112 PARAMETER Experiment Name: At_42deg_Heat_cDNA_P Parameter: Temperature (deg C) Value: 42 vs. 22
  misc_feature: MA Experiment 20000112 PARAMETER Experiment Name: At_42deg_Heat_cDNA_P Parameter: Timepoint (hr) Value: 2
  misc_feature: MA Experiment 20000112 PARAMETER Experiment Name: At_42deg_Heat_cDNA_P Parameter: Tissue Value: Aerial
  misc_feature: MA Experiment ID: 20000224 Result: Up-regulated in Transcription
  misc_feature: MA Experiment ID: 20000355 Result: Up-regulated in Transcription
  misc_feature: MA Experiment 20000355 PARAMETER Experiment Name: At_Siliques_Sub_P Parameter: Age (day) Value: 21
  misc_feature: MA Experiment 20000355 PARAMETER Experiment Name: At_Siliques_Sub_P Parameter: Organism Value: A. thaliana
  misc_feature: MA Experiment 20000355 PARAMETER Experiment Name: At_Siliques_Sub_P Parameter: Plant Line Value: WS
  misc_feature: MA Experiment 20000355 PARAMETER Experiment Name: At_Siliques_Sub_P Parameter: Tissue Value: Less Than 5mm Siliques vs. Whole Plant
  misc_feature: MA Experiment ID: 20001807 Result: Up-regulated in Transcription
  misc_feature: MA Experiment 20001807 PARAMETER Experiment Name: At_50mM_NH4NO3_L-to-H_Sub_P Parameter: Timepoint (hr) Value: 6
  misc_feature: MA Experiment 20001807 PARAMETER Experiment Name: At_50mM_NH4NO3_L-to-H_Sub_P Parameter: Tissue Value: Leaf
  misc_feature: MA Experiment 20001807 PARAMETER Experiment Name: At_50mM_NH4NO3_L-to-H_Sub_P Parameter: Treatment Value: 50mM NH4NO3 vs 100mM Mannitol
gatagattttacaccaccgaagccgaaaaaatgccggcggcgaagaggactcccaaggttaaccgtaaccctgacctaatcaggggagttggaaaatattcgaggtctcagatgtaccacaagagaggtttgtgggctatcaaggccaagaacggtggcgttttccctcgtcacgatgctcagccaaaggtcgacgctccggttgagaagcctgccaagttttatccggcggaagacgtcaagaagccgcttgttaacagacgcaagcctaagcctaccaagctaaaagccagcatcactccaggaactgtgttgatcattcttgctggtagattcaagggtaagagagttgtcttcctcaagcaactttcttctggtttgcttcttgtaacaggaccattcaagattaatggtgttccattgagacgtgttaaccaagcctatgtgattggaacctccacaaagattgacatttctggagtcaacactgagaaattcgatgacaagtattttggaaaggttgctgagaagaagaagaagaaaacagaaggcgaattcttcgaagctgagaaagaggagaagaaggagatcccacaggagaagaaggaagaccagaaaaccgttgatgctgctctgatcaaatccattgaagctgtcccagagctcaaggtttaccttggagccaggttctcattgagtcaaggaatgaaaccacatgagcttgttttctagatttcgtattgtttctcaaattttaagaatatctgtttccctgagtattttcatctttaatcgtccttggatcttaaagactattttctctgattttatatatcaaattttcgagt

SEQ ID NO: 25771 - protein, 243 aa, Arabidopsis thaliana
  peptide (1)..(243): Ceres Seq. ID no. 13487288
  misc_feature (136)..(243): Pfam Name: Ribosomal protein L6e Pfam Description: Ribosomal protein L6e
  misc_feature (5)..(48): Homolog of NCBI NO: 16758864 NR Description: ribosomal protein L6 [Rattus norvegicus]
  misc_feature (68)..(243): Homolog of NCBI NO: 16758864 NR Description: ribosomal protein L6 [Rattus norvegicus]
  misc_feature (59)..(243): Homolog of NCBI NO: 6012952 NR Description: 60S ribosomal protein L6 (YL 16 like) [Cyanophora
  misc_feature (26)..(243): Homolog of NCBI NO: 38344818 NR Description: OSJNBb0022F23.11 [Oryza sativa (japonica
  misc_feature (11)..(243): Homolog of NCBI NO: 7208784 NR Description: 60S ribosomal protein L6 [Cicer arietinum]
  misc_feature (11)..(243): Homolog of NCBI NO: 464621 NR Description: 60S RIBOSOMAL PROTEIN L6 (YL16-LIKE)
  misc_feature (11)..(243): Homolog of NCBI NO: 15221127 NR Description: 60S ribosomal protein L6 (RPL6B) [Arabidopsis
  misc_feature (11)..(243): Homolog of NCBI NO: 15221126 NR Description: 60S ribosomal protein L6 (RPL6C) [Arabidopsis
  misc_feature (11)..(243): Homolog of NCBI NO: 21593910 NR Description: 60S ribosomal protein L6, putative [Arabidopsis
  misc_feature (11)..(243): Homolog of NCBI NO: 15221798 NR Description: 60S ribosomal protein L6 (RPL6A) [Arabidopsis
DRFYTTEAEKMPAAKRTPKVNRNPDLIRGVGKYSRSQMYHKRGLWAIKAKNGGVFPRHDAQPKVDAPVEKPAKFYPAEDVKKPLVNRRKPKPTKLKASITPGTVLIILAGRFKGKRVVFLKQLSSGLLLVTGPFKINGVPLRRVNQAYVIGTSTKIDISGVNTEKFDDKYFGKVAEKKKKKTEGEFFEAEKEEKKEIPQEKKEDQKTVDAALIKSIEAVPELKVYLGARFSLSQGMKPHELVF

SEQ ID NO: 25772 - protein, 233 aa, Arabidopsis thaliana
  peptide (1)..(233): Ceres Seq. ID no. 13487289
  misc_feature (126)..(233): Pfam Name: Ribosomal protein L6e Pfam Description: Ribosomal protein L6e
  misc_feature (1)..(38): Homolog of NCBI NO: 16758864 NR Description: ribosomal protein L6 [Rattus norvegicus]
  misc_feature (58)..(233): Homolog of NCBI NO: 16758864 NR Description: ribosomal protein L6 [Rattus norvegicus]
  misc_feature (49)..(233): Homolog of NCBI NO: 6012952 NR Description: 60S ribosomal protein L6 (YL 16 like) [Cyanophora
  misc_feature (16)..(233): Homolog of NCBI NO: 38344818 NR Description: OSJNBb0022F23.11 [Oryza sativa (japonica
  misc_feature (1)..(233): Homolog of NCBI NO: 7208784 NR Description: 60S ribosomal protein L6 [Cicer arietinum]
  misc_feature (1)..(233): Homolog of NCBI NO: 464621 NR Description: 60S RIBOSOMAL PROTEIN L6 (YL16-LIKE)
  misc_feature (1)..(233): Homolog of NCBI NO: 15221127 NR Description: 60S ribosomal protein L6 (RPL6B) [Arabidopsis
  misc_feature (1)..(233): Homolog of NCBI NO: 15221126 NR Description: 60S ribosomal protein L6 (RPL6C) [Arabidopsis
  misc_feature (1)..(233): Homolog of NCBI NO: 21593910 NR Description: 60S ribosomal protein L6, putative [Arabidopsis
  misc_feature (1)..(233): Homolog of NCBI NO: 15221798 NR Description: 60S ribosomal protein L6 (RPL6A) [Arabidopsis
MPAAKRTPKVNRNPDLIRGVGKYSRSQMYHKRGLWAIKAKNGGVFPRHDAQPKVDAPVEKPAKFYPAEDVKKPLVNRRKPKPTKLKASITPGTVLIILAGRFKGKRVVFLKQLSSGLLLVTGPFKINGVPLRRVNQAYVIGTSTKIDISGVNTEKFDDKYFGKVAEKKKKKTEGEFFEAEKEEKKEIPQEKKEDQKTVDAALIKSIEAVPELKVYLGARFSLSQGMKPHELVF

SEQ ID NO: 25773 - protein, 206 aa, Arabidopsis thaliana
  peptide (1)..(206): Ceres Seq. ID no. 13487290
  misc_feature (99)..(206): Pfam Name: Ribosomal protein L6e Pfam Description: Ribosomal protein L6e
  misc_feature (1)..(11): Homolog of NCBI NO: 16758864 NR Description: ribosomal protein L6 [Rattus norvegicus]
  misc_feature (31)..(206): Homolog of NCBI NO: 16758864 NR Description: ribosomal protein L6 [Rattus norvegicus]
  misc_feature (22)..(206): Homolog of NCBI NO: 6012952 NR Description: 60S ribosomal protein L6 (YL 16 like) [Cyanophora
  misc_feature (1)..(206): Homolog of NCBI NO: 38344818 NR Description: OSJNBb0022F23.11 [Oryza sativa (japonica
  misc_feature (1)..(206): Homolog of NCBI NO: 7208784 NR Description: 60S ribosomal protein L6 [Cicer arietinum]
  misc_feature (1)..(206): Homolog of NCBI NO: 464621 NR Description: 60S RIBOSOMAL PROTEIN L6 (YL16-LIKE)
  misc_feature (1)..(206): Homolog of NCBI NO: 15221127 NR Description: 60S ribosomal protein L6 (RPL6B) [Arabidopsis
  misc_feature (1)..(206): Homolog of NCBI NO: 15221126 NR Description: 60S ribosomal protein L6 (RPL6C) [Arabidopsis
  misc_feature (1)..(206): Homolog of NCBI NO: 21593910 NR Description: 60S ribosomal protein L6, putative [Arabidopsis
  misc_feature (1)..(206): Homolog of NCBI NO: 15221798 NR Description: 60S ribosomal protein L6 (RPL6A) [Arabidopsis
MYHKRGLWAIKAKNGGVFPRHDAQPKVDAPVEKPAKFYPAEDVKKPLVNRRKPKPTKLKASITPGTVLIILAGRFKGKRVVFLKQLSSGLLLVTGPFKINGVPLRRVNQAYVIGTSTKIDISGVNTEKFDDKYFGKVAEKKKKKTEGEFFEAEKEEKKEIPQEKKEDQKTVDAALIKSIEAVPELKVYLGARFSLSQGMKPHELVF

SEQ ID NO: 25774 - DNA, 833 bp, Arabidopsis thaliana
  misc_feature (1)..(833): Ceres Seq. ID no. 12739051
  misc_feature: MA Experiment ID: 108434 Result: Up-regulated in Transcription
  misc_feature: MA Experiment 108434 PARAMETER Experiment Name: At_Root_Tips_cDNA_P Parameter: Tissue Value: Root Tips
  misc_feature: MA Experiment ID: 108462 Result: Down-regulated in Transcription
  misc_feature: MA Experiment 108462 PARAMETER Experiment Name: At_Germinating_Seeds_cDNA_P Parameter: Age (day) Value: 2 vs. 0
  misc_feature: MA Experiment 108462 PARAMETER Experiment Name: At_Germinating_Seeds_cDNA_P Parameter: Tissue Value: Germinating Seeds
  misc_feature: MA Experiment ID: 108463 Result: Down-regulated in Transcription
  misc_feature: MA Experiment 108463 PARAMETER Experiment Name: At_Germinating_Seeds_cDNA_P Parameter: Age (day) Value: 3 vs. 0
  misc_feature: MA Experiment 108463 PARAMETER Experiment Name: At_Germinating_Seeds_cDNA_P Parameter: Tissue Value: Germinating Seeds
  misc_feature: MA Experiment ID: 108464 Result: Down-regulated in Transcription
  misc_feature: MA Experiment 108464 PARAMETER Experiment Name: At_Germinating_Seeds_cDNA_P Parameter: Age (day) Value: 4 vs. 0
  misc_feature: MA Experiment 108464 PARAMETER Experiment Name: At_Germinating_Seeds_cDNA_P Parameter: Tissue Value: Germinating Seeds
  misc_feature: MA Experiment ID: 108488 Result: Up-regulated in Transcription
  misc_feature: MA Experiment ID: 108573 Result: Down-regulated in Transcription
  misc_feature: MA Experiment 108573 PARAMETER Experiment Name: At_Drought_cDNA_P Parameter: Timepoint (hr) Value: 6
  misc_feature: MA Experiment 108573 PARAMETER Experiment Name: At_Drought_cDNA_P Parameter: Tissue Value: Aerial
  misc_feature: MA Experiment 108573 PARAMETER Experiment Name: At_Drought_cDNA_P Parameter: Treatment Value: Drought vs. No Drought
  misc_feature: MA Experiment ID: 20000227 Result: Up-regulated in Transcription
  misc_feature: MA Experiment 20000227 PARAMETER Experiment Name: At_Root-Tips-vs-Tops_P Parameter: Tissue Value: Root Tips vs. Root Tops
  misc_feature: MA Experiment ID: 20000234 Result: Up-regulated in Transcription
  misc_feature: MA Experiment 20000234 PARAMETER Experiment Name: At_Siliques_P Parameter: Age (day) Value: 21
  misc_feature: MA Experiment 20000234 PARAMETER Experiment Name: At_Siliques_P Parameter: Organism Value: A. thaliana
  misc_feature: MA Experiment 20000234 PARAMETER Experiment Name: At_Siliques_P Parameter: Plant Line Value: WS
  misc_feature: MA Experiment 20000234 PARAMETER Experiment Name: At_Siliques_P Parameter: Tissue Value: Less Than 5mm Siliques vs. Whole Plant
  misc_feature: MA Experiment ID: 20000437 Result: Down-regulated in Transcription
  misc_feature: MA Experiment 20000437 PARAMETER Experiment Name: At_Drought_P Parameter: Age (day) Value: 8
  misc_feature: MA Experiment 20000437 PARAMETER Experiment Name: At_Drought_P Parameter: Organism Value: A. thaliana
  misc_feature: MA Experiment 20000437 PARAMETER Experiment Name: At_Drought_P Parameter: Plant Line Value: WS
  misc_feature: MA Experiment 20000437 PARAMETER Experiment Name: At_Drought_P Parameter: Timepoint (hr) Value: 24
  misc_feature: MA Experiment 20000437 PARAMETER Experiment Name: At_Drought_P Parameter: Tissue Value: Whole Plant
  misc_feature: MA Experiment 20000437 PARAMETER Experiment Name: At_Drought_P Parameter: Treatment Value: Drought vs. No Drought
  misc_feature: MA Experiment ID: 20001557 Result: Up-regulated in Transcription
  misc_feature: MA Experiment 20001557 PARAMETER Experiment Name: At_Drought_Soil_Dry_P Parameter: Age (day) Value: 27
  misc_feature: MA Experiment 20001557 PARAMETER Experiment Name: At_Drought_Soil_Dry_P Parameter: Organism Value: A. thaliana
  misc_feature: MA Experiment 20001557 PARAMETER Experiment Name: At_Drought_Soil_Dry_P Parameter: Plant Line Value: WS
  misc_feature: MA Experiment 20001557 PARAMETER Experiment Name: At_Drought_Soil_Dry_P Parameter: Post Timepoint (hr) Value: 3
  misc_feature: MA Experiment 20001557 PARAMETER Experiment Name: At_Drought_Soil_Dry_P Parameter: Post-Treatment Value: Re-Water vs. No Drought
  misc_feature: MA Experiment 20001557 PARAMETER Experiment Name: At_Drought_Soil_Dry_P Parameter: Timepoint (day) Value: 13
  misc_feature: MA Experiment 20001557 PARAMETER Experiment Name: At_Drought_Soil_Dry_P Parameter: Treatment Value: Drought vs. No Drought
  misc_feature: MA Experiment ID: 20001558 Result: Up-regulated in Transcription
  misc_feature: MA Experiment 20001558 PARAMETER Experiment Name: At_Drought_Soil_Dry_P Parameter: Age (day) Value: 27
  misc_feature: MA Experiment 20001558 PARAMETER Experiment Name: At_Drought_Soil_Dry_P Parameter: Organism Value: A. thaliana
  misc_feature: MA Experiment 20001558 PARAMETER Experiment Name: At_Drought_Soil_Dry_P Parameter: Plant Line Value: WS
  misc_feature: MA Experiment 20001558 PARAMETER Experiment Name: At_Drought_Soil_Dry_P Parameter: Post Timepoint (hr) Value: 6
  misc_feature: MA Experiment 20001558 PARAMETER Experiment Name: At_Drought_Soil_Dry_P Parameter: Post-Treatment Value: Re-Water vs. No Drought
  misc_feature: MA Experiment 20001558 PARAMETER Experiment Name: At_Drought_Soil_Dry_P Parameter: Timepoint (day) Value: 13
  misc_feature: MA Experiment 20001558 PARAMETER Experiment Name: At_Drought_Soil_Dry_P Parameter: Treatment Value: Drought vs. No Drought
  misc_feature: MA Experiment ID: 20001560 Result: Up-regulated in Transcription
  misc_feature: MA Experiment 20001560 PARAMETER Experiment Name: At_Drought_Soil_Dry_P Parameter: Age (day) Value: 28
  misc_feature: MA Experiment 20001560 PARAMETER Experiment Name: At_Drought_Soil_Dry_P Parameter: Organism Value: A. thaliana
  misc_feature: MA Experiment 20001560 PARAMETER Experiment Name: At_Drought_Soil_Dry_P Parameter: Plant Line Value: WS
  misc_feature: MA Experiment 20001560 PARAMETER Experiment Name: At_Drought_Soil_Dry_P Parameter: Post Timepoint (hr) Value: None
  misc_feature: MA Experiment 20001560 PARAMETER Experiment Name: At_Drought_Soil_Dry_P Parameter: Post-Treatment Value: None
  misc_feature: MA Experiment 20001560 PARAMETER Experiment Name: At_Drought_Soil_Dry_P Parameter: Timepoint (day) Value: 14
  misc_feature: MA Experiment 20001560 PARAMETER Experiment Name: At_Drought_Soil_Dry_P Parameter: Treatment Value: Drought vs. No Drought
  misc_feature: MA Experiment ID: 20001757 Result: Up-regulated in Transcription
  misc_feature: MA Experiment 20001757 PARAMETER Experiment Name: At_50mM_NH4NO3_L-to-H_P Parameter: Timepoint (hr) Value: 6
  misc_feature: MA Experiment 20001757 PARAMETER Experiment Name: At_50mM_NH4NO3_L-to-H_P Parameter: Tissue Value: Leaf
  misc_feature: MA Experiment 20001757 PARAMETER Experiment Name: At_50mM_NH4NO3_L-to-H_P Parameter: Treatment Value: 50mM NH4NO3 vs 100mM Mannitol
atatacttcagtctagagccgcgcaagaagacgattctctctcttgagttgaagaaatgaagcacaacaatgttatccccaatggtcacttcaaaaagcactggcagaattatgtcaagacatggttcaaccagcctgccaggaaaaccagaagaagaattgcgaggcaaaagaaggctgtgaagatcttccctcgtccaacttctggacctctccgccctgttgtgcatggtcaaactcttaagtacaacatgaaggtcagaaccggtaaaggattcactcttgaagagctcaaggctgcaggtatcccaaagaagttggcgcctacaattggtattgctgttgaccatcgtcgcaagaaccgatctttggagggtcttcaaacaaatgtccagaggctgaaaacctacaagaccaagttagtcattttcccgcgtcgtgcccgcaaggtcaaggctggtgactctacaccagaagagttggctaatgctacccaagttcaaggagactacttgcctattgtacgtgagaagcctaccatggaactcgtcaagctgacttcagaaatgaagtctttcaaggcttttgacaagatacgccttgagcgcactaacaagaggcatgccggagctagagccaagagagccgcagaggctgagaaagaagagaagaagtgaggtcgttcttcttaggtagaagaaacttttatcttatcaacttttggaactgaattttgtgtatcagactgtcttttctttcatcagtttttatccttaaatctttgattttgctgctaccttgcttctcttgatttatggaaaagaccgtatctc

SEQ ID NO: 25775 - protein, 206 aa, Arabidopsis thaliana [sequence omitted]

SEQ ID NO: 25776 - protein, 141 aa, Arabidopsis thaliana
  peptide (1)..(141): Ceres Seq. ID no. 12739053
  misc_feature (1)..(118): Pfam Name: Ribosomal protein L13e Pfam Description: Ribosomal protein L13e
  misc_feature (1)..(141): Homolog of NCBI NO: 12580867 NR Description: 60S ribosomal protein L13E [Picea abies]
  misc_feature (1)..(141): Homolog of NCBI NO: 18873677 NR Description: putative cold-induced protein
  misc_feature (1)..(141): Homolog of NCBI NO: 34897952 NR Description: ESTs AU077873(S1878),D40121(S1878) correspond to region of the predicted gene.~Similar to Arabidopsis thaliana 60S
  misc_feature (1)..(141): Homolog of NCBI NO: 15237847 NR Description: 60S ribosomal protein L13
  misc_feature (1)..(141): Homolog of NCBI NO: 7441102 NR Description: ribosomal protein L13.A, cytosolic - rape
  misc_feature (1)..(141): Homolog of NCBI NO: 7441103 NR Description: ribosomal protein L13.B, cytosolic - rape
  misc_feature (1)..(141): Homolog of NCBI NO: 730450 NR Description: 60S RIBOSOMAL PROTEIN L13-2 (COLD INDUCED PROTEIN
  misc_feature (1)..(141): Homolog of NCBI NO: 730449 NR Description: 60S RIBOSOMAL PROTEIN L13-1 (COLD INDUCED PROTEIN
  misc_feature (1)..(141): Homolog of NCBI NO: 21537149 NR Description: 60S ribosomal protein L13, BBC1 protein
  misc_feature (1)..(141): Homolog of NCBI NO: 15229064 NR Description: 60S ribosomal protein L13, BBC1 protein
MKVRTGKGFTLEELKAAGIPKKLAPTIGIAVDHRRKNRSLEGLQTNVQRLKTYKTKLVIFPRRARKVKAGDSTPEELANATQVQGDYLPIVREKPTMELVKLTSEMKSFKAFDKIRLERTNKRHAGARAKRAAEAEKEEKK

SEQ ID NO: 25777 - DNA, 993 bp, Arabidopsis thaliana
  misc_feature (1)..(993): Ceres Seq. ID no. 12323757
  misc_feature: MA Experiment ID: 108434 Result: Up-regulated in Transcription
  misc_feature: MA Experiment 108434 PARAMETER Experiment Name: At_Root_Tips_cDNA_P Parameter: Tissue Value: Root Tips
  misc_feature: MA Experiment ID: 108461 Result: Up-regulated in Transcription
  misc_feature: MA Experiment 108461 PARAMETER Experiment Name: At_Germinating_Seeds_cDNA_P Parameter: Age (day) Value: 1 vs. 0
  misc_feature: MA Experiment 108461 PARAMETER Experiment Name: At_Germinating_Seeds_cDNA_P Parameter: Tissue Value: Germinating Seeds
  misc_feature: MA Experiment ID: 108595 Result: Down-regulated in Transcription
  misc_feature: MA Experiment 108595 PARAMETER Experiment Name: At_Ler-pi_Ovule_cDNA_P Parameter: Plant Line Value: null
  misc_feature: MA Experiment ID: 20000069 Result: Down-regulated in Transcription
  misc_feature: MA Experiment 20000069 PARAMETER Experiment Name: At_100uM_ABA_Mutants_cDNA_P Parameter: Plant Line Value: CS23
  misc_feature: MA Experiment 20000069 PARAMETER Experiment Name: At_100uM_ABA_Mutants_cDNA_P Parameter: Timepoint (hr) Value: 6
  misc_feature: MA Experiment 20000069 PARAMETER Experiment Name: At_100uM_ABA_Mutants_cDNA_P Parameter: Tissue Value: Aerial
  misc_feature: MA Experiment 20000069 PARAMETER Experiment Name: At_100uM_ABA_Mutants_cDNA_P Parameter: Treatment Value: 100uM ABA vs. No Treatment
  misc_feature: MA Experiment ID: 20000071 Result: Down-regulated in Transcription
  misc_feature: MA Experiment 20000071 PARAMETER Experiment Name: At_100uM_ABA_Mutants_cDNA_P Parameter: Plant Line Value: CS8104
  misc_feature: MA Experiment 20000071 PARAMETER Experiment Name: At_100uM_ABA_Mutants_cDNA_P Parameter: Timepoint (hr) Value: 6
  misc_feature: MA Experiment 20000071 PARAMETER Experiment Name: At_100uM_ABA_Mutants_cDNA_P Parameter: Tissue Value: Aerial
  misc_feature: MA Experiment 20000071 PARAMETER Experiment Name: At_100uM_ABA_Mutants_cDNA_P Parameter: Treatment Value: 100uM ABA vs. No Treatment
  misc_feature: MA Experiment ID: 20000072 Result: Down-regulated in Transcription
  misc_feature: MA Experiment 20000072 PARAMETER Experiment Name: At_100uM_ABA_Mutants_cDNA_P Parameter: Plant Line Value: CS8105
  misc_feature: MA Experiment 20000072 PARAMETER Experiment Name: At_100uM_ABA_Mutants_cDNA_P Parameter: Timepoint (hr) Value: 6
  misc_feature: MA Experiment 20000072 PARAMETER Experiment Name: At_100uM_ABA_Mutants_cDNA_P Parameter: Tissue Value: Aerial
  misc_feature: MA Experiment 20000072 PARAMETER Experiment Name: At_100uM_ABA_Mutants_cDNA_P Parameter: Treatment Value: 100uM ABA vs. No Treatment
  misc_feature: MA Experiment ID: 20000087 Result: Down-regulated in Transcription
  misc_feature: MA Experiment 20000087 PARAMETER Experiment Name: At_100uM_ABA_Mutants_cDNA_P Parameter: Plant Line Value: WS
  misc_feature: MA Experiment 20000087 PARAMETER Experiment Name: At_100uM_ABA_Mutants_cDNA_P Parameter: Timepoint (hr) Value: 6
  misc_feature: MA Experiment 20000087 PARAMETER Experiment Name: At_100uM_ABA_Mutants_cDNA_P Parameter: Tissue Value: Aerial
  misc_feature: MA Experiment 20000087 PARAMETER Experiment Name: At_100uM_ABA_Mutants_cDNA_P Parameter: Treatment Value: 100uM ABA vs. No Treatment
  misc_feature: MA Experiment ID: 20000117 Result: Down-regulated in Transcription
  misc_feature: MA Experiment 20000117 PARAMETER Experiment Name: At_100uM_ABA_Mutants_cDNA_P Parameter: Plant Line Value: Columbia
  misc_feature: MA Experiment 20000117 PARAMETER Experiment Name: At_100uM_ABA_Mutants_cDNA_P Parameter: Timepoint (hr) Value: 6
  misc_feature: MA Experiment 20000117 PARAMETER Experiment Name: At_100uM_ABA_Mutants_cDNA_P Parameter: Tissue Value: Aerial
  misc_feature: MA Experiment 20000117 PARAMETER Experiment Name: At_100uM_ABA_Mutants_cDNA_P Parameter: Treatment Value: 100uM ABA vs. No Treatment
  misc_feature: MA Experiment ID: 20000179 Result: Up-regulated in Transcription
  misc_feature: MA Experiment 20000179 PARAMETER Experiment Name: At_Germinating_Seeds_P Parameter: Age (hr) Value: 6 vs. 0
  misc_feature: MA Experiment 20000179 PARAMETER Experiment Name: At_Germinating_Seeds_P Parameter: Tissue Value: Germinating Seeds
  misc_feature: MA Experiment ID: 20000180 Result: Up-regulated in Transcription
  misc_feature: MA Experiment 20000180 PARAMETER Experiment Name: At_Germinating_Seeds_P Parameter: Age (hr) Value: 24 vs. 0
  misc_feature: MA Experiment 20000180 PARAMETER Experiment Name: At_Germinating_Seeds_P Parameter: Tissue Value: Germinating Seeds
  misc_feature: MA Experiment ID: 20000184 Result: Up-regulated in Transcription
  misc_feature: MA Experiment 20000184 PARAMETER Experiment Name: At_Shoots__P Parameter: Age (day) Value: 7
  misc_feature: MA Experiment 20000184 PARAMETER Experiment Name: At_Shoots__P Parameter: Tissue Value: Shoots vs. Whole Plant
  misc_feature: MA Experiment ID: 20000437 Result: Down-regulated in Transcription
  misc_feature: MA Experiment 20000437 PARAMETER Experiment Name: At_Drought_P Parameter: Age (day) Value: 8
  misc_feature: MA Experiment 20000437 PARAMETER Experiment Name: At_Drought_P Parameter: Organism Value: A. thaliana
  misc_feature: MA Experiment 20000437 PARAMETER Experiment Name: At_Drought_P Parameter: Plant Line Value: WS
  misc_feature: MA Experiment 20000437 PARAMETER Experiment Name: At_Drought_P Parameter: Timepoint (hr) Value: 24
  misc_feature: MA Experiment 20000437 PARAMETER Experiment Name: At_Drought_P Parameter: Tissue Value: Whole Plant
  misc_feature: MA Experiment 20000437 PARAMETER Experiment Name: At_Drought_P Parameter: Treatment Value: Drought vs. No Drought
  misc_feature: MA Experiment ID: 20000438 Result: Up-regulated in Transcription
  misc_feature: MA Experiment 20000438 PARAMETER Experiment Name: At_Shoots__P Parameter: Age (day) Value: 14
  misc_feature: MA Experiment 20000438 PARAMETER Experiment Name: At_Shoots__P Parameter: Tissue Value: Shoots vs. Whole Plant
aatcgtcaccttcaccttcacctaccatttttgccaacaaacgcgagcaagagttttgagctccaatggcgaccttgtcgatgactctgtcaaatccgaagtcgctctcagctcctccacgaagactttctccgatcaatacctccgctttcacatctacctctttccgattgcgcaccaaatcttccttcgattcaatctcgttctcgtcttcaactcccttctccgcctcatcgctcctccttcacacgtcttataccaaaagaaaccaccgctgtttctctgttcaatccaatgctgaggtggttactgaaccgcaatcgaaaataacacacaaggtgtatttcgatataagtgttggcaatccagtggggaagttagctgggaggattgttattggattgtatggtgatgatgttccccaaactgtggagaactttcgtgctctatgcacaggtgaaaagggatttggctacaagggttctacattccatcgtgtcatcagagatttcatgattcagggaggagactttgagaagggcaatggaactggaggtaaaagtgtatatggccgtacattcaaggatgagaatttcaagttatcccatgtcggaccaggagttctaagtatggcaaatgctggccctaatacaaatggaagtcagttctttatctgcactattaagacgtcatggttggacggaagacatgtggtgttcgggcaagtaatagaaggaatggaagtggtgaagctgatagaggaacaagagacagacagaggagaccgtcccagaaagaaagtggtgatagcagactgtggtcaacttccaatgtctgaagcttaaaagtaagatcatttaaccaaaatcttgtagacatgagatggagcttgtttttgcattttacaaccctttcttttgtgtaatggatttgtatccccttcttccaaaaatttaagaaagaaatagtattccgctgccgggtgttgaactc

SEQ ID NO: 25778 - protein, 259 aa, Arabidopsis thaliana
  peptide (1)..(259): Ceres Seq. ID no. 12323758
  misc_feature (85)..(229): Homolog of NCBI NO: 9945069 NR Description: similar to Arabidopsis thaliana Peptidyl-prolyl
  misc_feature (63)..(256): Homolog of NCBI NO: 37788312 NR Description: cyclophilin-like protein [Triticum aestivum]
  misc_feature (63)..(256): Homolog of NCBI NO: 37788308 NR Description: cyclophilin-like protein [Triticum aestivum]
  misc_feature (1)..(259): Homolog of NCBI NO: 9955556 NR Description: peptidylprolyl isomerase-like protein
  misc_feature (1)..(259): Homolog of NCBI NO: 21593963 NR Description: peptidylprolyl isomerase-like protein
  misc_feature (1)..(259): Homolog of NCBI NO: 15240008 NR Description: peptidyl-prolyl isomerase protein
  misc_feature (83)..(256): Homolog of NCBI NO: 34902534 NR Description: putative peptidyl-prolyl cis-trans isomerase,
  misc_feature (31)..(256): Homolog of NCBI NO: 11762200 NR Description: AT3g62030 [Arabidopsis thaliana]
  misc_feature (31)..(256): Homolog of NCBI NO: 15228674 NR Description: peptidylprolyl isomerase ROC4
  misc_feature (31)..(256): Homolog of NCBI NO: 21555831 NR Description: peptidylprolyl isomerase ROC4 [Arabidopsis
MATLSMTLSNPKSLSAPPRRLSPINTSAFTSTSFRLRTKSSFDSISFSSSTPFSASSLLLHTSYTKRNHRCFSVQSNAEVVTEPQSKITHKVYFDISVGNPVGKLAGRIVIGLYGDDVPQTVENFRALCTGEKGFGYKGSTFHRVIRDFMIQGGDFEKGNGTGGKSVYGRTFKDENFKLSHVGPGVLSMANAGPNTNGSQFFICTIKTSWLDGRHVVFGQVIEGMEVVKLIEEQETDRGDRPRKKVVIADCGQLPMSEA

SEQ ID NO: 25779 - protein, 254 aa, Arabidopsis thaliana
  peptide (1)..(254): Ceres Seq. ID no. 12323759
  misc_feature (78)..(251): Homolog of NCBI NO: 34902534 NR Description: putative peptidyl-prolyl cis-trans isomerase,
  misc_feature (26)..(251): Homolog of NCBI NO: 11762200 NR Description: AT3g62030 [Arabidopsis thaliana]
  misc_feature (26)..(251): Homolog of NCBI NO: 15228674 NR Description: peptidylprolyl isomerase ROC4
  misc_feature (26)..(251): Homolog of NCBI NO: 21555831 NR Description: peptidylprolyl isomerase ROC4 [Arabidopsis
  misc_feature (80)..(224): Homolog of NCBI NO: 9945069 NR Description: similar to Arabidopsis thaliana Peptidyl-prolyl
  misc_feature (58)..(251): Homolog of NCBI NO: 37788312 NR Description: cyclophilin-like protein [Triticum aestivum]
  misc_feature (58)..(251): Homolog of NCBI NO: 37788308 NR Description: cyclophilin-like protein [Triticum aestivum]
  misc_feature (1)..(254): Homolog of NCBI NO: 9955556 NR Description: peptidylprolyl isomerase-like protein
  misc_feature (1)..(254): Homolog of NCBI NO: 21593963 NR Description: peptidylprolyl isomerase-like protein
  misc_feature (1)..(254): Homolog of NCBI NO: 15240008 NR Description: peptidyl-prolyl isomerase protein
MTLSNPKSLSAPPRRLSPINTSAFTSTSFRLRTKSSFDSISFSSSTPFSASSLLLHTSYTKRNHRCFSVQSNAEVVTEPQSKITHKVYFDISVGNPVGKLAGRIVIGLYGDDVPQTVENFRALCTGEKGFGYKGSTFHRVIRDFMIQGGDFEKGNGTGGKSVYGRTFKDENFKLSHVGPGVLSMANAGPNTNGSQFFICTIKTSWLDGRHVVFGQVIEGMEVVKLIEEQETDRGDRPRKKVVIADCGQLPMSEA

SEQ ID NO: 25780 - DNA, 1401 bp, Arabidopsis thaliana
  misc_feature (1)..(1401): Ceres Seq. ID no. 12715731
  misc_feature: MA Experiment ID: 20000171 Result: Down-regulated in Transcription
  misc_feature: MA Experiment 20000171 PARAMETER Experiment Name: At_42deg_Heat_P Parameter: Age (day) Value: 14
  misc_feature: MA Experiment 20000171 PARAMETER Experiment Name: At_42deg_Heat_P Parameter: Organism Value: A. thaliana
  misc_feature: MA Experiment 20000171 PARAMETER Experiment Name: At_42deg_Heat_P Parameter: Plant Line Value: WS
  misc_feature: MA Experiment 20000171 PARAMETER Experiment Name: At_42deg_Heat_P Parameter: Temperature (deg C) Value: 42 vs. 22
  misc_feature: MA Experiment 20000171 PARAMETER Experiment Name: At_42deg_Heat_P Parameter: Timepoint (hr) Value: 1
  misc_feature: MA Experiment 20000171 PARAMETER Experiment Name: At_42deg_Heat_P Parameter: Tissue Value: Aerial
  misc_feature: MA Experiment ID: 20000173 Result: Down-regulated in Transcription
  misc_feature: MA Experiment 20000173 PARAMETER Experiment Name: At_42deg_Heat_P Parameter: Age (day) Value: 14
  misc_feature: MA Experiment 20000173 PARAMETER Experiment Name: At_42deg_Heat_P Parameter: Organism Value: A. thaliana
  misc_feature: MA Experiment 20000173 PARAMETER Experiment Name: At_42deg_Heat_P Parameter: Plant Line Value: WS
  misc_feature: MA Experiment 20000173 PARAMETER Experiment Name: At_42deg_Heat_P Parameter: Temperature (deg C) Value: 42 vs. 22
  misc_feature: MA Experiment 20000173 PARAMETER Experiment Name: At_42deg_Heat_P Parameter: Timepoint (hr) Value: 6
  misc_feature: MA Experiment 20000173 PARAMETER Experiment Name: At_42deg_Heat_P Parameter: Tissue Value: Aerial
  misc_feature: MA Experiment ID: 20000227 Result: Down-regulated in Transcription
  misc_feature: MA Experiment 20000227 PARAMETER Experiment Name: At_Root-Tips-vs-Tops_P Parameter: Tissue Value: Root Tips vs. Root Tops
  misc_feature: MA Experiment ID: 20000264 Result: Up-regulated in Transcription
  misc_feature: MA Experiment 20000264 PARAMETER Experiment Name: At_Open_Flower_P Parameter: Age (day) Value: 21
  misc_feature: MA Experiment 20000264 PARAMETER Experiment Name: At_Open_Flower_P Parameter: Plant Line Value: WS
  misc_feature: MA Experiment 20000264 PARAMETER Experiment Name: At_Open_Flower_P Parameter: Tissue Value: Open Flower vs. Whole Plant
  misc_feature: MA Experiment ID: 20000286 Result: Up-regulated in Transcription
  misc_feature: MA Experiment 20000286 PARAMETER Experiment Name: At_Open_Flower_P Parameter: Age (day) Value: 21
  misc_feature: MA Experiment 20000286 PARAMETER Experiment Name: At_Open_Flower_P Parameter: Plant Line Value: WS
  misc_feature: MA Experiment 20000286 PARAMETER Experiment Name: At_Open_Flower_P Parameter: Tissue Value: Half Open vs. Whole Plant
  misc_feature: MA Experiment ID: 20000794 Result: Up-regulated in Transcription
  misc_feature: MA Experiment 20000794 PARAMETER Experiment Name: At_Petals_P Parameter: Age (day) Value: 23-25 days
  misc_feature: MA Experiment 20000794 PARAMETER Experiment Name: At_Petals_P Parameter: Plant Line Value: WS
  misc_feature: MA Experiment 20000794 PARAMETER Experiment Name: At_Petals_P Parameter: Tissue Value: Petals vs. Whole plant
  misc_feature: MA Experiment ID: 20001248 Result: Down-regulated in Transcription
  misc_feature: MA Experiment 20001248 PARAMETER Experiment Name: At_Far-red-induction_P Parameter: Age (day) Value: 7
  misc_feature: MA Experiment 20001248 PARAMETER Experiment Name: At_Far-red-induction_P Parameter: Light Value: Far-red vs. White
  misc_feature: MA Experiment 20001248 PARAMETER Experiment Name: At_Far-red-induction_P Parameter: Organism Value: A. thaliana
  misc_feature: MA Experiment 20001248 PARAMETER Experiment Name: At_Far-red-induction_P Parameter: Plant Line Value: Columbia
  misc_feature: MA Experiment 20001248 PARAMETER Experiment Name: At_Far-red-induction_P Parameter: Timepoint (hr) Value: 4
  misc_feature: MA Experiment 20001248 PARAMETER Experiment Name: At_Far-red-induction_P Parameter: Tissue Value: Whole Plant
  misc_feature: MA Experiment ID: 20001911 Result: Down-regulated in Transcription
  misc_feature: MA Experiment 20001911 PARAMETER Experiment Name: At_Drought_Reproduction_P Parameter: Age (day) Value: 40
  misc_feature: MA Experiment 20001911 PARAMETER Experiment Name: At_Drought_Reproduction_P Parameter: Organism Value: A. thaliana
  misc_feature: MA Experiment 20001911 PARAMETER Experiment Name: At_Drought_Reproduction_P Parameter: Plant Line Value: WS
  misc_feature: MA Experiment 20001911 PARAMETER Experiment Name: At_Drought_Reproduction_P Parameter: Timepoint (day) Value: 10
  misc_feature: MA Experiment 20001911 PARAMETER Experiment Name: At_Drought_Reproduction_P Parameter: Tissue Value: Flowers
  misc_feature: MA Experiment 20001911 PARAMETER Experiment Name: At_Drought_Reproduction_P Parameter: Treatment Value: Drought vs. No Drought
aacatttcctgaaaatctaactttcacccactcaccatcttttcttctctctttccccatcaaaaaaaacaaaaacaaaacacaactctgtttctctcatcttaaaattcatgtaaaaaaaatctacaaatcaaagagagaaacagagtaaagagaaagagaagaagatggcgcggaaatactttcagagagaagttttgccggtaacggctttggtaataatggaatgtgcaaacgttggtttaaacactctgtttaaagcagcaactttgaaaggcatgagctttcatgtcttcatcgtttactcttatggtctcgctgctctgcttcttcttccttctctgttttgctctttcagatcaagaactcttccaccgatgaatttctctattctctacaaaatcgtgctcttagggattattggatgctgttcaaacataatgggatacacagggataaattatagttctccaacacttgcttctgcaatcagcaacctcactcctgctttcaccttcttgcttgcagtcgttttcaggatggagagtgtgtcttttaagagaacaagtagtgtggctaaaatgttaggaaccgttgtttctattggaggtgcatttatagtgactctttataatggtcctgttgtgattgctaaatcgccaccgtctgtttctttgcgatcgcaatcgactaaccctaattggatacttggtgcgggtttccttgcggtcgagtatttctgtgttccattgtggtacattgttcagactcaaatcatgagagagtatccggccgagtttaccgttgtttgcttttatagcataggcgttagcttttggaccgcgctagtcacattgttcactgaagggaatgacttgggtgcatggaagataaaaccgaatatagctttagtgtcgatcgtttgctcgggattgtttggatcttgcataaacaatactatccacacgtgggcattgcggatcaaggggcctttatttgttgcaatgttcaagccattgtctattgcaattgctgttgcaatgggagttatcttcctgcgagattctctctacatcggcagcttgatcggggcaacggtaataacaatcgggttttacacggtaatgtggggaaaagccaaggaagtggccttggtcgaagatgataacaaggctaaccacgaggaggccaatgaagctgaccttgattctccatcgggttcacagaaggctcctctcttggaaagttacaagaacgatgaacatgtatgagtatcatcaactagtgaagatcacgctatatatatatgtgtgaaaaaattcatatgtgaattgtctttgtaatttatttgatgagacaaatgtgatctttaattttaggatccaagtgttttctaatcac

SEQ ID NO: 25781 - protein, 367 aa, Arabidopsis thaliana
  peptide (1)..(367): Ceres Seq. ID no. 12715732
  misc_feature (22)..(154): Pfam Name: Integral membrane protein DUF6 Pfam Description: Integral membrane protein DUF6
  misc_feature (16)..(326): Homolog of NCBI NO: 10177510 NR Description: nodulin-like protein [Arabidopsis thaliana]
  misc_feature (6)..(365): Homolog of NCBI NO: 22331380 NR Description: unknown protein
  misc_feature (6)..(365): Homolog of NCBI NO: 21618226 NR Description: contains similarity to integral membrane protein
  misc_feature (6)..(365): Homolog of NCBI NO: 18405642 NR Description: expressed protein
  misc_feature (1)..(326): Homolog of NCBI NO: 11994130 NR Description: contains similarity to integral membrane protein
  misc_feature (1)..(326): Homolog of NCBI NO: 15242612 NR Description: putative protein; protein id: At5g40230.1
  misc_feature (1)..(326): Homolog of NCBI NO: 10177511 NR Description: nodulin-like protein [Arabidopsis thaliana]
  misc_feature (63)..(367): Homolog of NCBI NO: 11994125 NR Description: nodulin MtN21-like protein [Arabidopsis thaliana]
  misc_feature (1)..(367): Homolog of NCBI NO: 21594034 NR Description: nodulin MtN21-like protein [Arabidopsis thaliana]
  misc_feature (1)..(367): Homolog of NCBI NO: 18405635 NR Description: expressed protein
MARKYFQREVLPVTALVIMECANVGLNTLFKAATLKGMSFHVFIVYSYGLAALLLLPSLFCSFRSRTLPPMNFSILYKIVLLGIIGCCSNIMGYTGINYSSPTLASAISNLTPAFTFLLAVVFRMESVSFKRTSSVAKMLGTVVSIGGAFIVTLYNGPVVIAKSPPSVSLRSQSTNPNWILGAGFLAVEYFCVPLWYIVQTQIMREYPAEFTVVCFYSIGVSFWTALVTLFTEGNDLGAWKIKPNIALVSIVCSGLFGSCINNTIHTWALRIKGPLFVAMFKPLSIAIAVAMGVIFLRDSLYIGSLIGATVITIGFYTVMWGKAKEVALVEDDNKANHEEANEADLDSPSGSQKAPLLESYKNDEHV

SEQ ID NO: 25782 - protein, 349 aa, Arabidopsis thaliana
  peptide (1)..(349): Ceres Seq. ID no. 12715733
  misc_feature (4)..(136): Pfam Name: Integral membrane protein DUF6 Pfam Description: Integral membrane protein DUF6
  misc_feature (1)..(308): Homolog of NCBI NO: 10177510 NR Description: nodulin-like protein [Arabidopsis thaliana]
  misc_feature (1)..(347): Homolog of NCBI NO: 22331380 NR Description: unknown protein
  misc_feature (1)..(347): Homolog of NCBI NO: 21618226 NR Description: contains similarity to integral membrane protein
  misc_feature (1)..(347): Homolog of NCBI NO: 18405642 NR Description: expressed protein
  misc_feature (1)..(308): Homolog of NCBI NO: 11994130 NR Description: contains similarity to integral membrane protein
  misc_feature (1)..(308): Homolog of NCBI NO: 15242612 NR Description: putative protein; protein id: At5g40230.1
  misc_feature (1)..(308): Homolog of NCBI NO: 10177511 NR Description: nodulin-like protein [Arabidopsis thaliana]
  misc_feature (45)..(349): Homolog of NCBI NO: 11994125 NR Description: nodulin MtN21-like protein [Arabidopsis thaliana]
  misc_feature (1)..(349): Homolog of NCBI NO: 21594034 NR Description: nodulin MtN21-like protein [Arabidopsis thaliana]
  misc_feature (1)..(349): Homolog of NCBI NO: 18405635 NR Description: expressed protein
MECANVGLNTLFKAATLKGMSFHVFIVYSYGLAALLLLPSLFCSFRSRTLPPMNFSILYKIVLLGIIGCCSNIMGYTGINYSSPTLASAISNLTPAFTFLLAVVFRMESVSFKRTSSVAKMLGTVVSIGGAFIVTLYNGPVVIAKSPPSVSLRSQSTNPNWILGAGFLAVEYFCVPLWYIVQTQIMREYPAEFTVVCFYSIGVSFWTALVTLFTEGNDLGAWKIKPNIALVSIVCSGLFGSCINNTIHTWALRIKGPLFVAMFKPLSIAIAVAMGVIFLRDSLYIGSLIGATVITIGFYTVMWGKAKEVALVEDDNKANHEEANEADLDSPSGSQKAPLLESYKNDEHV

SEQ ID NO: 25783 - protein, 330 aa, Arabidopsis thaliana
  peptide (1)..(330): Ceres Seq. ID no. 12715734
  misc_feature (1)..(117): Pfam Name: Integral membrane protein DUF6 Pfam Description: Integral membrane protein DUF6
  misc_feature (1)..(289): Homolog of NCBI NO: 10177510 NR Description: nodulin-like protein [Arabidopsis thaliana]
  misc_feature (1)..(328): Homolog of NCBI NO: 22331380 NR Description: unknown protein
  misc_feature (1)..(328): Homolog of NCBI NO: 21618226 NR Description: contains similarity to integral membrane protein
  misc_feature (1)..(328): Homolog of NCBI NO: 18405642 NR Description: expressed protein
  misc_feature (1)..(289): Homolog of NCBI NO: 11994130 NR Description: contains similarity to integral membrane protein
  misc_feature (1)..(289): Homolog of NCBI NO: 15242612 NR Description: putative protein; protein id: At5g40230.1
  misc_feature (1)..(289): Homolog of NCBI NO: 10177511 NR Description: nodulin-like protein [Arabidopsis thaliana]
  misc_feature (26)..(330): Homolog of NCBI NO: 11994125 NR Description: nodulin MtN21-like protein [Arabidopsis thaliana]
  misc_feature (1)..(330): Homolog of NCBI NO: 21594034 NR Description: nodulin MtN21-like protein [Arabidopsis thaliana]
  misc_feature (1)..(330): Homolog of NCBI NO: 18405635 NR Description: expressed protein
MSFHVFIVYSYGLAALLLLPSLFCSFRSRTLPPMNFSILYKIVLLGIIGCCSNIMGYTGINYSSPTLASAISNLTPAFTFLLAVVFRMESVSFKRTSSVAKMLGTVVSIGGAFIVTLYNGPVVIAKSPPSVSLRSQSTNPNWILGAGFLAVEYFCVPLWYIVQTQIMREYPAEFTVVCFYSIGVSFWTALVTLFTEGNDLGAWKIKPNIALVSIVCSGLFGSCINNTIHTWALRIKGPLFVAMFKPLSIAIAVAMGVIFLRDSLYIGSLIGATVITIGFYTVMWGKAKEVALVEDDNKANHEEANEADLDSPSGSQKAPLLESYKNDEHV

SEQ ID NO: 25784 - DNA, 1345 bp, Arabidopsis thaliana
  misc_feature (1)..(1345): Ceres Seq. ID no. 12677915
  misc_feature: MA Experiment ID: 108464 Result: Up-regulated in Transcription
  misc_feature: MA Experiment 108464 PARAMETER Experiment Name: At_Germinating_Seeds_cDNA_P Parameter: Age (day) Value: 4 vs. 0
  misc_feature: MA Experiment 108464 PARAMETER Experiment Name: At_Germinating_Seeds_cDNA_P Parameter: Tissue Value: Germinating Seeds
  misc_feature: MA Experiment ID: 108488 Result: Up-regulated in Transcription
  misc_feature: MA Experiment ID: 108585 Result: Down-regulated in Transcription
  misc_feature: MA Experiment 108585 PARAMETER Experiment Name: At_5mM_NaNP_cDNA_P Parameter: Timepoint (hr) Value: 6
  misc_feature: MA Experiment 108585 PARAMETER Experiment Name: At_5mM_NaNP_cDNA_P Parameter: Tissue Value: Aerial
  misc_feature: MA Experiment 108585 PARAMETER Experiment Name: At_5mM_NaNP_cDNA_P Parameter: Treatment Value: null
  misc_feature: MA Experiment ID: 108594 Result: Up-regulated in Transcription
  misc_feature: MA Experiment 108594 PARAMETER Experiment Name: At_Ler-rhl_Root_cDNA_P Parameter: Plant Line Value: null
  misc_feature: MA Experiment ID: 108595 Result: Down-regulated in Transcription
  misc_feature: MA Experiment 108595 PARAMETER Experiment Name: At_Ler-pi_Ovule_cDNA_P Parameter: Plant Line Value: null
  misc_feature: MA Experiment ID: 108668 Result: Down-regulated in Transcription
  misc_feature: MA Experiment 108668 PARAMETER Experiment Name: At_2mM_SA_cDNA_P Parameter: Plant Line Value: WS
  misc_feature: MA Experiment 108668 PARAMETER Experiment Name: At_2mM_SA_cDNA_P Parameter: Timepoint (hr) Value: 6
  misc_feature: MA Experiment 108668 PARAMETER Experiment Name: At_2mM_SA_cDNA_P Parameter: Treatment Value: 2mM SA vs. No Treatment
  misc_feature: MA Experiment ID: 20000069 Result: Down-regulated in Transcription
  misc_feature: MA Experiment 20000069 PARAMETER Experiment Name: At_100uM_ABA_Mutants_cDNA_P Parameter: Plant Line Value: CS23
  misc_feature: MA Experiment 20000069 PARAMETER Experiment Name: At_100uM_ABA_Mutants_cDNA_P Parameter: Timepoint (hr) Value: 6
  misc_feature: MA Experiment 20000069 PARAMETER Experiment Name: At_100uM_ABA_Mutants_cDNA_P Parameter: Tissue Value: Aerial
  misc_feature: MA Experiment 20000069 PARAMETER Experiment Name: At_100uM_ABA_Mutants_cDNA_P Parameter: Treatment Value: 100uM ABA vs. No Treatment
  misc_feature: MA Experiment ID: 20000070 Result: Down-regulated in Transcription
  misc_feature: MA Experiment 20000070 PARAMETER Experiment Name: At_100uM_ABA_Mutants_cDNA_P Parameter: Plant Line Value: CS24
  misc_feature: MA Experiment 20000070 PARAMETER Experiment Name: At_100uM_ABA_Mutants_cDNA_P Parameter: Timepoint (hr) Value: 6
  misc_feature: MA Experiment 20000070 PARAMETER Experiment Name: At_100uM_ABA_Mutants_cDNA_P Parameter: Tissue Value: Aerial
  misc_feature: MA Experiment 20000070 PARAMETER Experiment Name: At_100uM_ABA_Mutants_cDNA_P Parameter: Treatment Value: 100uM ABA vs. No Treatment
  misc_feature: MA Experiment ID: 20000071 Result: Down-regulated in Transcription
  misc_feature: MA Experiment 20000071 PARAMETER Experiment Name: At_100uM_ABA_Mutants_cDNA_P Parameter: Plant Line Value: CS8104
  misc_feature: MA Experiment 20000071 PARAMETER Experiment Name: At_100uM_ABA_Mutants_cDNA_P Parameter: Timepoint (hr) Value: 6
  misc_feature: MA Experiment 20000071 PARAMETER Experiment Name: At_100uM_ABA_Mutants_cDNA_P Parameter: Tissue Value: Aerial
  misc_feature: MA Experiment 20000071 PARAMETER Experiment Name: At_100uM_ABA_Mutants_cDNA_P Parameter: Treatment Value: 100uM ABA vs. No Treatment
  misc_feature: MA Experiment ID: 20000072 Result: Down-regulated in Transcription
  misc_feature: MA Experiment 20000072 PARAMETER Experiment Name: At_100uM_ABA_Mutants_cDNA_P Parameter: Plant Line Value: CS8105
  misc_feature: MA Experiment 20000072 PARAMETER Experiment Name: At_100uM_ABA_Mutants_cDNA_P Parameter: Timepoint (hr) Value: 6
  misc_feature: MA Experiment 20000072 PARAMETER Experiment Name: At_100uM_ABA_Mutants_cDNA_P Parameter: Tissue Value: Aerial
  misc_feature: MA Experiment 20000072 PARAMETER Experiment Name: At_100uM_ABA_Mutants_cDNA_P Parameter: Treatment Value: 100uM ABA vs. No Treatment
  misc_feature: MA Experiment ID: 20000086 Result: Down-regulated in Transcription
  misc_feature: MA Experiment 20000086 PARAMETER Experiment Name: At_100uM_ABA_Mutants_cDNA_P Parameter: Plant Line Value: CS22
  misc_feature: MA Experiment 20000086 PARAMETER Experiment Name: At_100uM_ABA_Mutants_cDNA_P Parameter: Timepoint (hr) Value: 6
  misc_feature: MA Experiment 20000086 PARAMETER Experiment Name: At_100uM_ABA_Mutants_cDNA_P Parameter: Tissue Value: Aerial
  misc_feature: MA Experiment 20000086 PARAMETER Experiment Name: At_100uM_ABA_Mutants_cDNA_P Parameter: Treatment Value: 100uM ABA vs. No Treatment
  misc_feature: MA Experiment ID: 20000087 Result: Down-regulated in Transcription
  misc_feature: MA Experiment 20000087 PARAMETER Experiment Name: At_100uM_ABA_Mutants_cDNA_P Parameter: Plant Line Value: WS
  misc_feature: MA Experiment 20000087 PARAMETER Experiment Name: At_100uM_ABA_Mutants_cDNA_P Parameter: Timepoint (hr) Value: 6
  misc_feature: MA Experiment 20000087 PARAMETER Experiment Name: At_100uM_ABA_Mutants_cDNA_P Parameter: Tissue Value: Aerial
  misc_feature: MA Experiment 20000087 PARAMETER Experiment Name: At_100uM_ABA_Mutants_cDNA_P Parameter: Treatment Value: 100uM ABA vs. No Treatment
  misc_feature: MA Experiment ID: 20000088 Result: Down-regulated in Transcription
  misc_feature: MA Experiment 20000088 PARAMETER Experiment Name: At_100uM_ABA_Mutants_cDNA_P Parameter: Plant Line Value: Landsberg
  misc_feature: MA Experiment 20000088 PARAMETER Experiment Name: At_100uM_ABA_Mutants_cDNA_P Parameter: Timepoint (hr) Value: 6
  misc_feature: MA Experiment 20000088 PARAMETER Experiment Name: At_100uM_ABA_Mutants_cDNA_P Parameter: Tissue Value: Aerial
  misc_feature: MA Experiment 20000088 PARAMETER Experiment Name: At_100uM_ABA_Mutants_cDNA_P Parameter: Treatment Value: 100uM ABA vs. No Treatment
  misc_feature: MA Experiment ID: 20000090 Result: Down-regulated in Transcription
  misc_feature: MA Experiment ID: 20000113 Result: Up-regulated in Transcription
  misc_feature: MA Experiment 20000113 PARAMETER Experiment Name: At_42deg_Heat_cDNA_P Parameter: Temperature (deg C) Value: 42 vs. 22
  misc_feature: MA Experiment 20000113 PARAMETER Experiment Name: At_42deg_Heat_cDNA_P Parameter: Timepoint (hr) Value: 8
  misc_feature: MA Experiment 20000113 PARAMETER Experiment Name: At_42deg_Heat_cDNA_P Parameter: Tissue Value: Aerial
  misc_feature: MA Experiment ID: 20000117 Result: Down-regulated in Transcription
  misc_feature: MA Experiment 20000117 PARAMETER Experiment Name: At_100uM_ABA_Mutants_cDNA_P Parameter: Plant Line Value: Columbia
  misc_feature: MA Experiment 20000117 PARAMETER Experiment Name: At_100uM_ABA_Mutants_cDNA_P Parameter: Timepoint (hr) Value: 6
  misc_feature: MA Experiment 20000117 PARAMETER Experiment Name: At_100uM_ABA_Mutants_cDNA_P Parameter: Tissue Value: Aerial
  misc_feature: MA Experiment 20000117 PARAMETER Experiment Name: At_100uM_ABA_Mutants_cDNA_P Parameter: Treatment Value: 100uM ABA vs. No Treatment
  misc_feature: MA Experiment ID: 20000182 Result: Down-regulated in Transcription
  misc_feature: MA Experiment 20000182 PARAMETER Experiment Name: At_2mM_SA_P Parameter: Age (day) Value: 14
  misc_feature: MA Experiment 20000182 PARAMETER Experiment Name: At_2mM_SA_P Parameter: Organism Value: A. thaliana
  misc_feature: MA Experiment 20000182 PARAMETER Experiment Name: At_2mM_SA_P Parameter: Plant Line Value: WS
  misc_feature: MA Experiment 20000182 PARAMETER Experiment Name: At_2mM_SA_P Parameter: Timepoint (hr) Value: 6
  misc_feature: MA Experiment 20000182 PARAMETER Experiment Name: At_2mM_SA_P Parameter: Tissue Value: Aerial
  misc_feature: MA Experiment 20000182 PARAMETER Experiment Name: At_2mM_SA_P Parameter: Treatment Value: 2mM SA vs. No Treatment
  misc_feature: MA Experiment ID: 20000437 Result: Down-regulated in Transcription
  misc_feature: MA Experiment 20000437 PARAMETER Experiment Name: At_Drought_P Parameter: Age (day) Value: 8
  misc_feature: MA Experiment 20000437 PARAMETER Experiment Name: At_Drought_P Parameter: Organism Value: A. thaliana
  misc_feature: MA Experiment 20000437 PARAMETER Experiment Name: At_Drought_P Parameter: Plant Line Value: WS
  misc_feature: MA Experiment 20000437 PARAMETER Experiment Name: At_Drought_P Parameter: Timepoint (hr) Value: 24
  misc_feature: MA Experiment 20000437 PARAMETER Experiment Name: At_Drought_P Parameter: Tissue Value: Whole Plant
  misc_feature: MA Experiment 20000437 PARAMETER Experiment Name: At_Drought_P Parameter: Treatment Value: Drought vs. No Drought
  misc_feature: MA Experiment ID: 20000573 Result: Down-regulated in Transcription
  misc_feature: MA Experiment 20000573 PARAMETER Experiment Name: At_100uM_ABA_Mutants__P Parameter: Organism Value: A. thaliana
  misc_feature: MA Experiment 20000573 PARAMETER Experiment Name: At_100uM_ABA_Mutants__P Parameter: Plant Line Value: CS22 vs. Ler wt
  misc_feature: MA Experiment 20000573 PARAMETER Experiment Name: At_100uM_ABA_Mutants__P Parameter: Timepoint (hr) Value: N/A
  misc_feature: MA Experiment 20000573 PARAMETER Experiment Name: At_100uM_ABA_Mutants__P Parameter: Tissue Value: Whole Plant
  misc_feature: MA Experiment 20000573 PARAMETER Experiment Name: At_100uM_ABA_Mutants__P Parameter: Treatment Value: None
  misc_feature: MA Experiment ID: 20000574 Result: Down-regulated in Transcription
  misc_feature: MA Experiment 20000574 PARAMETER Experiment Name: At_100uM_ABA_Mutants__P Parameter: Organism Value: A. thaliana
  misc_feature: MA Experiment 20000574 PARAMETER Experiment Name: At_100uM_ABA_Mutants__P Parameter: Plant Line Value: CS23 vs. Ler wt
  misc_feature: MA Experiment 20000574 PARAMETER Experiment Name: At_100uM_ABA_Mutants__P Parameter: Timepoint (hr) Value: N/A
  misc_feature: MA Experiment 20000574 PARAMETER Experiment Name: At_100uM_ABA_Mutants__P Parameter: Tissue Value: Whole Plant
  misc_feature: MA Experiment 20000574 PARAMETER Experiment Name: At_100uM_ABA_Mutants__P Parameter: Treatment Value: None
  misc_feature: MA Experiment ID: 20001248 Result: Down-regulated in Transcription
  misc_feature: MA Experiment 20001248 PARAMETER Experiment Name: At_Far-red-induction_P Parameter: Age (day) Value: 7
  misc_feature: MA Experiment 20001248 PARAMETER Experiment Name: At_Far-red-induction_P Parameter: Light Value: Far-red vs. White
  misc_feature: MA Experiment 20001248 PARAMETER Experiment Name: At_Far-red-induction_P Parameter: Organism Value: A. thaliana
  misc_feature: MA Experiment 20001248 PARAMETER Experiment Name: At_Far-red-induction_P Parameter: Plant Line Value: Columbia
  misc_feature: MA Experiment 20001248 PARAMETER Experiment Name: At_Far-red-induction_P Parameter: Timepoint (hr) Value: 4
  misc_feature: MA Experiment 20001248 PARAMETER Experiment Name: At_Far-red-induction_P Parameter: Tissue Value: Whole Plant
  misc_feature: MA Experiment ID: 20001905 Result: Down-regulated in Transcription
  misc_feature: MA Experiment 20001905 PARAMETER Experiment Name: At_Drought_Reproduction_P Parameter: Age (day) Value: 40
  misc_feature: MA Experiment 20001905 PARAMETER Experiment Name: At_Drought_Reproduction_P Parameter: Organism Value: A. thaliana
  misc_feature: MA Experiment 20001905 PARAMETER Experiment Name: At_Drought_Reproduction_P Parameter: Plant Line Value: WS
  misc_feature: MA Experiment 20001905 PARAMETER Experiment Name: At_Drought_Reproduction_P Parameter: Timepoint (day) Value: 10
  misc_feature: MA Experiment 20001905 PARAMETER Experiment Name: At_Drought_Reproduction_P Parameter: Tissue Value: Rosettes
  misc_feature: MA Experiment 20001905 PARAMETER Experiment Name: At_Drought_Reproduction_P Parameter: Treatment Value: Drought vs. No Drought
  misc_feature: MA Experiment ID: 20001906 Result: Down-regulated in Transcription
  misc_feature: MA Experiment 20001906 PARAMETER Experiment Name: At_Drought_Reproduction_P Parameter: Age (day) Value: 35
  misc_feature: MA Experiment 20001906 PARAMETER Experiment Name: At_Drought_Reproduction_P Parameter: Organism Value: A. thaliana
  misc_feature: MA Experiment 20001906 PARAMETER Experiment Name: At_Drought_Reproduction_P Parameter: Plant Line Value: WS
  misc_feature: MA Experiment 20001906 PARAMETER Experiment Name: At_Drought_Reproduction_P Parameter: Timepoint (day) Value: 5
  misc_feature: MA Experiment 20001906 PARAMETER Experiment Name: At_Drought_Reproduction_P Parameter: Tissue Value: Siliques
  misc_feature: MA Experiment 20001906 PARAMETER Experiment Name: At_Drought_Reproduction_P Parameter: Treatment Value: Drought vs. No Drought
  misc_feature: MA Experiment ID: 20001911 Result: Down-regulated in Transcription
  misc_feature: MA Experiment 20001911 PARAMETER Experiment Name: At_Drought_Reproduction_P Parameter: Age (day) Value: 40
  misc_feature: MA Experiment 20001911 PARAMETER Experiment Name: At_Drought_Reproduction_P Parameter: Organism Value: A. thaliana
  misc_feature: MA Experiment 20001911 PARAMETER Experiment Name: At_Drought_Reproduction_P Parameter: Plant Line Value: WS
  misc_feature: MA Experiment 20001911 PARAMETER Experiment Name: At_Drought_Reproduction_P Parameter: Timepoint (day) Value: 10
  misc_feature: MA Experiment 20001911 PARAMETER Experiment Name: At_Drought_Reproduction_P Parameter: Tissue Value: Flowers
  misc_feature: MA Experiment 20001911 PARAMETER Experiment Name: At_Drought_Reproduction_P Parameter: Treatment Value: Drought vs. No Drought
aaatgcttctctactttctcatcacttgtctctctttctttttctttaccaaatctctttctcttcctccatgggcatctgaaaccaaaaccttgctctccttctacttcatcaagaatccctttatgaacaccctacatcagaccaaacacgatccagcctctccggtgatcgaccaaatgtcggttcttgacctccctgagctggctcttgactgcattcttgaccttcttccaccctctggactctgcagcatggctagggtttgtagctccttgagggagagatgtgttagtgatcatctatgggagaaacatttgaagaccaaatggggcaaaatccttggccctgctgctcacagagagtggcaatgctatatctcctcttccacatatcatcttgattctcctcatcatcaaactgggaatcttggttttgccaaaatcatctctctgatccgatctctttcatccgttttccgagaggataaacaaaggaggggatatgcatcttctctgccacttgattccagcatgagctgctacctctcccttgaaacaggtcgtttttggttcccagctcaagtttacaaccgtgagaatggacatgtagggttcatgttgtcatgctatgatgcggagctcagctatgatactcacacggatacgttccaagccaggtataaaatatctaatgtccacatttgacgctaacaaattttcttatttctcatcataagtttacgtttattggggagtttaggtatccaccacatggtagacgagcatctgcgattgaaaagggtgtgacatgggatagaataagagcagctcccattgatgcatcacctcatcttctccatgtatcagattctttaaaagagttgaaacctggagatcacatcgaaatccagtggagaaggaacaaagagttcccatatggatggtggtatggtcttgttcgccacttggaatcctgtgatggagatcataaccattgccattgccatcttagtgagacggtagtgttggaattcaaccagtacacagtcggatcaaggtggagaagaacgatgatcatgagagatcataaagaggaaggtaacgaagaagacgggttctatggaggaatccgaaagctaaattgtaaagaagagattgcaatgtggaaacgtcactggccttgctccatcttggaatagcattaaagaagctttgcttaaacacatggggaaagatattacacatcactatactgagagtaggttgttaaatttagacgtctattctcttttatccaatgtatggttgatcgtgaattatttgttgggaataaagtctatacg

SEQ ID NO: 25785 - protein, 234 aa, Arabidopsis thaliana
  peptide (1)..(234): Ceres Seq. ID no. 12677916
  misc_feature (60)..(101): Homolog of NCBI NO: 7459607 NR Description: hypothetical protein At2g41170 [imported] -
  misc_feature (154)..(227): Homolog of NCBI NO: 7459607 NR Description: hypothetical protein At2g41170 [imported] -
  misc_feature (60)..(227): Homolog of NCBI NO: 34909060 NR Description: P0702B09.33 [Oryza sativa (japonica
  misc_feature (58)..(227): Homolog of NCBI NO: 30688559 NR Description: F-box protein family [Arabidopsis thaliana]
  misc_feature (61)..(227): Homolog of NCBI NO: 34903372 NR Description: unnamed protein product [Oryza sativa (japonica
  misc_feature (60)..(227): Homolog of NCBI NO: 7487431 NR Description: hypothetical protein At2g32560 [imported] -
  misc_feature (1)..(227): Homolog of NCBI NO: 15225802 NR Description: unknown protein; protein id: At2g26850.1
  misc_feature (1)..(227): Homolog of NCBI NO: 30685347 NR Description: F-box protein family [Arabidopsis thaliana]
MLLYFLITCLSFFFFTKSLSLPPWASETKTLLSFYFIKNPFMNTLHQTKHDPASPVIDQMSVLDLPELALDCILDLLPPSGLCSMARVCSSLRERCVSDHLWEKHLKTKWGKILGPAAHREWQCYISSSTYHLDSPHHQTGNLGFAKIISLIRSLSSVFREDKQRRGYASSLPLDSSMSCYLSLETGRFWFPAQVYNRENGHVGFMLSCYDAELSYDTHTDTFQARYKISNVHI

SEQ ID NO: 25786 - protein, 193 aa, Arabidopsis thaliana
  peptide (1)..(193): Ceres Seq. ID no. 12677917
  misc_feature (19)..(60): Homolog of NCBI NO: 7459607 NR Description: hypothetical protein At2g41170 [imported] -
  misc_feature (113)..(186): Homolog of NCBI NO: 7459607 NR Description: hypothetical protein At2g41170 [imported] -
  misc_feature (19)..(186): Homolog of NCBI NO: 34909060 NR Description: P0702B09.33 [Oryza sativa (japonica
  misc_feature (17)..(186): Homolog of NCBI NO: 30688559 NR Description: F-box protein family [Arabidopsis thaliana]
  misc_feature (20)..(186): Homolog of NCBI NO: 34903372 NR Description: unnamed protein product [Oryza sativa (japonica
  misc_feature (19)..(186): Homolog of NCBI NO: 7487431 NR Description: hypothetical protein At2g32560 [imported] -
  misc_feature (1)..(186): Homolog of NCBI NO: 15225802 NR Description: unknown protein; protein id: At2g26850.1
  misc_feature (1)..(186): Homolog of NCBI NO: 30685347 NR Description: F-box protein family [Arabidopsis thaliana]
MNTLHQTKHDPASPVIDQMSVLDLPELALDCILDLLPPSGLCSMARVCSSLRERCVSDHLWEKHLKTKWGKILGPAAHREWQCYISSSTYHLDSPHHQTGNLGFAKIISLIRSLSSVFREDKQRRGYASSLPLDSSMSCYLSLETGRFWFPAQVYNRENGHVGFMLSCYDAELSYDTHTDTFQARYKISNVHI

SEQ ID NO: 25787 - protein, 175 aa, Arabidopsis thaliana
  peptide (1)..(175): Ceres Seq. ID no. 12677918
  misc_feature (1)..(42): Homolog of NCBI NO: 7459607 NR Description: hypothetical protein At2g41170 [imported] -
  misc_feature (95)..(168): Homolog of NCBI NO: 7459607 NR Description: hypothetical protein At2g41170 [imported] -
  misc_feature (1)..(168): Homolog of NCBI NO: 34909060 NR Description: P0702B09.33 [Oryza sativa (japonica
  misc_feature (1)..(168): Homolog of NCBI NO: 30688559 NR Description: F-box protein family [Arabidopsis thaliana]
  misc_feature (2)..(168): Homolog of NCBI NO: 34903372 NR Description: unnamed protein product [Oryza sativa (japonica
  misc_feature (1)..(168): Homolog of NCBI NO: 7487431 NR Description: hypothetical protein At2g32560 [imported] -
  misc_feature (1)..(168): Homolog of NCBI NO: 15225802 NR Description: unknown protein; protein id: At2g26850.1
  misc_feature (1)..(168): Homolog of NCBI NO: 30685347 NR Description: F-box protein family [Arabidopsis thaliana]
MSVLDLPELALDCILDLLPPSGLCSMARVCSSLRERCVSDHLWEKHLKTKWGKILGPAAHREWQCYISSSTYHLDSPHHQTGNLGFAKIISLIRSLSSVFREDKQRRGYASSLPLDSSMSCYLSLETGRFWFPAQVYNRENGHVGFMLSCYDAELSYDTHTDTFQARYKISNVHI

SEQ ID NO: 25788 - DNA, 1374 bp, Arabidopsis thaliana
  misc_feature (1)..(1374): Ceres Seq. ID no. 12333223
  misc_feature: MA Experiment ID: 108579 Result: Down-regulated in Transcription
  misc_feature: MA Experiment 108579 PARAMETER Experiment Name: At_4deg_Cold_cDNA_P Parameter: Temperature (deg C) Value: 4 vs. 22
  misc_feature: MA Experiment 108579 PARAMETER Experiment Name: At_4deg_Cold_cDNA_P Parameter: Timepoint (hr) Value: 6
  misc_feature: MA Experiment 108579 PARAMETER Experiment Name: At_4deg_Cold_cDNA_P Parameter: Tissue Value: Aerial
  misc_feature: MA Experiment ID: 20000224 Result: Up-regulated in Transcription
  misc_feature: MA Experiment ID: 20000495 Result: Up-regulated in Transcription
  misc_feature: MA Experiment 20000495 PARAMETER Experiment Name: At_Guard_Cells_P Parameter: Harvest Date Value: 8/2/2002
  misc_feature: MA Experiment 20000495 PARAMETER Experiment Name: At_Guard_Cells_P Parameter: Organism Value: A. thaliana
  misc_feature: MA Experiment 20000495 PARAMETER Experiment Name: At_Guard_Cells_P Parameter: Tissue Value: Guard Cells vs. Leaves
  misc_feature: MA Experiment ID: 20000496 Result: Up-regulated in Transcription
  misc_feature: MA Experiment 20000496 PARAMETER Experiment Name: At_Guard_Cells_P Parameter: Harvest Date Value: 7/19/2002
  misc_feature: MA Experiment 20000496 PARAMETER Experiment Name: At_Guard_Cells_P Parameter: Organism Value: Canola
  misc_feature: MA Experiment 20000496 PARAMETER Experiment Name: At_Guard_Cells_P Parameter: Tissue Value: Guard Cells vs. Leaves
  misc_feature: MA Experiment ID: 20000794 Result: Up-regulated in Transcription
  misc_feature: MA Experiment 20000794 PARAMETER Experiment Name: At_Petals_P Parameter: Age (day) Value: 23-25 days
  misc_feature: MA Experiment 20000794 PARAMETER Experiment Name: At_Petals_P Parameter: Plant Line Value: WS
  misc_feature: MA Experiment 20000794 PARAMETER Experiment Name: At_Petals_P Parameter: Tissue Value: Petals vs. Whole plant
  misc_feature: MA Experiment ID: 20001451 Result: Up-regulated in Transcription
  misc_feature: MA Experiment 20001451 PARAMETER Experiment Name: At_Far-red-induction_P Parameter: Age (day) Value: 7
  misc_feature: MA Experiment 20001451 PARAMETER Experiment Name: At_Far-red-induction_P Parameter: Light Value: Far-red vs. White
  misc_feature: MA Experiment 20001451 PARAMETER Experiment Name: At_Far-red-induction_P Parameter: Organism Value: A. thaliana
  misc_feature: MA Experiment 20001451 PARAMETER Experiment Name: At_Far-red-induction_P Parameter: Plant Line Value: Columbia
  misc_feature: MA Experiment 20001451 PARAMETER Experiment Name: At_Far-red-induction_P Parameter: Timepoint (hr) Value: 24
  misc_feature: MA Experiment 20001451 PARAMETER Experiment Name: At_Far-red-induction_P Parameter: Tissue Value: Whole Plant
  misc_feature: MA Experiment ID: 20001911 Result: Up-regulated in Transcription
  misc_feature: MA Experiment 20001911 PARAMETER Experiment Name: At_Drought_Reproduction_P Parameter: Age (day) Value: 40
  misc_feature: MA Experiment 20001911 PARAMETER Experiment Name: At_Drought_Reproduction_P Parameter: Organism Value: A. thaliana
  misc_feature: MA Experiment 20001911 PARAMETER Experiment Name: At_Drought_Reproduction_P Parameter: Plant Line Value: WS
  misc_feature: MA Experiment 20001911 PARAMETER Experiment Name: At_Drought_Reproduction_P Parameter: Timepoint (day) Value: 10
  misc_feature: MA Experiment 20001911 PARAMETER Experiment Name: At_Drought_Reproduction_P Parameter: Tissue Value: Flowers
  misc_feature: MA Experiment 20001911 PARAMETER Experiment Name: At_Drought_Reproduction_P Parameter: Treatment Value: Drought vs. No Drought
attagtggtaatttctgatcccattgctgctcctctctccggagatacaaaggcgaatctgaccagtaagaaagatggcagtcgagatggcctctcagtctcaggttttggtggaagagaaatcgagtgttagaatcttgacactaaacagaccaaagcagctgaatgctctgtccttccacatgatctctcgattgctgcaactgttccttgcatttgaggaggaccctagtgtgaaacttgtcatcctaaagggtcatgggagagccttttgtgctggtggcgatgttgcagctgttgttcgtgacatcaatcaaggtaactggagactcggtgccaattacttctcatctgaatacatgctcaactatgttatggccacatatagcaaagctcaggtttcaatcttgaatggtatcgtcatgggaggcggagctggtgtatccgtccatggtcgatttcgtattgcaactgagaacacggtttttgccatgcctgagacagctctggggctctttccagatgtaggcgcctcctacttcttgtcaaggctccctggtttttttggggagtatgttggcctcacaggagctagattagatggtgctgaaatgcttgcttgtggccttgcaactcattttgtgccttcaacgaggttgactgcattagaagcagatctttgcagaattaattcaaatgatccaacttttgcctcaacaattctcgatgcatacacccagcatccgcgcctgaaacagcagagtgcttaccgcaggttagatgttattgataggtgtttctcaaggagaacagtcgaagaaattatatctgcacttgagagagaggccactcaagaagcagatggttggatctcagctaccattcaagcattgaagaagggttcaccagcaagccttaaaatctctcttagatcgataagggaagggcgattgcagggggtggggcagtgtcttatccgcgagtatagaatggtgtgtcatgtgatgaagggagaaatcagcaaagattttgtggaggggtgcagagccatattggtagacaaagataagaacccaaagtgggagccaaggcgactggaggacatgaaggatagcatggtggagcagtacttcgagagagtggaacgggaggatgatctaaagcttccgccaaggaataacttgcctgctttagggatcgcaaagctgtgaagtggagaaggtgatggagcactattgtttacgtctgtgggaaagaaaaaagaaaataaatgtaacaacacttgtgttgaataggacttgcatacattacataaatcattattgtatttgagaattgacaccaaagcagcagagcagaattgtgttaagattc

SEQ ID NO: 25789 - protein, 378 aa, Arabidopsis thaliana
  peptide (1)..(378): Ceres Seq. ID no. 12333224
  misc_feature (20)..(191): Pfam Name: Enoyl-CoA hydratase/isomerase family Pfam Description: Enoyl-CoA hydratase/isomerase family
  misc_feature (11)..(365): Homolog of NCBI NO: 30679729 NR Description: 3-hydroxyisobutyryl-coenzyme A hydrolase
  misc_feature (1)..(365): Homolog of NCBI NO: 37536724 NR Description: putative enoyl-CoA-hydratase
  misc_feature (8)..(371): Homolog of NCBI NO: 22329062 NR Description: enoyl-CoA hydratase - like protein
  misc_feature (250)..(365): Homolog of NCBI NO: 30695218 NR Description: enoyl-CoA hydratase/isomerase family [Arabidopsis
  misc_feature (10)..(277): Homolog of NCBI NO: 30695218 NR Description: enoyl-CoA hydratase/isomerase family [Arabidopsis
  misc_feature (108)..(378): Homolog of NCBI NO: 2688820 NR Description: enoyl-CoA hydratase [Prunus armeniaca]
  misc_feature (37)..(378): Homolog of NCBI NO: 6014701 NR Description: enoyl-CoA-hydratase [Avicennia marina]
  misc_feature (8)..(376): Homolog of NCBI NO: 15224539 NR Description: 3-hydroxyisobutyryl-coenzyme A hydrolase; protein
  misc_feature (5)..(376): Homolog of NCBI NO: 15224549 NR Description: 3-hydroxyisobutyryl-coenzyme A hydrolase; protein
  misc_feature (1)..(378): Homolog of NCBI NO: 15239206 NR Description: 3-hydroxyisobutyryl-coenzyme A hydrolase
MAVEMASQSQVLVEEKSSVRILTLNRPKQLNALSFHMISRLLQLFLAFEEDPSVKLVILKGHGRAFCAGGDVAAVVRDINQGNWRLGANYFSSEYMLNYVMATYSKAQVSILNGIVMGGGAGVSVHGRFRIATENTVFAMPETALGLFPDVGASYFLSRLPGFFGEYVGLTGARLDGAEMLACGLATHFVPSTRLTALEADLCRINSNDPTFASTILDAYTQHPRLKQQSAYRRLDVIDRCFSRRTVEEIISALEREATQEADGWISATIQALKKGSPASLKISLRSIREGRLQGVGQCLIREYRMVCHVMKGEISKDFVEGCRAILVDKDKNPKWEPRRLEDMKDSMVEQYFERVEREDDLKLPPRNNLPALGIAKL

SEQ ID NO: 25790 - protein, 374 aa, Arabidopsis thaliana
  peptide (1)..(374): Ceres Seq. ID no. 12333225
  misc_feature (16)..(187): Pfam Name: Enoyl-CoA hydratase/isomerase family Pfam Description: Enoyl-CoA hydratase/isomerase family
  misc_feature (4)..(367): Homolog of NCBI NO: 22329062 NR Description: enoyl-CoA hydratase - like protein
  misc_feature (246)..(361): Homolog of NCBI NO: 30695218 NR Description: enoyl-CoA hydratase/isomerase family [Arabidopsis
  misc_feature (6)..(273): Homolog of NCBI NO: 30695218 NR Description: enoyl-CoA hydratase/isomerase family [Arabidopsis
  misc_feature (104)..(374): Homolog of NCBI NO: 2688820 NR Description: enoyl-CoA hydratase [Prunus armeniaca]
  misc_feature (7)..(361): Homolog of NCBI NO: 30679729 NR Description: 3-hydroxyisobutyryl-coenzyme A hydrolase
  misc_feature (1)..(361): Homolog of NCBI NO: 37536724 NR Description: putative enoyl-CoA-hydratase
  misc_feature (33)..(374): Homolog of NCBI NO: 6014701 NR Description: enoyl-CoA-hydratase [Avicennia marina]
  misc_feature (4)..(372): Homolog of NCBI NO: 15224539 NR Description: 3-hydroxyisobutyryl-coenzyme A hydrolase; protein
  misc_feature (1)..(372): Homolog of NCBI NO: 15224549 NR Description: 3-hydroxyisobutyryl-coenzyme A hydrolase; protein
  misc_feature (1)..(374): Homolog of NCBI NO: 15239206 NR Description: 3-hydroxyisobutyryl-coenzyme A hydrolase
MASQSQVLVEEKSSVRILTLNRPKQLNALSFHMISRLLQLFLAFEEDPSVKLVILKGHGRAFCAGGDVAAVVRDINQGNWRLGANYFSSEYMLNYVMATYSKAQVSILNGIVMGGGAGVSVHGRFRIATENTVFAMPETALGLFPDVGASYFLSRLPGFFGEYVGLTGARLDGAEMLACGLATHFVPSTRLTALEADLCRINSNDPTFASTILDAYTQHPRLKQQSAYRRLDVIDRCFSRRTVEEIISALEREATQEADGWISATIQALKKGSPASLKISLRSIREGRLQGVGQCLIREYRMVCHVMKGEISKDFVEGCRAILVDKDKNPKWEPRRLEDMKDSMVEQYFERVEREDDLKLPPRNNLPALGIAKL

SEQ ID NO: 25791 - protein, 342 aa, Arabidopsis thaliana
  peptide (1)..(342): Ceres Seq. ID no. 12333226
  misc_feature (1)..(155): Pfam Name: Enoyl-CoA hydratase/isomerase family Pfam Description: Enoyl-CoA hydratase/isomerase family
  misc_feature (1)..(329): Homolog of NCBI NO: 30679729 NR Description: 3-hydroxyisobutyryl-coenzyme A hydrolase
  misc_feature (1)..(329): Homolog of NCBI NO: 37536724 NR Description: putative enoyl-CoA-hydratase
  misc_feature (1)..(335): Homolog of NCBI NO: 22329062 NR Description: enoyl-CoA hydratase - like protein
  misc_feature (214)..(329): Homolog of NCBI NO: 30695218 NR Description: enoyl-CoA hydratase/isomerase family [Arabidopsis
  misc_feature (1)..(241): Homolog of NCBI NO: 30695218 NR Description: enoyl-CoA hydratase/isomerase family [Arabidopsis
  misc_feature (72)..(342): Homolog of NCBI NO: 2688820 NR Description: enoyl-CoA hydratase [Prunus armeniaca]
  misc_feature (1)..(342): Homolog of NCBI NO: 6014701 NR Description: enoyl-CoA-hydratase [Avicennia marina]
  misc_feature (1)..(340): Homolog of NCBI NO: 15224539 NR Description: 3-hydroxyisobutyryl-coenzyme A hydrolase; protein
  misc_feature (1)..(340): Homolog of NCBI NO: 15224549 NR Description: 3-hydroxyisobutyryl-coenzyme A hydrolase; protein
  misc_feature (1)..(342): Homolog of NCBI NO: 15239206 NR Description: 3-hydroxyisobutyryl-coenzyme A hydrolase
MISRLLQLFLAFEEDPSVKLVILKGHGRAFCAGGDVAAVVRDINQGNWRLGANYFSSEYMLNYVMATYSKAQVSILNGIVMGGGAGVSVHGRFRIATENTVFAMPETALGLFPDVGASYFLSRLPGFFGEYVGLTGARLDGAEMLACGLATHFVPSTRLTALEADLCRINSNDPTFASTILDAYTQHPRLKQQSAYRRLDVIDRCFSRRTVEEIISALEREATQEADGWISATIQALKKGSPASLKISLRSIREGRLQGVGQCLIREYRMVCHVMKGEISKDFVEGCRAILVDKDKNPKWEPRRLEDMKDSMVEQYFERVEREDDLKLPPRNNLPALGIAKL

SEQ ID NO: 25792 - DNA, 1481 bp, Arabidopsis thaliana
  misc_feature (1)..(1481): Ceres Seq. ID no. 12421991
  misc_feature: MA Experiment ID: 108434 Result: Down-regulated in Transcription
  misc_feature: MA Experiment 108434 PARAMETER Experiment Name: At_Root_Tips_cDNA_P Parameter: Tissue Value: Root Tips
  misc_feature: MA Experiment ID: 108461 Result: Down-regulated in Transcription
  misc_feature: MA Experiment 108461 PARAMETER Experiment Name: At_Germinating_Seeds_cDNA_P Parameter: Age (day) Value: 1 vs. 0
  misc_feature: MA Experiment 108461 PARAMETER Experiment Name: At_Germinating_Seeds_cDNA_P Parameter: Tissue Value: Germinating Seeds
  misc_feature: MA Experiment ID: 108462 Result: Down-regulated in Transcription
  misc_feature: MA Experiment 108462 PARAMETER Experiment Name: At_Germinating_Seeds_cDNA_P Parameter: Age (day) Value: 2 vs. 0
  misc_feature: MA Experiment 108462 PARAMETER Experiment Name: At_Germinating_Seeds_cDNA_P Parameter: Tissue Value: Germinating Seeds
  misc_feature: MA Experiment ID: 108464 Result: Down-regulated in Transcription
  misc_feature: MA Experiment 108464 PARAMETER Experiment Name: At_Germinating_Seeds_cDNA_P Parameter: Age (day) Value: 4 vs. 0
  misc_feature: MA Experiment 108464 PARAMETER Experiment Name: At_Germinating_Seeds_cDNA_P Parameter: Tissue Value: Germinating Seeds
  misc_feature: MA Experiment ID: 108473 Result: Down-regulated in Transcription
  misc_feature: MA Experiment 108473 PARAMETER Experiment Name: At_Drought_Flowers_cDNA_P Parameter: Timepoint (hr) Value: 7 d
  misc_feature: MA Experiment 108473 PARAMETER Experiment Name: At_Drought_Flowers_cDNA_P Parameter: Tissue Value: Flower
  misc_feature: MA Experiment 108473 PARAMETER Experiment Name: At_Drought_Flowers_cDNA_P Parameter: Treatment Value: Drought vs. No Drought
  misc_feature: MA Experiment ID: 108561 Result: Down-regulated in Transcription
  misc_feature: MA Experiment 108561 PARAMETER Experiment Name: At_100uM_ABA_cDNA_P Parameter: Timepoint (hr) Value: 6
  misc_feature: MA Experiment 108561 PARAMETER Experiment Name: At_100uM_ABA_cDNA_P Parameter: Tissue Value: Aerial
  misc_feature: MA Experiment 108561 PARAMETER Experiment Name: At_100uM_ABA_cDNA_P Parameter: Treatment Value: 100uM ABA vs. No Treatment
  misc_feature: MA Experiment ID: 108577 Result: Down-regulated in Transcription
  misc_feature: MA Experiment 108577 PARAMETER Experiment Name: At_42deg_Heat_cDNA_P Parameter: Temperature (deg C) Value: 42 vs. 22
  misc_feature: MA Experiment 108577 PARAMETER Experiment Name: At_42deg_Heat_cDNA_P Parameter: Timepoint (hr) Value: 6
  misc_feature: MA Experiment 108577 PARAMETER Experiment Name: At_42deg_Heat_cDNA_P Parameter: Tissue Value: Aerial
  misc_feature: MA Experiment ID: 108594 Result: Up-regulated in Transcription
  misc_feature: MA Experiment 108594 PARAMETER Experiment Name: At_Ler-rhl_Root_cDNA_P Parameter: Plant Line Value: null
  misc_feature: MA Experiment ID: 108607 Result: Down-regulated in Transcription
  misc_feature: MA Experiment 108607 PARAMETER Experiment Name: At_100uM_ABA_cDNA_P Parameter: Timepoint (hr) Value: 4
  misc_feature: MA Experiment 108607 PARAMETER Experiment Name: At_100uM_ABA_cDNA_P Parameter: Tissue Value: Aerial
  misc_feature: MA Experiment 108607 PARAMETER Experiment Name: At_100uM_ABA_cDNA_P Parameter: Treatment Value: 100uM ABA vs. No Treatment
  misc_feature: MA Experiment ID: 20000071 Result: Up-regulated in Transcription
  misc_feature: MA Experiment 20000071 PARAMETER Experiment Name: At_100uM_ABA_Mutants_cDNA_P Parameter: Plant Line Value: CS8104
  misc_feature: MA Experiment 20000071 PARAMETER Experiment Name: At_100uM_ABA_Mutants_cDNA_P Parameter: Timepoint (hr) Value: 6
  misc_feature: MA Experiment 20000071 PARAMETER Experiment Name: At_100uM_ABA_Mutants_cDNA_P Parameter: Tissue Value: Aerial
  misc_feature: MA Experiment 20000071 PARAMETER Experiment Name: At_100uM_ABA_Mutants_cDNA_P Parameter: Treatment Value: 100uM ABA vs. No Treatment
  misc_feature: MA Experiment ID: 20000093 Result: Down-regulated in Transcription
  misc_feature: MA Experiment 20000093 PARAMETER Experiment Name: At_42deg_Heat_cDNA_P Parameter: Temperature (deg C) Value: 42 vs. 22
  misc_feature: MA Experiment 20000093 PARAMETER Experiment Name: At_42deg_Heat_cDNA_P Parameter: Timepoint (hr) Value: 0.5
  misc_feature: MA Experiment 20000093 PARAMETER Experiment Name: At_42deg_Heat_cDNA_P Parameter: Tissue Value: Aerial
  misc_feature: MA Experiment ID: 20000111 Result: Down-regulated in Transcription
  misc_feature: MA Experiment 20000111 PARAMETER Experiment Name: At_42deg_Heat_cDNA_P Parameter: Temperature (deg C) Value: 42 vs. 22
  misc_feature: MA Experiment 20000111 PARAMETER Experiment Name: At_42deg_Heat_cDNA_P Parameter: Timepoint (hr) Value: 6
  misc_feature: MA Experiment 20000111 PARAMETER Experiment Name: At_42deg_Heat_cDNA_P Parameter: Tissue Value: Aerial
  misc_feature: MA Experiment ID: 20000112 Result: Down-regulated in Transcription
  misc_feature: MA Experiment 20000112 PARAMETER Experiment Name: At_42deg_Heat_cDNA_P Parameter: Temperature (deg C) Value: 42 vs. 22
  misc_feature: MA Experiment 20000112 PARAMETER Experiment Name: At_42deg_Heat_cDNA_P Parameter: Timepoint (hr) Value: 2
  misc_feature: MA Experiment 20000112 PARAMETER Experiment Name: At_42deg_Heat_cDNA_P Parameter: Tissue Value: Aerial
  misc_feature: MA Experiment ID: 20000171 Result: Down-regulated in Transcription
  misc_feature: MA Experiment 20000171 PARAMETER Experiment Name: At_42deg_Heat_P Parameter: Age (day) Value: 14
  misc_feature: MA Experiment 20000171 PARAMETER Experiment Name: At_42deg_Heat_P Parameter: Organism Value: A. thaliana
  misc_feature: MA Experiment 20000171 PARAMETER Experiment Name: At_42deg_Heat_P Parameter: Plant Line Value: WS
  misc_feature: MA Experiment 20000171 PARAMETER Experiment Name: At_42deg_Heat_P Parameter: Temperature (deg C) Value: 42 vs. 22
  misc_feature: MA Experiment 20000171 PARAMETER Experiment Name: At_42deg_Heat_P Parameter: Timepoint (hr) Value: 1
  misc_feature: MA Experiment 20000171 PARAMETER Experiment Name: At_42deg_Heat_P Parameter: Tissue Value: Aerial
  misc_feature: MA Experiment ID: 20000173 Result: Down-regulated in Transcription
  misc_feature: MA Experiment 20000173 PARAMETER Experiment Name: At_42deg_Heat_P Parameter: Age (day) Value: 14
  misc_feature: MA Experiment 20000173 PARAMETER Experiment Name: At_42deg_Heat_P Parameter: Organism Value: A. thaliana
  misc_feature: MA Experiment 20000173 PARAMETER Experiment Name: At_42deg_Heat_P Parameter: Plant Line Value: WS
  misc_feature: MA Experiment 20000173 PARAMETER Experiment Name: At_42deg_Heat_P Parameter: Temperature (deg C) Value: 42 vs. 22
  misc_feature: MA Experiment 20000173 PARAMETER Experiment Name: At_42deg_Heat_P Parameter: Timepoint (hr) Value: 6
  misc_feature: MA Experiment 20000173 PARAMETER Experiment Name: At_42deg_Heat_P Parameter: Tissue Value: Aerial
  misc_feature: MA Experiment ID: 20000182 Result: Down-regulated in Transcription
  misc_feature: MA Experiment 20000182 PARAMETER Experiment Name: At_2mM_SA_P Parameter: Age (day) Value: 14
  misc_feature: MA Experiment 20000182 PARAMETER Experiment Name: At_2mM_SA_P Parameter: Organism Value: A. thaliana
  misc_feature: MA Experiment 20000182 PARAMETER Experiment Name: At_2mM_SA_P Parameter: Plant Line Value: WS
  misc_feature: MA Experiment 20000182 PARAMETER Experiment Name: At_2mM_SA_P Parameter: Timepoint (hr) Value: 6
  misc_feature: MA Experiment 20000182 PARAMETER Experiment Name: At_2mM_SA_P Parameter: Tissue Value: Aerial
  misc_feature: MA Experiment 20000182 PARAMETER Experiment Name: At_2mM_SA_P Parameter: Treatment Value: 2mM SA vs. No Treatment
  misc_feature: MA Experiment ID: 20000184 Result: Up-regulated in Transcription
  misc_feature: MA Experiment 20000184 PARAMETER Experiment Name: At_Shoots__P Parameter: Age (day) Value: 7
  misc_feature: MA Experiment 20000184 PARAMETER Experiment Name: At_Shoots__P Parameter: Tissue Value: Shoots vs. Whole Plant
  misc_feature: MA Experiment ID: 20000185 Result: Down-regulated in Transcription
  misc_feature: MA Experiment 20000185 PARAMETER Experiment Name: At_Roots__P Parameter: Age (day) Value: 7 vs. 21
  misc_feature: MA Experiment 20000185 PARAMETER Experiment Name: At_Roots__P Parameter: Organism Value: A. thaliana
  misc_feature: MA Experiment 20000185 PARAMETER Experiment Name: At_Roots__P Parameter: Tissue Value: Roots vs. Whole Plant
  misc_feature: MA Experiment ID: 20000224 Result: Down-regulated in Transcription
  misc_feature: MA Experiment ID: 20000268 Result: Down-regulated in Transcription
  misc_feature: MA Experiment 20000268 PARAMETER Experiment Name: At_100mM_NaCl__P Parameter: Age (day) Value: 14
  misc_feature: MA Experiment 20000268 PARAMETER Experiment Name: At_100mM_NaCl__P Parameter: Organism Value: A. thaliana
  misc_feature: MA Experiment 20000268 PARAMETER Experiment Name: At_100mM_NaCl__P Parameter: Plant Line Value: WS
  misc_feature: MA Experiment 20000268 PARAMETER Experiment Name: At_100mM_NaCl__P Parameter: Timepoint (hr) Value: 6
  misc_feature: MA Experiment 20000268 PARAMETER Experiment Name: At_100mM_NaCl__P Parameter: Tissue Value: Whole Plant
  misc_feature: MA Experiment 20000268 PARAMETER Experiment Name: At_100mM_NaCl__P Parameter: Treatment Value: 100mM NaCl vs. No Treatment
  misc_feature: MA Experiment ID: 20000436 Result: Down-regulated in Transcription
  misc_feature: MA Experiment 20000436 PARAMETER Experiment Name: At_Drought_P Parameter: Age (day) Value: 7
  misc_feature: MA Experiment 20000436 PARAMETER Experiment Name: At_Drought_P Parameter: Organism Value: A. thaliana
  misc_feature: MA Experiment 20000436 PARAMETER Experiment Name: At_Drought_P Parameter: Plant Line Value: WS
  misc_feature: MA Experiment 20000436 PARAMETER Experiment Name: At_Drought_P Parameter: Timepoint (hr) Value: 12
  misc_feature: MA Experiment 20000436 PARAMETER Experiment Name: At_Drought_P Parameter: Tissue Value: Whole Plant
  misc_feature: MA Experiment 20000436 PARAMETER Experiment Name: At_Drought_P Parameter: Treatment Value: Drought vs. No Drought
  misc_feature: MA Experiment ID: 20000437 Result: Down-regulated in Transcription
  misc_feature: MA Experiment 20000437 PARAMETER Experiment Name: At_Drought_P Parameter: Age (day) Value: 8
  misc_feature: MA Experiment 20000437 PARAMETER Experiment Name: At_Drought_P Parameter: Organism Value: A. thaliana
  misc_feature: MA Experiment 20000437 PARAMETER Experiment Name: At_Drought_P Parameter: Plant Line Value: WS
  misc_feature: MA Experiment 20000437 PARAMETER Experiment Name: At_Drought_P Parameter: Timepoint (hr) Value: 24
  misc_feature: MA Experiment 20000437 PARAMETER Experiment Name: At_Drought_P Parameter: Tissue Value: Whole Plant
  misc_feature: MA Experiment 20000437 PARAMETER Experiment Name: At_Drought_P Parameter: Treatment Value: Drought vs. No Drought
  misc_feature: MA Experiment ID: 20000438 Result: Down-regulated in Transcription
  misc_feature: MA Experiment 20000438 PARAMETER Experiment Name: At_Shoots__P Parameter: Age (day) Value: 14
  misc_feature: MA Experiment 20000438 PARAMETER Experiment Name: At_Shoots__P Parameter: Tissue Value: Shoots vs. Whole Plant
  misc_feature: MA Experiment ID: 20000439 Result: Down-regulated in Transcription
  misc_feature: MA Experiment 20000439 PARAMETER Experiment Name: At_Roots__P Parameter: Age (day) Value: 14 vs. 21
  misc_feature: MA Experiment 20000439 PARAMETER Experiment Name: At_Roots__P Parameter: Organism Value: A. thaliana
  misc_feature: MA Experiment 20000439 PARAMETER Experiment Name: At_Roots__P Parameter: Tissue Value: Roots vs. Whole Plant
  misc_feature: MA Experiment ID: 20000606 Result: Up-regulated in Transcription
  misc_feature: MA Experiment 20000606 PARAMETER Experiment Name: At_CS8548_Mutant_P Parameter: Age (day) Value: 14
  misc_feature: MA Experiment 20000606 PARAMETER Experiment Name: At_CS8548_Mutant_P Parameter: Plant Line Value: CS8548 vs. wt
  misc_feature: MA Experiment 20000606 PARAMETER Experiment Name: At_CS8548_Mutant_P Parameter: Tissue Value: Whole Plant
  misc_feature: MA Experiment ID: 20000794 Result: Down-regulated in Transcription
  misc_feature: MA Experiment 20000794 PARAMETER Experiment Name: At_Petals_P Parameter: Age (day) Value: 23-25 days
  misc_feature: MA Experiment 20000794 PARAMETER Experiment Name: At_Petals_P Parameter: Plant Line Value: WS
  misc_feature: MA Experiment 20000794 PARAMETER Experiment Name: At_Petals_P Parameter: Tissue Value: Petals vs. Whole plant
  misc_feature: MA Experiment ID: 20001556 Result: Down-regulated in Transcription
  misc_feature: MA Experiment 20001556 PARAMETER Experiment Name: At_Drought_Soil_Dry_P Parameter: Age (day) Value: 26
  misc_feature: MA Experiment 20001556 PARAMETER Experiment Name: At_Drought_Soil_Dry_P Parameter: Organism Value: A. thaliana
  misc_feature: MA Experiment 20001556 PARAMETER Experiment Name: At_Drought_Soil_Dry_P Parameter: Plant Line Value: WS
  misc_feature: MA Experiment 20001556 PARAMETER Experiment Name: At_Drought_Soil_Dry_P Parameter: Post Timepoint (hr) Value: None
  misc_feature: MA Experiment 20001556 PARAMETER Experiment Name: At_Drought_Soil_Dry_P Parameter: Post-Treatment Value: None
  misc_feature: MA Experiment 20001556 PARAMETER Experiment Name: At_Drought_Soil_Dry_P Parameter: Timepoint (day) Value: 12
  misc_feature: MA Experiment 20001556 PARAMETER Experiment Name: At_Drought_Soil_Dry_P Parameter: Treatment Value: Drought vs. No Drought
  misc_feature: MA Experiment ID: 20001560 Result: Up-regulated in Transcription
  misc_feature: MA Experiment 20001560 PARAMETER Experiment Name: At_Drought_Soil_Dry_P Parameter: Age (day) Value: 28
  misc_feature: MA Experiment 20001560 PARAMETER Experiment Name: At_Drought_Soil_Dry_P Parameter: Organism Value: A. thaliana
  misc_feature: MA Experiment 20001560 PARAMETER Experiment Name: At_Drought_Soil_Dry_P Parameter: Plant Line Value: WS
  misc_feature: MA Experiment 20001560 PARAMETER Experiment Name: At_Drought_Soil_Dry_P Parameter: Post Timepoint (hr) Value: None
  misc_feature: MA Experiment 20001560 PARAMETER Experiment Name: At_Drought_Soil_Dry_P Parameter: Post-Treatment Value: None
  misc_feature: MA Experiment 20001560 PARAMETER Experiment Name: At_Drought_Soil_Dry_P Parameter: Timepoint (day) Value: 14
  misc_feature: MA Experiment 20001560 PARAMETER Experiment Name: At_Drought_Soil_Dry_P Parameter: Treatment Value: Drought vs. No Drought
  misc_feature: MA Experiment ID: 20001904 Result: Down-regulated in Transcription
  misc_feature: MA Experiment 20001904 PARAMETER Experiment Name: At_Drought_Reproduction_P Parameter: Age (day) Value: 37
  misc_feature: MA Experiment 20001904 PARAMETER Experiment Name: At_Drought_Reproduction_P Parameter: Organism Value: A. thaliana
  misc_feature: MA Experiment 20001904 PARAMETER Experiment Name: At_Drought_Reproduction_P Parameter: Plant Line Value: WS
  misc_feature: MA Experiment 20001904 PARAMETER Experiment Name: At_Drought_Reproduction_P Parameter: Timepoint (day) Value: 7
  misc_feature: MA Experiment 20001904 PARAMETER Experiment Name: At_Drought_Reproduction_P Parameter: Tissue Value: Rosettes
  misc_feature: MA Experiment 20001904 PARAMETER Experiment Name: At_Drought_Reproduction_P Parameter: Treatment Value: Drought vs. No Drought
  misc_feature: MA Experiment ID: 20001906 Result: Down-regulated in Transcription
  misc_feature: MA Experiment 20001906 PARAMETER Experiment Name: At_Drought_Reproduction_P Parameter: Age (day) Value: 35
  misc_feature: MA Experiment 20001906 PARAMETER Experiment Name: At_Drought_Reproduction_P Parameter: Organism Value: A. thaliana
  misc_feature: MA Experiment 20001906 PARAMETER Experiment Name: At_Drought_Reproduction_P Parameter: Plant Line Value: WS
  misc_feature: MA Experiment 20001906 PARAMETER Experiment Name: At_Drought_Reproduction_P Parameter: Timepoint (day) Value: 5
  misc_feature: MA Experiment 20001906 PARAMETER Experiment Name: At_Drought_Reproduction_P Parameter: Tissue Value: Siliques
  misc_feature: MA Experiment 20001906 PARAMETER Experiment Name: At_Drought_Reproduction_P Parameter: Treatment Value: Drought vs. No Drought
  misc_feature: MA Experiment ID: 20001907 Result: Down-regulated in Transcription
  misc_feature: MA Experiment 20001907 PARAMETER Experiment Name: At_Drought_Reproduction_P Parameter: Age (day) Value: 37
  misc_feature: MA Experiment 20001907 PARAMETER Experiment Name: At_Drought_Reproduction_P Parameter: Organism Value: A. thaliana
  misc_feature: MA Experiment 20001907 PARAMETER Experiment Name: At_Drought_Reproduction_P Parameter: Plant Line Value: WS
  misc_feature: MA Experiment 20001907 PARAMETER Experiment Name: At_Drought_Reproduction_P Parameter: Timepoint (day) Value: 7
  misc_feature: MA Experiment 20001907 PARAMETER Experiment Name: At_Drought_Reproduction_P Parameter: Tissue Value: Siliques
  misc_feature: MA Experiment 20001907 PARAMETER Experiment Name: At_Drought_Reproduction_P Parameter: Treatment Value: Drought vs. No Drought
  misc_feature: MA Experiment ID: 20001908 Result: Down-regulated in Transcription
  misc_feature: MA Experiment 20001908 PARAMETER Experiment Name: At_Drought_Reproduction_P Parameter: Age (day) Value: 40
  misc_feature: MA Experiment 20001908 PARAMETER Experiment Name: At_Drought_Reproduction_P Parameter: Organism Value: A. thaliana
  misc_feature: MA Experiment 20001908 PARAMETER Experiment Name: At_Drought_Reproduction_P Parameter: Plant Line Value: WS
  misc_feature: MA Experiment 20001908 PARAMETER Experiment Name: At_Drought_Reproduction_P Parameter: Timepoint (day) Value: 10
  misc_feature: MA Experiment 20001908 PARAMETER Experiment Name: At_Drought_Reproduction_P Parameter: Tissue Value: Siliques
  misc_feature: MA Experiment 20001908 PARAMETER Experiment Name: At_Drought_Reproduction_P Parameter: Treatment Value: Drought vs. No Drought
  misc_feature: Phenotype: FERTILITY Fertility-Reduced
  misc_feature: Phenotype: FERTILITY Fertility-Reduced
  misc_feature: Phenotype: FERTILITY Fertility-Reduced
  misc_feature: Phenotype: FERTILITY Fertility-Reduced
  misc_feature: Phenotype: FERTILITY Fertility-Reduced
  misc_feature: Phenotype: FERTILITY Fertility-Reduced
  misc_feature: Phenotype: FERTILITY Fertility-Reduced
  misc_feature: Phenotype: FERTILITY Fertility-Reduced
  misc_feature: Phenotype: FERTILITY Fertility-Reduced
  misc_feature: Phenotype: FERTILITY Fertility-Reduced
acttgccaaaaccctcactcttaaccattaacaatgtcgtctccggcgactactatcaccttctttttcttcttcactctctcatccttcttctacatcacttcttcactccagaacaacaacaacaacaaacacacagcaaccgttaactccttaaatatcccctccgccgcggcggagattacgctagtaaacccaaagcttccgccgcggagtctctccctcacatcctccaaaaaattcgaaggatcttcaaatctagtccacctccgttaccacatgggaccagtcctctcatcttctccgatcaacatctacgttatctggtacggacaatggtcacgcccacacaaatccctaatcagagatttcctcaattctatctccgacgctaaagcaccttctccctccgtctccgaatggtggcgcaccgcttctctctacacagatcaaaccggatccaacgtctctagatccgttttaatcgccggagaatactccgattctaaatactcccacggccaacaccttactcgtctcacgattcaggaagtcatcgcctccgccgccagatccgcttcctttccggtggatcataaaaacggaatgtatctagttctgacgtcacacgacgtcacgatgcaagatttttgccgcgccgtttgtggatttcactatttcactttcccgtcgatggttggttacactatgccttacgcttgggttggtcaatcgggaaaacaatgtcccgaggtttgtgcttatccatttgctttaccgggttacatgggacacggtggtcccggagagctccggccaccgaacggagagactggagtagatgggatggttagtgtgattggtcatgagttagctgaagttgtatcgaatccgttgattaatgcttggtacgccggagaagatccgacggctccgacggagatcggtgatttgtgtgagggattgtacggaagcggcggaggaggagggtatattggtcaagttatgagagatagagaagggaagacttttaatatgaatggtaaaggaggaagaaagtttttagttcaatggatttggaaccctaatttgaaagcttgctctggtcctaactctgtcgactaaaaaaacgaagaagaaggttaatgatggtgatttgtggtaatcactgagataatgatgaaataactcgttaggttttagaagtgtaacattattttactttatgatttcttatatatataaagtttaaagaatgcttttatactgtttttgtggtgaatttgaatgaatctttgattttcacactcacttttttgtttatttcaacagtattggtaatgtttaagagcttttaatgtacacttcgggaagtgaaaaagtttgaattcaaaattctttagatattttttcttcattttctgcattattaaatagtactagtataatcggtgtttcaataaatgtaagtgtacgataac

SEQ ID NO: 25793 - protein, 363 aa, Arabidopsis thaliana
  peptide (1)..(363): Ceres Seq. ID no. 12421992
  misc_feature (79)..(360): Pfam Name: Phosphate-induced protein 1 conserved region Pfam Description: Phosphate-induced protein 1 conserved region
  misc_feature (80)..(357): Homolog of NCBI NO: 15219504 NR Description: phosphate-induced (phi-1) protein, putative
  misc_feature (74)..(361): Homolog of NCBI NO: 34901824 NR Description: putative phi-1(phosphate-induced protein 1)
  misc_feature (55)..(363): Homolog of NCBI NO: 21592873 NR Description: unknown [Arabidopsis thaliana]
  misc_feature (55)..(363): Homolog of NCBI NO: 16604527 NR Description: AT5g51550/K17N15_10 [Arabidopsis thaliana]
  misc_feature (55)..(363): Homolog of NCBI NO: 15242118 NR Description: putative protein
  misc_feature (58)..(363): Homolog of NCBI NO: 11875173 NR Description: contains ESTs
  misc_feature (67)..(363): Homolog of NCBI NO: 25408357 NR Description: hypothetical protein At2g35150 [imported] -
  misc_feature (67)..(363): Homolog of NCBI NO: 18403760 NR Description: Expressed protein
  misc_feature (1)..(363): Homolog of NCBI NO: 21594010 NR Description: unknown [Arabidopsis thaliana]
  misc_feature (1)..(363): Homolog of NCBI NO: 18398352 NR Description: expressed protein
MSSPATTITFFFFFTLSSFFYITSSLQNNNNNKHTATVNSLNIPSAAAEITLVNPKLPPRSLSLTSSKKFEGSSNLVHLRYHMGPVLSSSPINIYVIWYGQWSRPHKSLIRDFLNSISDAKAPSPSVSEWWRTASLYTDQTGSNVSRSVLIAGEYSDSKYSHGQHLTRLTIQEVIASAARSASFPVDHKNGMYLVLTSHDVTMQDFCRAVCGFHYFTFPSMVGYTMPYAWVGQSGKQCPEVCAYPFALPGYMGHGGPGELRPPNGETGVDGMVSVIGHELAEVVSNPLINAWYAGEDPTAPTEIGDLCEGLYGSGGGGGYIGQVMRDREGKTFNMNGKGGRKFLVQWIWNPNLKACSGPNSVD

SEQ ID NO: 25794 - protein, 281 aa, Arabidopsis thaliana
  peptide (1)..(281): Ceres Seq. ID no. 12421993
  misc_feature (1)..(278): Pfam Name: Phosphate-induced protein 1 conserved region Pfam Description: Phosphate-induced protein 1 conserved region
  misc_feature (1)..(275): Homolog of NCBI NO: 15219504 NR Description: phosphate-induced (phi-1) protein, putative
  misc_feature (1)..(279): Homolog of NCBI NO: 34901824 NR Description: putative phi-1(phosphate-induced protein 1)
  misc_feature (1)..(281): Homolog of NCBI NO: 21592873 NR Description: unknown [Arabidopsis thaliana]
  misc_feature (1)..(281): Homolog of NCBI NO: 16604527 NR Description: AT5g51550/K17N15_10 [Arabidopsis thaliana]
  misc_feature (1)..(281): Homolog of NCBI NO: 15242118 NR Description: putative protein
  misc_feature (1)..(281): Homolog of NCBI NO: 11875173 NR Description: contains ESTs
  misc_feature (1)..(281): Homolog of NCBI NO: 25408357 NR Description: hypothetical protein At2g35150 [imported] -
  misc_feature (1)..(281): Homolog of NCBI NO: 18403760 NR Description: Expressed protein
  misc_feature (1)..(281): Homolog of NCBI NO: 21594010 NR Description: unknown [Arabidopsis thaliana]
  misc_feature (1)..(281): Homolog of NCBI NO: 18398352 NR Description: expressed protein
MGPVLSSSPINIYVIWYGQWSRPHKSLIRDFLNSISDAKAPSPSVSEWWRTASLYTDQTGSNVSRSVLIAGEYSDSKYSHGQHLTRLTIQEVIASAARSASFPVDHKNGMYLVLTSHDVTMQDFCRAVCGFHYFTFPSMVGYTMPYAWVGQSGKQCPEVCAYPFALPGYMGHGGPGELRPPNGETGVDGMVSVIGHELAEVVSNPLINAWYAGEDPTAPTEIGDLCEGLYGSGGGGGYIGQVMRDREGKTFNMNGKGGRKFLVQWIWNPNLKACSGPNSVD

SEQ ID NO: 25795 - DNA, 1271 bp, Arabidopsis thaliana
  misc_feature (1)..(1271): Ceres Seq. ID no. 12326042
  misc_feature: MA Experiment ID: 108461 Result: Up-regulated in Transcription
  misc_feature: MA Experiment 108461 PARAMETER Experiment Name: At_Germinating_Seeds_cDNA_P Parameter: Age (day) Value: 1 vs. 0
  misc_feature: MA Experiment 108461 PARAMETER Experiment Name: At_Germinating_Seeds_cDNA_P Parameter: Tissue Value: Germinating Seeds
  misc_feature: MA Experiment ID: 108462 Result: Up-regulated in Transcription
  misc_feature: MA Experiment 108462 PARAMETER Experiment Name: At_Germinating_Seeds_cDNA_P Parameter: Age (day) Value: 2 vs. 0
  misc_feature: MA Experiment 108462 PARAMETER Experiment Name: At_Germinating_Seeds_cDNA_P Parameter: Tissue Value: Germinating Seeds
  misc_feature: MA Experiment ID: 108463 Result: Up-regulated in Transcription
  misc_feature: MA Experiment 108463 PARAMETER Experiment Name: At_Germinating_Seeds_cDNA_P Parameter: Age (day) Value: 3 vs. 0
  misc_feature: MA Experiment 108463 PARAMETER Experiment Name: At_Germinating_Seeds_cDNA_P Parameter: Tissue Value: Germinating Seeds
  misc_feature: MA Experiment ID: 108464 Result: Up-regulated in Transcription
  misc_feature: MA Experiment 108464 PARAMETER Experiment Name: At_Germinating_Seeds_cDNA_P Parameter: Age (day) Value: 4 vs. 0
  misc_feature: MA Experiment 108464 PARAMETER Experiment Name: At_Germinating_Seeds_cDNA_P Parameter: Tissue Value: Germinating Seeds
  misc_feature: MA Experiment ID: 108488 Result: Down-regulated in Transcription
  misc_feature: MA Experiment ID: 108489 Result: Up-regulated in Transcription
  misc_feature: MA Experiment ID: 108561 Result: Up-regulated in Transcription
  misc_feature: MA Experiment 108561 PARAMETER Experiment Name: At_100uM_ABA_cDNA_P Parameter: Timepoint (hr) Value: 6
  misc_feature: MA Experiment 108561 PARAMETER Experiment Name: At_100uM_ABA_cDNA_P Parameter: Tissue Value: Aerial
  misc_feature: MA Experiment 108561 PARAMETER Experiment Name: At_100uM_ABA_cDNA_P Parameter: Treatment Value: 100uM ABA vs. No Treatment
  misc_feature: MA Experiment ID: 108594 Result: Down-regulated in Transcription
  misc_feature: MA Experiment 108594 PARAMETER Experiment Name: At_Ler-rhl_Root_cDNA_P Parameter: Plant Line Value: null
  misc_feature: MA Experiment ID: 108595 Result: Up-regulated in Transcription
  misc_feature: MA Experiment 108595 PARAMETER Experiment Name: At_Ler-pi_Ovule_cDNA_P Parameter: Plant Line Value: null
  misc_feature: MA Experiment ID: 20000184 Result: Down-regulated in Transcription
  misc_feature: MA Experiment 20000184 PARAMETER Experiment Name: At_Shoots__P Parameter: Age (day) Value: 7
  misc_feature: MA Experiment 20000184 PARAMETER Experiment Name: At_Shoots__P Parameter: Tissue Value: Shoots vs. Whole Plant
  misc_feature: MA Experiment ID: 20000224 Result: Up-regulated in Transcription
  misc_feature: MA Experiment ID: 20000264 Result: Up-regulated in Transcription
  misc_feature: MA Experiment 20000264 PARAMETER Experiment Name: At_Open_Flower_P Parameter: Age (day) Value: 21
  misc_feature: MA Experiment 20000264 PARAMETER Experiment Name: At_Open_Flower_P Parameter: Plant Line Value: WS
  misc_feature: MA Experiment 20000264 PARAMETER Experiment Name: At_Open_Flower_P Parameter: Tissue Value: Open Flower vs. Whole Plant
  misc_feature: MA Experiment ID: 20000437 Result: Up-regulated in Transcription
  misc_feature: MA Experiment 20000437 PARAMETER Experiment Name: At_Drought_P Parameter: Age (day) Value: 8
  misc_feature: MA Experiment 20000437 PARAMETER Experiment Name: At_Drought_P Parameter: Organism Value: A. thaliana
  misc_feature: MA Experiment 20000437 PARAMETER Experiment Name: At_Drought_P Parameter: Plant Line Value: WS
  misc_feature: MA Experiment 20000437 PARAMETER Experiment Name: At_Drought_P Parameter: Timepoint (hr) Value: 24
  misc_feature: MA Experiment 20000437 PARAMETER Experiment Name: At_Drought_P Parameter: Tissue Value: Whole Plant
  misc_feature: MA Experiment 20000437 PARAMETER Experiment Name: At_Drought_P Parameter: Treatment Value: Drought vs. No Drought
  misc_feature: MA Experiment ID: 20000438 Result: Down-regulated in Transcription
  misc_feature: MA Experiment 20000438 PARAMETER Experiment Name: At_Shoots__P Parameter: Age (day) Value: 14
  misc_feature: MA Experiment 20000438 PARAMETER Experiment Name: At_Shoots__P Parameter: Tissue Value: Shoots vs. Whole Plant
  misc_feature: MA Experiment ID: 20000453 Result: Up-regulated in Transcription
  misc_feature: MA Experiment 20000453 PARAMETER Experiment Name: At_100uM_ABA_P Parameter: Age (day) Value: 15
  misc_feature: MA Experiment 20000453 PARAMETER Experiment Name: At_100uM_ABA_P Parameter: Organism Value: A. thaliana
  misc_feature: MA Experiment 20000453 PARAMETER Experiment Name: At_100uM_ABA_P Parameter: Plant Line Value: WS
  misc_feature: MA Experiment 20000453 PARAMETER Experiment Name: At_100uM_ABA_P Parameter: Timepoint (hr) Value: 24
  misc_feature: MA Experiment 20000453 PARAMETER Experiment Name: At_100uM_ABA_P Parameter: Tissue Value: Aerial
  misc_feature: MA Experiment 20000453 PARAMETER Experiment Name: At_100uM_ABA_P Parameter: Treatment Value: 100uM ABA vs. No Treatment
  misc_feature: MA Experiment ID: 20000455 Result: Up-regulated in Transcription
  misc_feature: MA Experiment 20000455 PARAMETER Experiment Name: At_100uM_ABA_P Parameter: Age (day) Value: 16
  misc_feature: MA Experiment 20000455 PARAMETER Experiment Name: At_100uM_ABA_P Parameter: Organism Value: A. thaliana
  misc_feature: MA Experiment 20000455 PARAMETER Experiment Name: At_100uM_ABA_P Parameter: Plant Line Value: WS
  misc_feature: MA Experiment 20000455 PARAMETER Experiment Name: At_100uM_ABA_P Parameter: Timepoint (hr) Value: 48
  misc_feature: MA Experiment 20000455 PARAMETER Experiment Name: At_100uM_ABA_P Parameter: Tissue Value: Aerial
  misc_feature: MA Experiment 20000455 PARAMETER Experiment Name: At_100uM_ABA_P Parameter: Treatment Value: 100uM ABA vs. No Treatment
  misc_feature: MA Experiment ID: 20000495 Result: Down-regulated in Transcription
  misc_feature: MA Experiment 20000495 PARAMETER Experiment Name: At_Guard_Cells_P Parameter: Harvest Date Value: 8/2/2002
  misc_feature: MA Experiment 20000495 PARAMETER Experiment Name: At_Guard_Cells_P Parameter: Organism Value: A. thaliana
  misc_feature: MA Experiment 20000495 PARAMETER Experiment Name: At_Guard_Cells_P Parameter: Tissue Value: Guard Cells vs. Leaves
  misc_feature: MA Experiment ID: 20000527 Result: Down-regulated in Transcription
  misc_feature: MA Experiment 20000527 PARAMETER Experiment Name: At_10percent_PEG_P Parameter: Age (day) Value: 20
  misc_feature: MA Experiment 20000527 PARAMETER Experiment Name: At_10percent_PEG_P Parameter: Organism Value: A. thaliana
  misc_feature: MA Experiment 20000527 PARAMETER Experiment Name: At_10percent_PEG_P Parameter: Plant Line Value: WS
  misc_feature: MA Experiment 20000527 PARAMETER Experiment Name: At_10percent_PEG_P Parameter: Timepoint (day) Value: 20
  misc_feature: MA Experiment 20000527 PARAMETER Experiment Name: At_10percent_PEG_P Parameter: Tissue Value: Whole Plant
  misc_feature: MA Experiment 20000527 PARAMETER Experiment Name: At_10percent_PEG_P Parameter: Treatment Value: 10percent PEG vs. No Treatment
  misc_feature: MA Experiment ID: 20000794 Result: Up-regulated in Transcription
  misc_feature: MA Experiment 20000794 PARAMETER Experiment Name: At_Petals_P Parameter: Age (day) Value: 23-25 days
  misc_feature: MA Experiment 20000794 PARAMETER Experiment Name: At_Petals_P Parameter: Plant Line Value: WS
  misc_feature: MA Experiment 20000794 PARAMETER Experiment Name: At_Petals_P Parameter: Tissue Value: Petals vs. Whole plant
  misc_feature: MA Experiment ID: 20001248 Result: Down-regulated in Transcription
  misc_feature: MA Experiment 20001248 PARAMETER Experiment Name: At_Far-red-induction_P Parameter: Age (day) Value: 7
  misc_feature: MA Experiment 20001248 PARAMETER Experiment Name: At_Far-red-induction_P Parameter: Light Value: Far-red vs. White
  misc_feature: MA Experiment 20001248 PARAMETER Experiment Name: At_Far-red-induction_P Parameter: Organism Value: A. thaliana
  misc_feature: MA Experiment 20001248 PARAMETER Experiment Name: At_Far-red-induction_P Parameter: Plant Line Value: Columbia
  misc_feature: MA Experiment 20001248 PARAMETER Experiment Name: At_Far-red-induction_P Parameter: Timepoint (hr) Value: 4
  misc_feature: MA Experiment 20001248 PARAMETER Experiment Name: At_Far-red-induction_P Parameter: Tissue Value: Whole Plant
  misc_feature: MA Experiment ID: 20001555 Result: Up-regulated in Transcription
  misc_feature: MA Experiment 20001555 PARAMETER Experiment Name: At_Drought_Soil_Dry_P Parameter: Age (day) Value: 24
  misc_feature: MA Experiment 20001555 PARAMETER Experiment Name: At_Drought_Soil_Dry_P Parameter: Organism Value: A. thaliana
  misc_feature: MA Experiment 20001555 PARAMETER Experiment Name: At_Drought_Soil_Dry_P Parameter: Plant Line Value: WS
  misc_feature: MA Experiment 20001555 PARAMETER Experiment Name: At_Drought_Soil_Dry_P Parameter: Post Timepoint (hr) Value: None
  misc_feature: MA Experiment 20001555 PARAMETER Experiment Name: At_Drought_Soil_Dry_P Parameter: Post-Treatment Value: None
  misc_feature: MA Experiment 20001555 PARAMETER Experiment Name: At_Drought_Soil_Dry_P Parameter: Timepoint (day) Value: 10
  misc_feature: MA Experiment 20001555 PARAMETER Experiment Name: At_Drought_Soil_Dry_P Parameter: Treatment Value: Drought vs. No Drought
  misc_feature: MA Experiment ID: 20001556 Result: Up-regulated in Transcription
  misc_feature: MA Experiment 20001556 PARAMETER Experiment Name: At_Drought_Soil_Dry_P Parameter: Age (day) Value: 26
  misc_feature: MA Experiment 20001556 PARAMETER Experiment Name: At_Drought_Soil_Dry_P Parameter: Organism Value: A. thaliana
  misc_feature: MA Experiment 20001556 PARAMETER Experiment Name: At_Drought_Soil_Dry_P Parameter: Plant Line Value: WS
  misc_feature: MA Experiment 20001556 PARAMETER Experiment Name: At_Drought_Soil_Dry_P Parameter: Post Timepoint (hr) Value: None
  misc_feature: MA Experiment 20001556 PARAMETER Experiment Name: At_Drought_Soil_Dry_P Parameter: Post-Treatment Value: None
  misc_feature: MA Experiment 20001556 PARAMETER Experiment Name: At_Drought_Soil_Dry_P Parameter: Timepoint (day) Value: 12
  misc_feature: MA Experiment 20001556 PARAMETER Experiment Name: At_Drought_Soil_Dry_P Parameter: Treatment Value: Drought vs. No Drought
  misc_feature: MA Experiment ID: 20001559 Result: Up-regulated in Transcription
  misc_feature: MA Experiment 20001559 PARAMETER Experiment Name: At_Drought_Soil_Dry_P Parameter: Age (day) Value: 28
  misc_feature: MA Experiment 20001559 PARAMETER Experiment Name: At_Drought_Soil_Dry_P Parameter: Organism Value: A. thaliana
  misc_feature: MA Experiment 20001559 PARAMETER Experiment Name: At_Drought_Soil_Dry_P Parameter: Plant Line Value: WS
  misc_feature: MA Experiment 20001559 PARAMETER Experiment Name: At_Drought_Soil_Dry_P Parameter: Post Timepoint (hr) Value: 29
  misc_feature: MA Experiment 20001559 PARAMETER Experiment Name: At_Drought_Soil_Dry_P Parameter: Post-Treatment Value: Re-Water vs. No Drought
  misc_feature: MA Experiment 20001559 PARAMETER Experiment Name: At_Drought_Soil_Dry_P Parameter: Timepoint (day) Value: 14
  misc_feature: MA Experiment 20001559 PARAMETER Experiment Name: At_Drought_Soil_Dry_P Parameter: Treatment Value: Drought vs. No Drought
  misc_feature: MA Experiment ID: 20001904 Result: Up-regulated in Transcription
  misc_feature: MA Experiment 20001904 PARAMETER Experiment Name: At_Drought_Reproduction_P Parameter: Age (day) Value: 37
  misc_feature: MA Experiment 20001904 PARAMETER Experiment Name: At_Drought_Reproduction_P Parameter: Organism Value: A. thaliana
  misc_feature: MA Experiment 20001904 PARAMETER Experiment Name: At_Drought_Reproduction_P Parameter: Plant Line Value: WS
  misc_feature: MA Experiment 20001904 PARAMETER Experiment Name: At_Drought_Reproduction_P Parameter: Timepoint (day) Value: 7
  misc_feature: MA Experiment 20001904 PARAMETER Experiment Name: At_Drought_Reproduction_P Parameter: Tissue Value: Rosettes
  misc_feature: MA Experiment 20001904 PARAMETER Experiment Name: At_Drought_Reproduction_P Parameter: Treatment Value: Drought vs. No Drought
  misc_feature: MA Experiment ID: 20001905 Result: Up-regulated in Transcription
  misc_feature: MA Experiment 20001905 PARAMETER Experiment Name: At_Drought_Reproduction_P Parameter: Age (day) Value: 40
  misc_feature: MA Experiment 20001905 PARAMETER Experiment Name: At_Drought_Reproduction_P Parameter: Organism Value: A. thaliana
  misc_feature: MA Experiment 20001905 PARAMETER Experiment Name: At_Drought_Reproduction_P Parameter: Plant Line Value: WS
  misc_feature: MA Experiment 20001905 PARAMETER Experiment Name: At_Drought_Reproduction_P Parameter: Timepoint (day) Value: 10
  misc_feature: MA Experiment 20001905 PARAMETER Experiment Name: At_Drought_Reproduction_P Parameter: Tissue Value: Rosettes
  misc_feature: MA Experiment 20001905 PARAMETER Experiment Name: At_Drought_Reproduction_P Parameter: Treatment Value: Drought vs. No Drought
aaattcgatgaggttgttatagacaagagaagacatttttatacaaaagagtttatcattatataagtttcaaactttgaagatatggcatcggcttttagatcatccacgaggttgattcttgtattaggtatactgattttgtgttcggtttcttctgtccgaagctggagcaaagaaggtcatattcttacttgtagaattgctcagaatcttttagaagccggaccagcacatgtagtagagaatctgttaccggattacgtgaaaggagatttatcagcattgtgtgtgtggcctgaccagatccgacattggtacaagtatcgttggaccagccatctccattacatcgacactcccgaccaagcctgctcttacgaatactctagggattgtcatgatcaacatggattgaaggatatgtgtgtggatggagcaatccagaatttcacgtctcagcttcagcattacggtgaaggaacatctgatcgtagatataacatgaccgaagcccttttgttcttgtctcatttcatgggagatattcatcagccgatgcatgtgggattcacaagtgatgaaggaggaaacacgatagatttacgttggtacaaacacaaatccaatctacatcatgtatgggatagagagatcattctcacggctctaaaagaaaactacgacaagaacttggatcttctccaagaggatcttgagaagaacatcaccaatggattatggcacgacgatctatcttcgtggacagaatgcaacgatcttatcgcttgtccacacaagtatgcttcagagagtataaagttagcttgtaaatggggatacaaaggcgtcaagtctggtgaaacgttatcagaagaatatttcaatacaaggttgccaatagtgatgaagagaatagttcagggaggagttagactagccatgatactaaaccgggtttttagtgacgatcatgctattgctggtgttgctgccacttgaaccaaacccgacataccggggcatcaaagcatttgattaagagattatttgatacattcacaaaattaattaaggctgatcagacattcttttcttttagtagctttatctatgtgacagctaatgcctgtggactgctttgtttagaagtgtttagcattagatcatatgctaattcaatgttattaattcatcgtatgatcgttttagagatagtggttctaagaaaataaactagattatttcattcaagtaaacctagttcatct

SEQ ID NO: 25796 - protein, 305 aa, Arabidopsis thaliana
  peptide (1)..(305): Ceres Seq. ID no. 12326043
  misc_feature (11)..(293): Homolog of NCBI NO: 21554516 NR Description: putative bifunctional nuclease [Arabidopsis
  misc_feature (11)..(293): Homolog of NCBI NO: 15221343 NR Description: putative bifunctional nuclease
  misc_feature (11)..(293): Homolog of NCBI NO: 4099833 NR Description: bifunctional nuclease [Zinnia elegans]
  misc_feature (1)..(301): Homolog of NCBI NO: 22328857 NR Description: expressed protein; protein id: At4g21585.1
  misc_feature (17)..(293): Homolog of NCBI NO: 4099835 NR Description: bifunctional nuclease [Zinnia elegans]
  misc_feature (9)..(300): Homolog of NCBI NO: 7229711 NR Description: CEL I mismatch endonuclease [Apium graveolens]
  misc_feature (11)..(299): Homolog of NCBI NO: 3242447 NR Description: endonuclease [Zinnia elegans]
  misc_feature (13)..(295): Homolog of NCBI NO: 3551956 NR Description: senescence-associated protein 6 [Hemerocallis
  misc_feature (1)..(305): Homolog of NCBI NO: 4099831 NR Description: bifunctional nuclease bfn1 [Arabidopsis thaliana]
  misc_feature (1)..(305): Homolog of NCBI NO: 15220307 NR Description: bifunctional nuclease bfn1
MASAFRSSTRLILVLGILILCSVSSVRSWSKEGHILTCRIAQNLLEAGPAHVVENLLPDYVKGDLSALCVWPDQIRHWYKYRWTSHLHYIDTPDQACSYEYSRDCHDQHGLKDMCVDGAIQNFTSQLQHYGEGTSDRRYNMTEALLFLSHFMGDIHQPMHVGFTSDEGGNTIDLRWYKHKSNLHHVWDREIILTALKENYDKNLDLLQEDLEKNITNGLWHDDLSSWTECNDLIACPHKYASESIKLACKWGYKGVKSGETLSEEYFNTRLPIVMKRIVQGGVRLAMILNRVFSDDHAIAGVAAT

SEQ ID NO: 25797 - protein, 192 aa, Arabidopsis thaliana
  peptide (1)..(192): Ceres Seq. ID no. 12326044
  misc_feature (1)..(180): Homolog of NCBI NO: 21554516 NR Description: putative bifunctional nuclease [Arabidopsis
  misc_feature (1)..(180): Homolog of NCBI NO: 15221343 NR Description: putative bifunctional nuclease
  misc_feature (1)..(180): Homolog of NCBI NO: 4099833 NR Description: bifunctional nuclease [Zinnia elegans]
  misc_feature (1)..(188): Homolog of NCBI NO: 22328857 NR Description: expressed protein; protein id: At4g21585.1
  misc_feature (1)..(180): Homolog of NCBI NO: 4099835 NR Description: bifunctional nuclease [Zinnia elegans]
  misc_feature (1)..(187): Homolog of NCBI NO: 7229711 NR Description: CEL I mismatch endonuclease [Apium graveolens]
  misc_feature (1)..(186): Homolog of NCBI NO: 3242447 NR Description: endonuclease [Zinnia elegans]
  misc_feature (1)..(182): Homolog of NCBI NO: 3551956 NR Description: senescence-associated protein 6 [Hemerocallis
  misc_feature (1)..(192): Homolog of NCBI NO: 4099831 NR Description: bifunctional nuclease bfn1 [Arabidopsis thaliana]
  misc_feature (1)..(192): Homolog of NCBI NO: 15220307 NR Description: bifunctional nuclease bfn1
MCVDGAIQNFTSQLQHYGEGTSDRRYNMTEALLFLSHFMGDIHQPMHVGFTSDEGGNTIDLRWYKHKSNLHHVWDREIILTALKENYDKNLDLLQEDLEKNITNGLWHDDLSSWTECNDLIACPHKYASESIKLACKWGYKGVKSGETLSEEYFNTRLPIVMKRIVQGGVRLAMILNRVFSDDHAIAGVAAT

SEQ ID NO: 25798 - protein, 165 aa, Arabidopsis thaliana
  peptide (1)..(165): Ceres Seq. ID no. 12326045
  misc_feature (1)..(153): Homolog of NCBI NO: 21554516 NR Description: putative bifunctional nuclease [Arabidopsis
  misc_feature (1)..(153): Homolog of NCBI NO: 15221343 NR Description: putative bifunctional nuclease
  misc_feature (1)..(153): Homolog of NCBI NO: 4099833 NR Description: bifunctional nuclease [Zinnia elegans]
  misc_feature (1)..(161): Homolog of NCBI NO: 22328857 NR Description: expressed protein; protein id: At4g21585.1
  misc_feature (1)..(153): Homolog of NCBI NO: 4099835 NR Description: bifunctional nuclease [Zinnia elegans]
  misc_feature (1)..(160): Homolog of NCBI NO: 7229711 NR Description: CEL I mismatch endonuclease [Apium graveolens]
  misc_feature (1)..(159): Homolog of NCBI NO: 3242447 NR Description: endonuclease [Zinnia elegans]
  misc_feature (1)..(155): Homolog of NCBI NO: 3551956 NR Description: senescence-associated protein 6 [Hemerocallis
  misc_feature (1)..(165): Homolog of NCBI NO: 4099831 NR Description: bifunctional nuclease bfn1 [Arabidopsis thaliana]
  misc_feature (1)..(165): Homolog of NCBI NO: 15220307 NR Description: bifunctional nuclease bfn1
MTEALLFLSHFMGDIHQPMHVGFTSDEGGNTIDLRWYKHKSNLHHVWDREIILTALKENYDKNLDLLQEDLEKNITNGLWHDDLSSWTECNDLIACPHKYASESIKLACKWGYKGVKSGETLSEEYFNTRLPIVMKRIVQGGVRLAMILNRVFSDDHAIAGVAAT

SEQ ID NO: 25799 - DNA, 1159 bp, Arabidopsis thaliana
  misc_feature (1)..(1159): Ceres Seq. ID no. 12603510
  misc_feature: MA Experiment ID: 20000166 Result: Up-regulated in Transcription
  misc_feature: MA Experiment 20000166 PARAMETER Experiment Name: At_100uM_ABA_P Parameter: Age (day) Value: 14
  misc_feature: MA Experiment 20000166 PARAMETER Experiment Name: At_100uM_ABA_P Parameter: Organism Value: A. thaliana
  misc_feature: MA Experiment 20000166 PARAMETER Experiment Name: At_100uM_ABA_P Parameter: Plant Line Value: WS
  misc_feature: MA Experiment 20000166 PARAMETER Experiment Name: At_100uM_ABA_P Parameter: Timepoint (hr) Value: 1
  misc_feature: MA Experiment 20000166 PARAMETER Experiment Name: At_100uM_ABA_P Parameter: Tissue Value: Aerial
  misc_feature: MA Experiment 20000166 PARAMETER Experiment Name: At_100uM_ABA_P Parameter: Treatment Value: 100uM ABA vs. No Treatment
  misc_feature: MA Experiment ID: 20000169 Result: Up-regulated in Transcription
  misc_feature: MA Experiment 20000169 PARAMETER Experiment Name: At_100uM_ABA_P Parameter: Age (day) Value: 14
  misc_feature: MA Experiment 20000169 PARAMETER Experiment Name: At_100uM_ABA_P Parameter: Organism Value: A. thaliana
  misc_feature: MA Experiment 20000169 PARAMETER Experiment Name: At_100uM_ABA_P Parameter: Plant Line Value: WS
  misc_feature: MA Experiment 20000169 PARAMETER Experiment Name: At_100uM_ABA_P Parameter: Timepoint (hr) Value: 6
  misc_feature: MA Experiment 20000169 PARAMETER Experiment Name: At_100uM_ABA_P Parameter: Tissue Value: Aerial
  misc_feature: MA Experiment 20000169 PARAMETER Experiment Name: At_100uM_ABA_P Parameter: Treatment Value: 100uM ABA vs. No Treatment
  misc_feature: MA Experiment ID: 20000179 Result: Up-regulated in Transcription
  misc_feature: MA Experiment 20000179 PARAMETER Experiment Name: At_Germinating_Seeds_P Parameter: Age (hr) Value: 6 vs. 0
  misc_feature: MA Experiment 20000179 PARAMETER Experiment Name: At_Germinating_Seeds_P Parameter: Tissue Value: Germinating Seeds
  misc_feature: MA Experiment ID: 20000184 Result: Down-regulated in Transcription
  misc_feature: MA Experiment 20000184 PARAMETER Experiment Name: At_Shoots__P Parameter: Age (day) Value: 7
  misc_feature: MA Experiment 20000184 PARAMETER Experiment Name: At_Shoots__P Parameter: Tissue Value: Shoots vs. Whole Plant
  misc_feature: MA Experiment ID: 20000185 Result: Down-regulated in Transcription
  misc_feature: MA Experiment 20000185 PARAMETER Experiment Name: At_Roots__P Parameter: Age (day) Value: 7 vs. 21
  misc_feature: MA Experiment 20000185 PARAMETER Experiment Name: At_Roots__P Parameter: Organism Value: A. thaliana
  misc_feature: MA Experiment 20000185 PARAMETER Experiment Name: At_Roots__P Parameter: Tissue Value: Roots vs. Whole Plant
  misc_feature: MA Experiment ID: 20000227 Result: Down-regulated in Transcription
  misc_feature: MA Experiment 20000227 PARAMETER Experiment Name: At_Root-Tips-vs-Tops_P Parameter: Tissue Value: Root Tips vs. Root Tops
  misc_feature: MA Experiment ID: 20000234 Result: Up-regulated in Transcription
  misc_feature: MA Experiment 20000234 PARAMETER Experiment Name: At_Siliques_P Parameter: Age (day) Value: 21
  misc_feature: MA Experiment 20000234 PARAMETER Experiment Name: At_Siliques_P Parameter: Organism Value: A. thaliana
  misc_feature: MA Experiment 20000234 PARAMETER Experiment Name: At_Siliques_P Parameter: Plant Line Value: WS
  misc_feature: MA Experiment 20000234 PARAMETER Experiment Name: At_Siliques_P Parameter: Tissue Value: Less Than 5mm Siliques vs. Whole Plant
  misc_feature: MA Experiment ID: 20000235 Result: Up-regulated in Transcription
  misc_feature: MA Experiment 20000235 PARAMETER Experiment Name: At_Siliques_P Parameter: Age (day) Value: 21
  misc_feature: MA Experiment 20000235 PARAMETER Experiment Name: At_Siliques_P Parameter: Organism Value: A. thaliana
  misc_feature: MA Experiment 20000235 PARAMETER Experiment Name: At_Siliques_P Parameter: Plant Line Value: WS
  misc_feature: MA Experiment 20000235 PARAMETER Experiment Name: At_Siliques_P Parameter: Tissue Value: 5-10mm Siliques vs. Whole Plant
  misc_feature: MA Experiment ID: 20000264 Result: Down-regulated in Transcription
  misc_feature: MA Experiment 20000264 PARAMETER Experiment Name: At_Open_Flower_P Parameter: Age (day) Value: 21
  misc_feature: MA Experiment 20000264 PARAMETER Experiment Name: At_Open_Flower_P Parameter: Plant Line Value: WS
  misc_feature: MA Experiment 20000264 PARAMETER Experiment Name: At_Open_Flower_P Parameter: Tissue Value: Open Flower vs. Whole Plant
  misc_feature: MA Experiment ID: 20000267 Result: Up-regulated in Transcription
  misc_feature: MA Experiment 20000267 PARAMETER Experiment Name: At_Drought_P Parameter: Age (day) Value: 7
  misc_feature: MA Experiment 20000267 PARAMETER Experiment Name: At_Drought_P Parameter: Organism Value: A. thaliana
  misc_feature: MA Experiment 20000267 PARAMETER Experiment Name: At_Drought_P Parameter: Plant Line Value: WS
  misc_feature: MA Experiment 20000267 PARAMETER Experiment Name: At_Drought_P Parameter: Timepoint (hr) Value: 6
  misc_feature: MA Experiment 20000267 PARAMETER Experiment Name: At_Drought_P Parameter: Tissue Value: Whole Plant
  misc_feature: MA Experiment 20000267 PARAMETER Experiment Name: At_Drought_P Parameter: Treatment Value: Drought vs. No Drought
  misc_feature: MA Experiment ID: 20000286 Result: Down-regulated in Transcription
  misc_feature: MA Experiment 20000286 PARAMETER Experiment Name: At_Open_Flower_P Parameter: Age (day) Value: 21
  misc_feature: MA Experiment 20000286 PARAMETER Experiment Name: At_Open_Flower_P Parameter: Plant Line Value: WS
  misc_feature: MA Experiment 20000286 PARAMETER Experiment Name: At_Open_Flower_P Parameter: Tissue Value: Half Open vs. Whole Plant
  misc_feature: MA Experiment ID: 20000436 Result: Up-regulated in Transcription
  misc_feature: MA Experiment 20000436 PARAMETER Experiment Name: At_Drought_P Parameter: Age (day) Value: 7
  misc_feature: MA Experiment 20000436 PARAMETER Experiment Name: At_Drought_P Parameter: Organism Value: A. thaliana
  misc_feature: MA Experiment 20000436 PARAMETER Experiment Name: At_Drought_P Parameter: Plant Line Value: WS
  misc_feature: MA Experiment 20000436 PARAMETER Experiment Name: At_Drought_P Parameter: Timepoint (hr) Value: 12
  misc_feature: MA Experiment 20000436 PARAMETER Experiment Name: At_Drought_P Parameter: Tissue Value: Whole Plant
  misc_feature: MA Experiment 20000436 PARAMETER Experiment Name: At_Drought_P Parameter: Treatment Value: Drought vs. No Drought
  misc_feature: MA Experiment ID: 20000437 Result: Up-regulated in Transcription
  misc_feature: MA Experiment 20000437 PARAMETER Experiment Name: At_Drought_P Parameter: Age (day) Value: 8
  misc_feature: MA Experiment 20000437 PARAMETER Experiment Name: At_Drought_P Parameter: Organism Value: A. thaliana
  misc_feature: MA Experiment 20000437 PARAMETER Experiment Name: At_Drought_P Parameter: Plant Line Value: WS
  misc_feature: MA Experiment 20000437 PARAMETER Experiment Name: At_Drought_P Parameter: Timepoint (hr) Value: 24
  misc_feature: MA Experiment 20000437 PARAMETER Experiment Name: At_Drought_P Parameter: Tissue Value: Whole Plant
  misc_feature: MA Experiment 20000437 PARAMETER Experiment Name: At_Drought_P Parameter: Treatment Value: Drought vs. No Drought
  misc_feature: MA Experiment ID: 20000438 Result: Down-regulated in Transcription
  misc_feature: MA Experiment 20000438 PARAMETER Experiment Name: At_Shoots__P Parameter: Age (day) Value: 14
  misc_feature: MA Experiment 20000438 PARAMETER Experiment Name: At_Shoots__P Parameter: Tissue Value: Shoots vs. Whole Plant
  misc_feature: MA Experiment ID: 20000439 Result: Down-regulated in Transcription
  misc_feature: MA Experiment 20000439 PARAMETER Experiment Name: At_Roots__P Parameter: Age (day) Value: 14 vs. 21
  misc_feature: MA Experiment 20000439 PARAMETER Experiment Name: At_Roots__P Parameter: Organism Value: A. thaliana
  misc_feature: MA Experiment 20000439 PARAMETER Experiment Name: At_Roots__P Parameter: Tissue Value: Roots vs. Whole Plant
  misc_feature: MA Experiment ID: 20000453 Result: Up-regulated in Transcription
  misc_feature: MA Experiment 20000453 PARAMETER Experiment Name: At_100uM_ABA_P Parameter: Age (day) Value: 15
  misc_feature: MA Experiment 20000453 PARAMETER Experiment Name: At_100uM_ABA_P Parameter: Organism Value: A. thaliana
  misc_feature: MA Experiment 20000453 PARAMETER Experiment Name: At_100uM_ABA_P Parameter: Plant Line Value: WS
  misc_feature: MA Experiment 20000453 PARAMETER Experiment Name: At_100uM_ABA_P Parameter: Timepoint (hr) Value: 24
  misc_feature: MA Experiment 20000453 PARAMETER Experiment Name: At_100uM_ABA_P Parameter: Tissue Value: Aerial
  misc_feature: MA Experiment 20000453 PARAMETER Experiment Name: At_100uM_ABA_P Parameter: Treatment Value: 100uM ABA vs. No Treatment
  misc_feature: MA Experiment ID: 20000794 Result: Down-regulated in Transcription
  misc_feature: MA Experiment 20000794 PARAMETER Experiment Name: At_Petals_P Parameter: Age (day) Value: 23-25 days
  misc_feature: MA Experiment 20000794 PARAMETER Experiment Name: At_Petals_P Parameter: Plant Line Value: WS
  misc_feature: MA Experiment 20000794 PARAMETER Experiment Name: At_Petals_P Parameter: Tissue Value: Petals vs. Whole plant
  misc_feature: MA Experiment ID: 20001247 Result: Up-regulated in Transcription
  misc_feature: MA Experiment 20001247 PARAMETER Experiment Name: At_Far-red-induction_P Parameter: Age (day) Value: 7
  misc_feature: MA Experiment 20001247 PARAMETER Experiment Name: At_Far-red-induction_P Parameter: Light Value: Far-red vs. White
  misc_feature: MA Experiment 20001247 PARAMETER Experiment Name: At_Far-red-induction_P Parameter: Organism Value: A. thaliana
  misc_feature: MA Experiment 20001247 PARAMETER Experiment Name: At_Far-red-induction_P Parameter: Plant Line Value: Columbia
  misc_feature: MA Experiment 20001247 PARAMETER Experiment Name: At_Far-red-induction_P Parameter: Timepoint (hr) Value: 1
  misc_feature: MA Experiment 20001247 PARAMETER Experiment Name: At_Far-red-induction_P Parameter: Tissue Value: Whole Plant
  misc_feature: MA Experiment ID: 20001248 Result: Up-regulated in Transcription
  misc_feature: MA Experiment 20001248 PARAMETER Experiment Name: At_Far-red-induction_P Parameter: Age (day) Value: 7
  misc_feature: MA Experiment 20001248 PARAMETER Experiment Name: At_Far-red-induction_P Parameter: Light Value: Far-red vs. White
  misc_feature: MA Experiment 20001248 PARAMETER Experiment Name: At_Far-red-induction_P Parameter: Organism Value: A. thaliana
  misc_feature: MA Experiment 20001248 PARAMETER Experiment Name: At_Far-red-induction_P Parameter: Plant Line Value: Columbia
  misc_feature: MA Experiment 20001248 PARAMETER Experiment Name: At_Far-red-induction_P Parameter: Timepoint (hr) Value: 4
  misc_feature: MA Experiment 20001248 PARAMETER Experiment Name: At_Far-red-induction_P Parameter: Tissue Value: Whole Plant
  misc_feature: MA Experiment ID: 20001457 Result: Up-regulated in Transcription
  misc_feature: MA Experiment 20001457 PARAMETER Experiment Name: At_50mM_NH4NO3_L-to-H_P Parameter: Age (day) Value: Undefined
  misc_feature: MA Experiment 20001457 PARAMETER Experiment Name: At_50mM_NH4NO3_L-to-H_P Parameter: Organism Value: Undefined
  misc_feature: MA Experiment 20001457 PARAMETER Experiment Name: At_50mM_NH4NO3_L-to-H_P Parameter: Plant Line Value: Undefined
  misc_feature: MA Experiment 20001457 PARAMETER Experiment Name: At_50mM_NH4NO3_L-to-H_P Parameter: Timepoint (hr) Value: 0.5
  misc_feature: MA Experiment 20001457 PARAMETER Experiment Name: At_50mM_NH4NO3_L-to-H_P Parameter: Tissue Value: Siliques
  misc_feature: MA Experiment 20001457 PARAMETER Experiment Name: At_50mM_NH4NO3_L-to-H_P Parameter: Treatment Value: 50mM NH4NO3 vs. 100mM Manitol
  misc_feature: MA Experiment ID: 20001557 Result: Down-regulated in Transcription
  misc_feature: MA Experiment 20001557 PARAMETER Experiment Name: At_Drought_Soil_Dry_P Parameter: Age (day) Value: 27
  misc_feature: MA Experiment 20001557 PARAMETER Experiment Name: At_Drought_Soil_Dry_P Parameter: Organism Value: A. thaliana
  misc_feature: MA Experiment 20001557 PARAMETER Experiment Name: At_Drought_Soil_Dry_P Parameter: Plant Line Value: WS
  misc_feature: MA Experiment 20001557 PARAMETER Experiment Name: At_Drought_Soil_Dry_P Parameter: Post Timepoint (hr) Value: 3
  misc_feature: MA Experiment 20001557 PARAMETER Experiment Name: At_Drought_Soil_Dry_P Parameter: Post-Treatment Value: Re-Water vs. No Drought
  misc_feature: MA Experiment 20001557 PARAMETER Experiment Name: At_Drought_Soil_Dry_P Parameter: Timepoint (day) Value: 13
  misc_feature: MA Experiment 20001557 PARAMETER Experiment Name: At_Drought_Soil_Dry_P Parameter: Treatment Value: Drought vs. No Drought
  misc_feature: MA Experiment ID: 20001560 Result: Up-regulated in Transcription
  misc_feature: MA Experiment 20001560 PARAMETER Experiment Name: At_Drought_Soil_Dry_P Parameter: Age (day) Value: 28
  misc_feature: MA Experiment 20001560 PARAMETER Experiment Name: At_Drought_Soil_Dry_P Parameter: Organism Value: A. thaliana
  misc_feature: MA Experiment 20001560 PARAMETER Experiment Name: At_Drought_Soil_Dry_P Parameter: Plant Line Value: WS
  misc_feature: MA Experiment 20001560 PARAMETER Experiment Name: At_Drought_Soil_Dry_P Parameter: Post Timepoint (hr) Value: None
  misc_feature: MA Experiment 20001560 PARAMETER Experiment Name: At_Drought_Soil_Dry_P Parameter: Post-Treatment Value: None
  misc_feature: MA Experiment 20001560 PARAMETER Experiment Name: At_Drought_Soil_Dry_P Parameter: Timepoint (day) Value: 14
  misc_feature: MA Experiment 20001560 PARAMETER Experiment Name: At_Drought_Soil_Dry_P Parameter: Treatment Value: Drought vs. No Drought
  misc_feature: MA Experiment ID: 20001757 Result: Down-regulated in Transcription
  misc_feature: MA Experiment 20001757 PARAMETER Experiment Name: At_50mM_NH4NO3_L-to-H_P Parameter: Timepoint (hr) Value: 6
  misc_feature: MA Experiment 20001757 PARAMETER Experiment Name: At_50mM_NH4NO3_L-to-H_P Parameter: Tissue Value: Leaf
  misc_feature: MA Experiment 20001757 PARAMETER Experiment Name: At_50mM_NH4NO3_L-to-H_P Parameter: Treatment Value: 50mM NH4NO3 vs 100mM Mannitol
  misc_feature: MA Experiment ID: 20001770 Result: Up-regulated in Transcription
  misc_feature: MA Experiment 20001770 PARAMETER Experiment Name: At_Far-red-enriched-adult_P Parameter: Age (day) Value: 28
  misc_feature: MA Experiment 20001770 PARAMETER Experiment Name: At_Far-red-enriched-adult_P Parameter: Light Value: Far-red enriched vs. White
  misc_feature: MA Experiment 20001770 PARAMETER Experiment Name: At_Far-red-enriched-adult_P Parameter: Organism Value: A. thaliana
  misc_feature: MA Experiment 20001770 PARAMETER Experiment Name: At_Far-red-enriched-adult_P Parameter: Plant Line Value: Columbia
  misc_feature: MA Experiment 20001770 PARAMETER Experiment Name: At_Far-red-enriched-adult_P Parameter: Timepoint (hr) Value: 8
  misc_feature: MA Experiment 20001770 PARAMETER Experiment Name: At_Far-red-enriched-adult_P Parameter: Tissue Value: Aerial
  misc_feature: MA Experiment ID: 20001911 Result: Up-regulated in Transcription
  misc_feature: MA Experiment 20001911 PARAMETER Experiment Name: At_Drought_Reproduction_P Parameter: Age (day) Value: 40
  misc_feature: MA Experiment 20001911 PARAMETER Experiment Name: At_Drought_Reproduction_P Parameter: Organism Value: A. thaliana
  misc_feature: MA Experiment 20001911 PARAMETER Experiment Name: At_Drought_Reproduction_P Parameter: Plant Line Value: WS
  misc_feature: MA Experiment 20001911 PARAMETER Experiment Name: At_Drought_Reproduction_P Parameter: Timepoint (day) Value: 10
  misc_feature: MA Experiment 20001911 PARAMETER Experiment Name: At_Drought_Reproduction_P Parameter: Tissue Value: Flowers
  misc_feature: MA Experiment 20001911 PARAMETER Experiment Name: At_Drought_Reproduction_P Parameter: Treatment Value: Drought vs. No Drought
gccgtcatcacccaacaacaaaaccctagttttggtttctctggatctgaagaatctccatgactattctcatagatcgccactctgatcagaacgatgcaggagatgagattgtagagaagaatcaggggaatggtaaagaggaagaaacagagttggtgttagatgcaggtttcgaggctcctcacaccaactcttttggtcgcaccttcagggattatgatgctgagagtgaaaggagaagaggtgttgaggaattttacagagtcaatcacattggccaaaccgttgatttcgtgaggaagatgagagaagaatacgagaagctaaatcgtacggagatgagcatttgggaatgttgcgagcttctgaatgagtttatcgacgagagtgatcctgatttggacgaacctcagatcgagcatctgcttcagacagctgaagccatcagaaaagattaccctgatgaagactggctccatctgaccggtcttatccacgatcttggaaaagttcttcttcactcttcatttggtgagctccctcagtgggctgtcgtcggtgatacatttccagtgggatgtgcttttgatgaatctattgttcaccacaagtacttcaaggagaatccagactatgataacccgagttacaactctaagtatgggatatacactgaaggctgtgggctcgacaatgtgttaatgtcttggggacatgatgattacatgtaccttgttgcgaaggagaatcaaactactttaccatcagccggtcttttcatcatcagataccattcgttctacgctcttcacaaatcagaagcatacaagcatttgatgaacaatgaagacagagagaacatgaagtggcttaaagtgttcaacaagtatgatctctacagcaaaagcaaagtccgcgtaaacgttgaggaagtgaaaccatattatctctcccttaccaacaagtattttccgtccaagctaaaatggtgaaaccctacaagcagaaagctttctaataaaatggattagagaatgcgaccaaaataaaacctttcaacaaaaaagaaaatgtgacaaaaaaatgcatgtgtaaatgtaaaggcgataacggatatgccttgatgaataaaacagagtgttgtttcgtttgtgcc

SEQ ID NO: 25800 - protein, 311 aa, Arabidopsis thaliana
  peptide (1)..(311): Ceres Seq. ID no. 12603511
  misc_feature (52)..(246): Homolog of NCBI NO: 7527731 NR Description: T5E21.2 [Arabidopsis thaliana]
  misc_feature (36)..(311): Homolog of NCBI NO: 15241891 NR Description: putative protein
  misc_feature (36)..(311): Homolog of NCBI NO: 21536858 NR Description: unknown [Arabidopsis thaliana]
  misc_feature (14)..(311): Homolog of NCBI NO: 30687167 NR Description: expressed protein [Arabidopsis thaliana]
  misc_feature (14)..(311): Homolog of NCBI NO: 7487428 NR Description: hypothetical protein T25K17.70 - Arabidopsis
  misc_feature (1)..(311): Homolog of NCBI NO: 21554393 NR Description: unknown [Arabidopsis thaliana]
  misc_feature (1)..(311): Homolog of NCBI NO: 18399158 NR Description: expressed protein
  misc_feature (1)..(307): Homolog of NCBI NO: 7262695 NR Description: Strong similarity to an unknown protein from
  misc_feature (1)..(311): Homolog of NCBI NO: 26451656 NR Description: unknown protein [Arabidopsis thaliana]
  misc_feature (1)..(311): Homolog of NCBI NO: 30683840 NR Description: expressed protein [Arabidopsis thaliana]
MTILIDRHSDQNDAGDEIVEKNQGNGKEEETELVLDAGFEAPHTNSFGRTFRDYDAESERRRGVEEFYRVNHIGQTVDFVRKMREEYEKLNRTEMSIWECCELLNEFIDESDPDLDEPQIEHLLQTAEAIRKDYPDEDWLHLTGLIHDLGKVLLHSSFGELPQWAVVGDTFPVGCAFDESIVHHKYFKENPDYDNPSYNSKYGIYTEGCGLDNVLMSWGHDDYMYLVAKENQTTLPSAGLFIIRYHSFYALHKSEAYKHLMNNEDRENMKWLKVFNKYDLYSKSKVRVNVEEVKPYYLSLTNKYFPSKLKW

SEQ ID NO: 25801 - protein, 229 aa, Arabidopsis thaliana
  peptide (1)..(229): Ceres Seq. ID no. 12603512
  misc_feature (1)..(164): Homolog of NCBI NO: 7527731 NR Description: T5E21.2 [Arabidopsis thaliana]
  misc_feature (1)..(229): Homolog of NCBI NO: 15241891 NR Description: putative protein
  misc_feature (1)..(229): Homolog of NCBI NO: 21536858 NR Description: unknown [Arabidopsis thaliana]
  misc_feature (1)..(229): Homolog of NCBI NO: 30687167 NR Description: expressed protein [Arabidopsis thaliana]
  misc_feature (1)..(229): Homolog of NCBI NO: 7487428 NR Description: hypothetical protein T25K17.70 - Arabidopsis
  misc_feature (1)..(229): Homolog of NCBI NO: 21554393 NR Description: unknown [Arabidopsis thaliana]
  misc_feature (1)..(229): Homolog of NCBI NO: 18399158 NR Description: expressed protein
  misc_feature (1)..(225): Homolog of NCBI NO: 7262695 NR Description: Strong similarity to an unknown protein from
  misc_feature (1)..(229): Homolog of NCBI NO: 26451656 NR Description: unknown protein [Arabidopsis thaliana]
  misc_feature (1)..(229): Homolog of NCBI NO: 30683840 NR Description: expressed protein [Arabidopsis thaliana]
MREEYEKLNRTEMSIWECCELLNEFIDESDPDLDEPQIEHLLQTAEAIRKDYPDEDWLHLTGLIHDLGKVLLHSSFGELPQWAVVGDTFPVGCAFDESIVHHKYFKENPDYDNPSYNSKYGIYTEGCGLDNVLMSWGHDDYMYLVAKENQTTLPSAGLFIIRYHSFYALHKSEAYKHLMNNEDRENMKWLKVFNKYDLYSKSKVRVNVEEVKPYYLSLTNKYFPSKLKW

SEQ ID NO: 25802 - protein, 217 aa, Arabidopsis thaliana
  peptide (1)..(217): Ceres Seq. ID no. 12603513
  misc_feature (1)..(152): Homolog of NCBI NO: 7527731 NR Description: T5E21.2 [Arabidopsis thaliana]
  misc_feature (1)..(217): Homolog of NCBI NO: 15241891 NR Description: putative protein
  misc_feature (1)..(217): Homolog of NCBI NO: 21536858 NR Description: unknown [Arabidopsis thaliana]
  misc_feature (1)..(217): Homolog of NCBI NO: 30687167 NR Description: expressed protein [Arabidopsis thaliana]
  misc_feature (1)..(217): Homolog of NCBI NO: 7487428 NR Description: hypothetical protein T25K17.70 - Arabidopsis
  misc_feature (1)..(217): Homolog of NCBI NO: 21554393 NR Description: unknown [Arabidopsis thaliana]
  misc_feature (1)..(217): Homolog of NCBI NO: 18399158 NR Description: expressed protein
  misc_feature (1)..(213): Homolog of NCBI NO: 7262695 NR Description: Strong similarity to an unknown protein from
  misc_feature (1)..(217): Homolog of NCBI NO: 26451656 NR Description: unknown protein [Arabidopsis thaliana]
  misc_feature (1)..(217): Homolog of NCBI NO: 30683840 NR Description: expressed protein [Arabidopsis thaliana]
MSIWECCELLNEFIDESDPDLDEPQIEHLLQTAEAIRKDYPDEDWLHLTGLIHDLGKVLLHSSFGELPQWAVVGDTFPVGCAFDESIVHHKYFKENPDYDNPSYNSKYGIYTEGCGLDNVLMSWGHDDYMYLVAKENQTTLPSAGLFIIRYHSFYALHKSEAYKHLMNNEDRENMKWLKVFNKYDLYSKSKVRVNVEEVKPYYLSLTNKYFPSKLKW

SEQ ID NO: 25803 - DNA, 640 bp, Arabidopsis thaliana
  misc_feature (1)..(640): Ceres Seq. ID no. 13491233
  misc_feature: MA Experiment ID: 108434 Result: Up-regulated in Transcription
  misc_feature: MA Experiment 108434 PARAMETER Experiment Name: At_Root_Tips_cDNA_P Parameter: Tissue Value: Root Tips
  misc_feature: MA Experiment ID: 108462 Result: Down-regulated in Transcription
  misc_feature: MA Experiment 108462 PARAMETER Experiment Name: At_Germinating_Seeds_cDNA_P Parameter: Age (day) Value: 2 vs. 0
  misc_feature: MA Experiment 108462 PARAMETER Experiment Name: At_Germinating_Seeds_cDNA_P Parameter: Tissue Value: Germinating Seeds
  misc_feature: MA Experiment ID: 108463 Result: Down-regulated in Transcription
  misc_feature: MA Experiment 108463 PARAMETER Experiment Name: At_Germinating_Seeds_cDNA_P Parameter: Age (day) Value: 3 vs. 0
  misc_feature: MA Experiment 108463 PARAMETER Experiment Name: At_Germinating_Seeds_cDNA_P Parameter: Tissue Value: Germinating Seeds
  misc_feature: MA Experiment ID: 108464 Result: Down-regulated in Transcription
  misc_feature: MA Experiment 108464 PARAMETER Experiment Name: At_Germinating_Seeds_cDNA_P Parameter: Age (day) Value: 4 vs. 0
  misc_feature: MA Experiment 108464 PARAMETER Experiment Name: At_Germinating_Seeds_cDNA_P Parameter: Tissue Value: Germinating Seeds
  misc_feature: MA Experiment ID: 108573 Result: Down-regulated in Transcription
  misc_feature: MA Experiment 108573 PARAMETER Experiment Name: At_Drought_cDNA_P Parameter: Timepoint (hr) Value: 6
  misc_feature: MA Experiment 108573 PARAMETER Experiment Name: At_Drought_cDNA_P Parameter: Tissue Value: Aerial
  misc_feature: MA Experiment 108573 PARAMETER Experiment Name: At_Drought_cDNA_P Parameter: Treatment Value: Drought vs. No Drought
  misc_feature: MA Experiment ID: 20000794 Result: Down-regulated in Transcription
  misc_feature: MA Experiment 20000794 PARAMETER Experiment Name: At_Petals_P Parameter: Age (day) Value: 23-25 days
  misc_feature: MA Experiment 20000794 PARAMETER Experiment Name: At_Petals_P Parameter: Plant Line Value: WS
  misc_feature: MA Experiment 20000794 PARAMETER Experiment Name: At_Petals_P Parameter: Tissue Value: Petals vs. Whole plant
  misc_feature: MA Experiment ID: 20001558 Result: Up-regulated in Transcription
  misc_feature: MA Experiment 20001558 PARAMETER Experiment Name: At_Drought_Soil_Dry_P Parameter: Age (day) Value: 27
  misc_feature: MA Experiment 20001558 PARAMETER Experiment Name: At_Drought_Soil_Dry_P Parameter: Organism Value: A. thaliana
  misc_feature: MA Experiment 20001558 PARAMETER Experiment Name: At_Drought_Soil_Dry_P Parameter: Plant Line Value: WS
  misc_feature: MA Experiment 20001558 PARAMETER Experiment Name: At_Drought_Soil_Dry_P Parameter: Post Timepoint (hr) Value: 6
  misc_feature: MA Experiment 20001558 PARAMETER Experiment Name: At_Drought_Soil_Dry_P Parameter: Post-Treatment Value: Re-Water vs. No Drought
  misc_feature: MA Experiment 20001558 PARAMETER Experiment Name: At_Drought_Soil_Dry_P Parameter: Timepoint (day) Value: 13
  misc_feature: MA Experiment 20001558 PARAMETER Experiment Name: At_Drought_Soil_Dry_P Parameter: Treatment Value: Drought vs. No Drought
  misc_feature: MA Experiment ID: 20001560 Result: Up-regulated in Transcription
  misc_feature: MA Experiment 20001560 PARAMETER Experiment Name: At_Drought_Soil_Dry_P Parameter: Age (day) Value: 28
  misc_feature: MA Experiment 20001560 PARAMETER Experiment Name: At_Drought_Soil_Dry_P Parameter: Organism Value: A. thaliana
  misc_feature: MA Experiment 20001560 PARAMETER Experiment Name: At_Drought_Soil_Dry_P Parameter: Plant Line Value: WS
  misc_feature: MA Experiment 20001560 PARAMETER Experiment Name: At_Drought_Soil_Dry_P Parameter: Post Timepoint (hr) Value: None
  misc_feature: MA Experiment 20001560 PARAMETER Experiment Name: At_Drought_Soil_Dry_P Parameter: Post-Treatment Value: None
  misc_feature: MA Experiment 20001560 PARAMETER Experiment Name: At_Drought_Soil_Dry_P Parameter: Timepoint (day) Value: 14
  misc_feature: MA Experiment 20001560 PARAMETER Experiment Name: At_Drought_Soil_Dry_P Parameter: Treatment Value: Drought vs. No Drought
  misc_feature: MA Experiment ID: 20001911 Result: Down-regulated in Transcription
  misc_feature: MA Experiment 20001911 PARAMETER Experiment Name: At_Drought_Reproduction_P Parameter: Age (day) Value: 40
  misc_feature: MA Experiment 20001911 PARAMETER Experiment Name: At_Drought_Reproduction_P Parameter: Organism Value: A. thaliana
  misc_feature: MA Experiment 20001911 PARAMETER Experiment Name: At_Drought_Reproduction_P Parameter: Plant Line Value: WS
  misc_feature: MA Experiment 20001911 PARAMETER Experiment Name: At_Drought_Reproduction_P Parameter: Timepoint (day) Value: 10
  misc_feature: MA Experiment 20001911 PARAMETER Experiment Name: At_Drought_Reproduction_P Parameter: Tissue Value: Flowers
  misc_feature: MA Experiment 20001911 PARAMETER Experiment Name: At_Drought_Reproduction_P Parameter: Treatment Value: Drought vs. No Drought
tgcttctcaaagaaacgaaattaagagaaggagaaggttttacgccggagttggagactgatctagatccgccggcgaaaaagcagagccgtcacattcatcgtcggaaatcaagaaagggtaattctctgtaggatagagagacatggaagccaagtttttccggttcttgaagattgttggagttggatacaaagctagagctgaggaagcagggcgtttcttatacctcaaattgggttacagtcacgaagtcgaacttgcggttcctccagcggttcgagtcttttgtttcaagaacaatgtggtttgctgcactggaatcgacaagcaaagagtgcatcagtttgctgcaacggtaaggagttgcaaaccccctgaaccttataagggcaaaggcataatgtacactgatgaagtcgtcaagaagaaacaaggaaagaagtccaaatgatctctctttgtatgcttcttcttccttcttactctgcagagacaactttcatctatctgtggtagattatggttggatttttatcaataagttttatttggttgtatgagacatcattttgttgttaagtctctttcaatgaaacaaaatgagaagagttcgtcttggaaatatttatgttttgtc

SEQ ID NO: 25804 - protein, 102 aa, Arabidopsis thaliana
  peptide (1)..(102): Ceres Seq. ID no. 13491234
  misc_feature (12)..(89): Pfam Name: Ribosomal protein L6 Pfam Description: Ribosomal protein L6
  misc_feature (1)..(102): Homolog of NCBI NO: 18398731 NR Description: ribosomal protein L6p family [Arabidopsis
  misc_feature (1)..(100): Homolog of NCBI NO: 22966107 NR Description: hypothetical protein [Rhodospirillum rubrum]
  misc_feature (9)..(102): Homolog of NCBI NO: 26554450 NR Description: ribosomal protein L6 [Mycoplasma penetrans]
  misc_feature (1)..(100): Homolog of NCBI NO: 22550351 NR Description: ribosomal protein L6 [Chaetosphaeridium globosum]
  misc_feature (1)..(100): Homolog of NCBI NO: 38638291 NR Description: ribosomal protein L6 [Chara vulgaris]
  misc_feature (1)..(100): Homolog of NCBI NO: 11467124 NR Description: rpl6 [Marchantia polymorpha]
  misc_feature (5)..(102): Homolog of NCBI NO: 28144880 NR Description: putative chloroplast 50S ribosomal protein L6
  misc_feature (5)..(102): Homolog of NCBI NO: 15220443 NR Description: ribosomal protein L6p family [Arabidopsis
  misc_feature (5)..(100): Homolog of NCBI NO: 11466518 NR Description: ribosomal protein L6 [Reclinomonas americana]
  misc_feature (1)..(102): Homolog of NCBI NO: 25411865 NR Description: probable ribosomal protein L6 [imported] -
MEAKFFRFLKIVGVGYKARAEEAGRFLYLKLGYSHEVELAVPPAVRVFCFKNNVVCCTGIDKQRVHQFAATVRSCKPPEPYKGKGIMYTDEVVKKKQGKKSK

SEQ ID NO: 25805 - DNA, 1670 bp, Arabidopsis thaliana; identical to SEQ ID NO: 23635
  misc_feature (1)..(1670): Ceres Seq. ID no. 13576264
  misc_feature: MA Experiment ID: 108434 Result: Up-regulated in Transcription
  misc_feature: MA Experiment 108434 PARAMETER Experiment Name: At_Root_Tips_cDNA_P Parameter: Tissue Value: Root Tips
  misc_feature: MA Experiment ID: 108462 Result: Down-regulated in Transcription
  misc_feature: MA Experiment 108462 PARAMETER Experiment Name: At_Germinating_Seeds_cDNA_P Parameter: Age (day) Value: 2 vs. 0
  misc_feature: MA Experiment 108462 PARAMETER Experiment Name: At_Germinating_Seeds_cDNA_P Parameter: Tissue Value: Germinating Seeds
  misc_feature: MA Experiment ID: 108463 Result: Down-regulated in Transcription
  misc_feature: MA Experiment 108463 PARAMETER Experiment Name: At_Germinating_Seeds_cDNA_P Parameter: Age (day) Value: 3 vs. 0
  misc_feature: MA Experiment 108463 PARAMETER Experiment Name: At_Germinating_Seeds_cDNA_P Parameter: Tissue Value: Germinating Seeds
  misc_feature: MA Experiment ID: 108464 Result: Down-regulated in Transcription
  misc_feature: MA Experiment 108464 PARAMETER Experiment Name: At_Germinating_Seeds_cDNA_P Parameter: Age (day) Value: 4 vs. 0
  misc_feature: MA Experiment 108464 PARAMETER Experiment Name: At_Germinating_Seeds_cDNA_P Parameter: Tissue Value: Germinating Seeds
  misc_feature: MA Experiment ID: 20000069 Result: Down-regulated in Transcription
  misc_feature: MA Experiment 20000069 PARAMETER Experiment Name: At_100uM_ABA_Mutants_cDNA_P Parameter: Plant Line Value: CS23
  misc_feature: MA Experiment 20000069 PARAMETER Experiment Name: At_100uM_ABA_Mutants_cDNA_P Parameter: Timepoint (hr) Value: 6
  misc_feature: MA Experiment 20000069 PARAMETER Experiment Name: At_100uM_ABA_Mutants_cDNA_P Parameter: Tissue Value: Aerial
  misc_feature: MA Experiment 20000069 PARAMETER Experiment Name: At_100uM_ABA_Mutants_cDNA_P Parameter: Treatment Value: 100uM ABA vs. No Treatment
  misc_feature: MA Experiment ID: 20000070 Result: Down-regulated in Transcription
  misc_feature: MA Experiment 20000070 PARAMETER Experiment Name: At_100uM_ABA_Mutants_cDNA_P Parameter: Plant Line Value: CS24
  misc_feature: MA Experiment 20000070 PARAMETER Experiment Name: At_100uM_ABA_Mutants_cDNA_P Parameter: Timepoint (hr) Value: 6
  misc_feature: MA Experiment 20000070 PARAMETER Experiment Name: At_100uM_ABA_Mutants_cDNA_P Parameter: Tissue Value: Aerial
  misc_feature: MA Experiment 20000070 PARAMETER Experiment Name: At_100uM_ABA_Mutants_cDNA_P Parameter: Treatment Value: 100uM ABA vs. No Treatment
  misc_feature: MA Experiment ID: 20000113 Result: Down-regulated in Transcription
  misc_feature: MA Experiment 20000113 PARAMETER Experiment Name: At_42deg_Heat_cDNA_P Parameter: Temperature (deg C) Value: 42 vs. 22
  misc_feature: MA Experiment 20000113 PARAMETER Experiment Name: At_42deg_Heat_cDNA_P Parameter: Timepoint (hr) Value: 8
  misc_feature: MA Experiment 20000113 PARAMETER Experiment Name: At_42deg_Heat_cDNA_P Parameter: Tissue Value: Aerial
  misc_feature: MA Experiment ID: 20000117 Result: Down-regulated in Transcription
  misc_feature: MA Experiment 20000117 PARAMETER Experiment Name: At_100uM_ABA_Mutants_cDNA_P Parameter: Plant Line Value: Columbia
  misc_feature: MA Experiment 20000117 PARAMETER Experiment Name: At_100uM_ABA_Mutants_cDNA_P Parameter: Timepoint (hr) Value: 6
  misc_feature: MA Experiment 20000117 PARAMETER Experiment Name: At_100uM_ABA_Mutants_cDNA_P Parameter: Tissue Value: Aerial
  misc_feature: MA Experiment 20000117 PARAMETER Experiment Name: At_100uM_ABA_Mutants_cDNA_P Parameter: Treatment Value: 100uM ABA vs. No Treatment
  misc_feature: MA Experiment ID: 20000173 Result: Down-regulated in Transcription
  misc_feature: MA Experiment 20000173 PARAMETER Experiment Name: At_42deg_Heat_P Parameter: Age (day) Value: 14
  misc_feature: MA Experiment 20000173 PARAMETER Experiment Name: At_42deg_Heat_P Parameter: Organism Value: A. thaliana
  misc_feature: MA Experiment 20000173 PARAMETER Experiment Name: At_42deg_Heat_P Parameter: Plant Line Value: WS
  misc_feature: MA Experiment 20000173 PARAMETER Experiment Name: At_42deg_Heat_P Parameter: Temperature (deg C) Value: 42 vs. 22
  misc_feature: MA Experiment 20000173 PARAMETER Experiment Name: At_42deg_Heat_P Parameter: Timepoint (hr) Value: 6
  misc_feature: MA Experiment 20000173 PARAMETER Experiment Name: At_42deg_Heat_P Parameter: Tissue Value: Aerial
  misc_feature: MA Experiment ID: 20000182 Result: Down-regulated in Transcription
  misc_feature: MA Experiment 20000182 PARAMETER Experiment Name: At_2mM_SA_P Parameter: Age (day) Value: 14
  misc_feature: MA Experiment 20000182 PARAMETER Experiment Name: At_2mM_SA_P Parameter: Organism Value: A. thaliana
  misc_feature: MA Experiment 20000182 PARAMETER Experiment Name: At_2mM_SA_P Parameter: Plant Line Value: WS
  misc_feature: MA Experiment 20000182 PARAMETER Experiment Name: At_2mM_SA_P Parameter: Timepoint (hr) Value: 6
  misc_feature: MA Experiment 20000182 PARAMETER Experiment Name: At_2mM_SA_P Parameter: Tissue Value: Aerial
  misc_feature: MA Experiment 20000182 PARAMETER Experiment Name: At_2mM_SA_P Parameter: Treatment Value: 2mM SA vs. No Treatment
  misc_feature: MA Experiment ID: 20000437 Result: Down-regulated in Transcription
  misc_feature: MA Experiment 20000437 PARAMETER Experiment Name: At_Drought_P Parameter: Age (day) Value: 8
  misc_feature: MA Experiment 20000437 PARAMETER Experiment Name: At_Drought_P Parameter: Organism Value: A. thaliana
  misc_feature: MA Experiment 20000437 PARAMETER Experiment Name: At_Drought_P Parameter: Plant Line Value: WS
  misc_feature: MA Experiment 20000437 PARAMETER Experiment Name: At_Drought_P Parameter: Timepoint (hr) Value: 24
  misc_feature: MA Experiment 20000437 PARAMETER Experiment Name: At_Drought_P Parameter: Tissue Value: Whole Plant
  misc_feature: MA Experiment 20000437 PARAMETER Experiment Name: At_Drought_P Parameter: Treatment Value: Drought vs. No Drought
  misc_feature: MA Experiment ID: 20000438 Result: Up-regulated in Transcription
  misc_feature: MA Experiment 20000438 PARAMETER Experiment Name: At_Shoots__P Parameter: Age (day) Value: 14
  misc_feature: MA Experiment 20000438 PARAMETER Experiment Name: At_Shoots__P Parameter: Tissue Value: Shoots vs. Whole Plant
  misc_feature: MA Experiment ID: 20000439 Result: Down-regulated in Transcription
  misc_feature: MA Experiment 20000439 PARAMETER Experiment Name: At_Roots__P Parameter: Age (day) Value: 14 vs. 21
  misc_feature: MA Experiment 20000439 PARAMETER Experiment Name: At_Roots__P Parameter: Organism Value: A. thaliana
  misc_feature: MA Experiment 20000439 PARAMETER Experiment Name: At_Roots__P Parameter: Tissue Value: Roots vs. Whole Plant
  misc_feature: MA Experiment ID: 20000794 Result: Down-regulated in Transcription
  misc_feature: MA Experiment 20000794 PARAMETER Experiment Name: At_Petals_P Parameter: Age (day) Value: 23-25 days
  misc_feature: MA Experiment 20000794 PARAMETER Experiment Name: At_Petals_P Parameter: Plant Line Value: WS
  misc_feature: MA Experiment 20000794 PARAMETER Experiment Name: At_Petals_P Parameter: Tissue Value: Petals vs. Whole plant
  misc_feature: MA Experiment ID: 20001558 Result: Up-regulated in Transcription
  misc_feature: MA Experiment 20001558 PARAMETER Experiment Name: At_Drought_Soil_Dry_P Parameter: Age (day) Value: 27
  misc_feature: MA Experiment 20001558 PARAMETER Experiment Name: At_Drought_Soil_Dry_P Parameter: Organism Value: A. thaliana
  misc_feature: MA Experiment 20001558 PARAMETER Experiment Name: At_Drought_Soil_Dry_P Parameter: Plant Line Value: WS
  misc_feature: MA Experiment 20001558 PARAMETER Experiment Name: At_Drought_Soil_Dry_P Parameter: Post Timepoint (hr) Value: 6
  misc_feature: MA Experiment 20001558 PARAMETER Experiment Name: At_Drought_Soil_Dry_P Parameter: Post-Treatment Value: Re-Water vs. No Drought
  misc_feature: MA Experiment 20001558 PARAMETER Experiment Name: At_Drought_Soil_Dry_P Parameter: Timepoint (day) Value: 13
  misc_feature: MA Experiment 20001558 PARAMETER Experiment Name: At_Drought_Soil_Dry_P Parameter: Treatment Value: Drought vs. No Drought
  misc_feature: MA Experiment ID: 20001757 Result: Up-regulated in Transcription
  misc_feature: MA Experiment 20001757 PARAMETER Experiment Name: At_50mM_NH4NO3_L-to-H_P Parameter: Timepoint (hr) Value: 6
  misc_feature: MA Experiment 20001757 PARAMETER Experiment Name: At_50mM_NH4NO3_L-to-H_P Parameter: Tissue Value: Leaf
  misc_feature: MA Experiment 20001757 PARAMETER Experiment Name: At_50mM_NH4NO3_L-to-H_P Parameter: Treatment Value: 50mM NH4NO3 vs 100mM Mannitol
  misc_feature: MA Experiment ID: 20001905 Result: Down-regulated in Transcription
  misc_feature: MA Experiment 20001905 PARAMETER Experiment Name: At_Drought_Reproduction_P Parameter: Age (day) Value: 40
  misc_feature: MA Experiment 20001905 PARAMETER Experiment Name: At_Drought_Reproduction_P Parameter: Organism Value: A. thaliana
  misc_feature: MA Experiment 20001905 PARAMETER Experiment Name: At_Drought_Reproduction_P Parameter: Plant Line Value: WS
  misc_feature: MA Experiment 20001905 PARAMETER Experiment Name: At_Drought_Reproduction_P Parameter: Timepoint (day) Value: 10
  misc_feature: MA Experiment 20001905 PARAMETER Experiment Name: At_Drought_Reproduction_P Parameter: Tissue Value: Rosettes
  misc_feature: MA Experiment 20001905 PARAMETER Experiment Name: At_Drought_Reproduction_P Parameter: Treatment Value: Drought vs. No Drought
  misc_feature: MA Experiment ID: 20001911 Result: Down-regulated in Transcription
  misc_feature: MA Experiment 20001911 PARAMETER Experiment Name: At_Drought_Reproduction_P Parameter: Age (day) Value: 40
  misc_feature: MA Experiment 20001911 PARAMETER Experiment Name: At_Drought_Reproduction_P Parameter: Organism Value: A. thaliana
  misc_feature: MA Experiment 20001911 PARAMETER Experiment Name: At_Drought_Reproduction_P Parameter: Plant Line Value: WS
  misc_feature: MA Experiment 20001911 PARAMETER Experiment Name: At_Drought_Reproduction_P Parameter: Timepoint (day) Value: 10
  misc_feature: MA Experiment 20001911 PARAMETER Experiment Name: At_Drought_Reproduction_P Parameter: Tissue Value: Flowers
  misc_feature: MA Experiment 20001911 PARAMETER Experiment Name: At_Drought_Reproduction_P Parameter: Treatment Value: Drought vs. No Drought

SEQ ID NO: 25806 - protein, 473 aa, Arabidopsis thaliana; identical to SEQ ID NO: 23636
  peptide (1)..(473): Ceres Seq. ID no. 13576265
  misc_feature (1)..(464): Homolog of NCBI NO: 25289785 NR Description: probable serine carboxypeptidase II
  misc_feature (9)..(464): Homolog of NCBI NO: 25289793 NR Description: probable serine carboxypeptidase II
  misc_feature (1)..(464): Homolog of NCBI NO: 18396647 NR Description: serine carboxypeptidase -related [Arabidopsis
  misc_feature (9)..(464): Homolog of NCBI NO: 30685740 NR Description: serine carboxypeptidase -related [Arabidopsis
  misc_feature (1)..(467): Homolog of NCBI NO: 15218514 NR Description: serine carboxypeptidase -related [Arabidopsis
  misc_feature (287)..(473): Homolog of NCBI NO: 28393789 NR Description: putative serine carboxypeptidase II [Arabidopsis
  misc_feature (4)..(303): Homolog of NCBI NO: 28393789 NR Description: putative serine carboxypeptidase II [Arabidopsis
  misc_feature (1)..(467): Homolog of NCBI NO: 15238327 NR Description: serine carboxypeptidase -related [Arabidopsis
  misc_feature (4)..(473): Homolog of NCBI NO: 15224454 NR Description: serine carboxypeptidase -related [Arabidopsis
  misc_feature (1)..(473): Homolog of NCBI NO: 15238328 NR Description: serine carboxypeptidase -related [Arabidopsis
  misc_feature (1)..(464): Homolog of NCBI NO: 25289785 NR Description: probable serine carboxypeptidase II
  misc_feature (9)..(464): Homolog of NCBI NO: 25289793 NR Description: probable serine carboxypeptidase II
  misc_feature (1)..(464): Homolog of NCBI NO: 18396647 NR Description: serine carboxypeptidase -related [Arabidopsis
  misc_feature (9)..(464): Homolog of NCBI NO: 30685740 NR Description: serine carboxypeptidase -related [Arabidopsis
  misc_feature (1)..(467): Homolog of NCBI NO: 15218514 NR Description: serine carboxypeptidase -related [Arabidopsis
  misc_feature (287)..(473): Homolog of NCBI NO: 28393789 NR Description: putative serine carboxypeptidase II [Arabidopsis
  misc_feature (4)..(303): Homolog of NCBI NO: 28393789 NR Description: putative serine carboxypeptidase II [Arabidopsis
  misc_feature (1)..(467): Homolog of NCBI NO: 15238327 NR Description: serine carboxypeptidase -related [Arabidopsis
  misc_feature (4)..(473): Homolog of NCBI NO: 15224454 NR Description: serine carboxypeptidase -related [Arabidopsis
  misc_feature (1)..(473): Homolog of NCBI NO: 15238328 NR Description: serine carboxypeptidase -related [Arabidopsis

SEQ ID NO: 25807 - protein, 461 aa, Arabidopsis thaliana; identical to SEQ ID NO: 23637
  peptide (1)..(461): Ceres Seq. ID no. 13576266
  misc_feature (1)..(452): Homolog of NCBI NO: 25289785 NR Description: probable serine carboxypeptidase II
  misc_feature (1)..(452): Homolog of NCBI NO: 25289793 NR Description: probable serine carboxypeptidase II
  misc_feature (1)..(452): Homolog of NCBI NO: 18396647 NR Description: serine carboxypeptidase -related [Arabidopsis
  misc_feature (1)..(452): Homolog of NCBI NO: 30685740 NR Description: serine carboxypeptidase -related [Arabidopsis
  misc_feature (1)..(455): Homolog of NCBI NO: 15218514 NR Description: serine carboxypeptidase -related [Arabidopsis
  misc_feature (275)..(461): Homolog of NCBI NO: 28393789 NR Description: putative serine carboxypeptidase II [Arabidopsis
  misc_feature (1)..(291): Homolog of NCBI NO: 28393789 NR Description: putative serine carboxypeptidase II [Arabidopsis
  misc_feature (1)..(455): Homolog of NCBI NO: 15238327 NR Description: serine carboxypeptidase -related [Arabidopsis
  misc_feature (1)..(461): Homolog of NCBI NO: 15224454 NR Description: serine carboxypeptidase -related [Arabidopsis
  misc_feature (1)..(461): Homolog of NCBI NO: 15238328 NR Description: serine carboxypeptidase -related [Arabidopsis
  misc_feature (1)..(452): Homolog of NCBI NO: 25289785 NR Description: probable serine carboxypeptidase II
  misc_feature (1)..(452): Homolog of NCBI NO: 25289793 NR Description: probable serine carboxypeptidase II
  misc_feature (1)..(452): Homolog of NCBI NO: 18396647 NR Description: serine carboxypeptidase -related [Arabidopsis
  misc_feature (1)..(452): Homolog of NCBI NO: 30685740 NR Description: serine carboxypeptidase -related [Arabidopsis
  misc_feature (1)..(455): Homolog of NCBI NO: 15218514 NR Description: serine carboxypeptidase -related [Arabidopsis
  misc_feature (275)..(461): Homolog of NCBI NO: 28393789 NR Description: putative serine carboxypeptidase II [Arabidopsis
  misc_feature (1)..(291): Homolog of NCBI NO: 28393789 NR Description: putative serine carboxypeptidase II [Arabidopsis
  misc_feature (1)..(455): Homolog of NCBI NO: 15238327 NR Description: serine carboxypeptidase -related [Arabidopsis
  misc_feature (1)..(461): Homolog of NCBI NO: 15224454 NR Description: serine carboxypeptidase -related [Arabidopsis
  misc_feature (1)..(461): Homolog of NCBI NO: 15238328 NR Description: serine carboxypeptidase -related [Arabidopsis

SEQ ID NO: 25808 - protein, 454 aa, Arabidopsis thaliana; identical to SEQ ID NO: 23638
  peptide (1)..(454): Ceres Seq. ID no. 13576267
  misc_feature (1)..(445): Homolog of NCBI NO: 25289785 NR Description: probable serine carboxypeptidase II
  misc_feature (1)..(445): Homolog of NCBI NO: 25289793 NR Description: probable serine carboxypeptidase II
  misc_feature (1)..(445): Homolog of NCBI NO: 18396647 NR Description: serine carboxypeptidase -related [Arabidopsis
  misc_feature (1)..(445): Homolog of NCBI NO: 30685740 NR Description: serine carboxypeptidase -related [Arabidopsis
  misc_feature (1)..(448): Homolog of NCBI NO: 15218514 NR Description: serine carboxypeptidase -related [Arabidopsis
  misc_feature (268)..(454): Homolog of NCBI NO: 28393789 NR Description: putative serine carboxypeptidase II [Arabidopsis
  misc_feature (1)..(284): Homolog of NCBI NO: 28393789 NR Description: putative serine carboxypeptidase II [Arabidopsis
  misc_feature (1)..(448): Homolog of NCBI NO: 15238327 NR Description: serine carboxypeptidase -related [Arabidopsis
  misc_feature (1)..(454): Homolog of NCBI NO: 15224454 NR Description: serine carboxypeptidase -related [Arabidopsis
  misc_feature (1)..(454): Homolog of NCBI NO: 15238328 NR Description: serine carboxypeptidase -related [Arabidopsis
  misc_feature (1)..(445): Homolog of NCBI NO: 25289785 NR Description: probable serine carboxypeptidase II
  misc_feature (1)..(445): Homolog of NCBI NO: 25289793 NR Description: probable serine carboxypeptidase II
  misc_feature (1)..(445): Homolog of NCBI NO: 18396647 NR Description: serine carboxypeptidase -related [Arabidopsis
  misc_feature (1)..(445): Homolog of NCBI NO: 30685740 NR Description: serine carboxypeptidase -related [Arabidopsis
  misc_feature (1)..(448): Homolog of NCBI NO: 15218514 NR Description: serine carboxypeptidase -related [Arabidopsis
  misc_feature (268)..(454): Homolog of NCBI NO: 28393789 NR Description: putative serine carboxypeptidase II [Arabidopsis
  misc_feature (1)..(284): Homolog of NCBI NO: 28393789 NR Description: putative serine carboxypeptidase II [Arabidopsis
  misc_feature (1)..(448): Homolog of NCBI NO: 15238327 NR Description: serine carboxypeptidase -related [Arabidopsis
  misc_feature (1)..(454): Homolog of NCBI NO: 15224454 NR Description: serine carboxypeptidase -related [Arabidopsis
  misc_feature (1)..(454): Homolog of NCBI NO: 15238328 NR Description: serine carboxypeptidase -related [Arabidopsis

SEQ ID NO: 25809 - DNA, 915 bp, Arabidopsis thaliana
  misc_feature (1)..(915): Ceres Seq. ID no. 12680932
  misc_feature: MA Experiment ID: 108434 Result: Up-regulated in Transcription
  misc_feature: MA Experiment 108434 PARAMETER Experiment Name: At_Root_Tips_cDNA_P Parameter: Tissue Value: Root Tips
  misc_feature: MA Experiment ID: 108461 Result: Down-regulated in Transcription
  misc_feature: MA Experiment 108461 PARAMETER Experiment Name: At_Germinating_Seeds_cDNA_P Parameter: Age (day) Value: 1 vs. 0
  misc_feature: MA Experiment 108461 PARAMETER Experiment Name: At_Germinating_Seeds_cDNA_P Parameter: Tissue Value: Germinating Seeds
  misc_feature: MA Experiment ID: 108462 Result: Down-regulated in Transcription
  misc_feature: MA Experiment 108462 PARAMETER Experiment Name: At_Germinating_Seeds_cDNA_P Parameter: Age (day) Value: 2 vs. 0
  misc_feature: MA Experiment 108462 PARAMETER Experiment Name: At_Germinating_Seeds_cDNA_P Parameter: Tissue Value: Germinating Seeds
  misc_feature: MA Experiment ID: 108463 Result: Down-regulated in Transcription
  misc_feature: MA Experiment 108463 PARAMETER Experiment Name: At_Germinating_Seeds_cDNA_P Parameter: Age (day) Value: 3 vs. 0
  misc_feature: MA Experiment 108463 PARAMETER Experiment Name: At_Germinating_Seeds_cDNA_P Parameter: Tissue Value: Germinating Seeds
  misc_feature: MA Experiment ID: 108464 Result: Down-regulated in Transcription
  misc_feature: MA Experiment 108464 PARAMETER Experiment Name: At_Germinating_Seeds_cDNA_P Parameter: Age (day) Value: 4 vs. 0
  misc_feature: MA Experiment 108464 PARAMETER Experiment Name: At_Germinating_Seeds_cDNA_P Parameter: Tissue Value: Germinating Seeds
  misc_feature: MA Experiment ID: 20000173 Result: Up-regulated in Transcription
  misc_feature: MA Experiment 20000173 PARAMETER Experiment Name: At_42deg_Heat_P Parameter: Age (day) Value: 14
  misc_feature: MA Experiment 20000173 PARAMETER Experiment Name: At_42deg_Heat_P Parameter: Organism Value: A. thaliana
  misc_feature: MA Experiment 20000173 PARAMETER Experiment Name: At_42deg_Heat_P Parameter: Plant Line Value: WS
  misc_feature: MA Experiment 20000173 PARAMETER Experiment Name: At_42deg_Heat_P Parameter: Temperature (deg C) Value: 42 vs. 22
  misc_feature: MA Experiment 20000173 PARAMETER Experiment Name: At_42deg_Heat_P Parameter: Timepoint (hr) Value: 6
  misc_feature: MA Experiment 20000173 PARAMETER Experiment Name: At_42deg_Heat_P Parameter: Tissue Value: Aerial
  misc_feature: MA Experiment ID: 20000180 Result: Down-regulated in Transcription
  misc_feature: MA Experiment 20000180 PARAMETER Experiment Name: At_Germinating_Seeds_P Parameter: Age (hr) Value: 24 vs. 0
  misc_feature: MA Experiment 20000180 PARAMETER Experiment Name: At_Germinating_Seeds_P Parameter: Tissue Value: Germinating Seeds
  misc_feature: MA Experiment ID: 20000184 Result: Down-regulated in Transcription
  misc_feature: MA Experiment 20000184 PARAMETER Experiment Name: At_Shoots__P Parameter: Age (day) Value: 7
  misc_feature: MA Experiment 20000184 PARAMETER Experiment Name: At_Shoots__P Parameter: Tissue Value: Shoots vs. Whole Plant
  misc_feature: MA Experiment ID: 20000224 Result: Up-regulated in Transcription
  misc_feature: MA Experiment ID: 20001558 Result: Up-regulated in Transcription
  misc_feature: MA Experiment 20001558 PARAMETER Experiment Name: At_Drought_Soil_Dry_P Parameter: Age (day) Value: 27
  misc_feature: MA Experiment 20001558 PARAMETER Experiment Name: At_Drought_Soil_Dry_P Parameter: Organism Value: A. thaliana
  misc_feature: MA Experiment 20001558 PARAMETER Experiment Name: At_Drought_Soil_Dry_P Parameter: Plant Line Value: WS
  misc_feature: MA Experiment 20001558 PARAMETER Experiment Name: At_Drought_Soil_Dry_P Parameter: Post Timepoint (hr) Value: 6
  misc_feature: MA Experiment 20001558 PARAMETER Experiment Name: At_Drought_Soil_Dry_P Parameter: Post-Treatment Value: Re-Water vs. No Drought
  misc_feature: MA Experiment 20001558 PARAMETER Experiment Name: At_Drought_Soil_Dry_P Parameter: Timepoint (day) Value: 13
  misc_feature: MA Experiment 20001558 PARAMETER Experiment Name: At_Drought_Soil_Dry_P Parameter: Treatment Value: Drought vs. No Drought
aattagggttcctactttcttctcctttctcgtaacttgatcaaatctgcttactgtggagttatacaccttgaagagtctcgcgataatgaagaaattctatcaaaatgctgatcatgagactgataaatccaaatcggcggagacgaagaagaggaagaacatgaggagattaggaggcggtggtctttctctccaaacttttgccaacatgaaatcggaaaataatcgctataacccttctttgatcaaaaagcaaaaagagttctacaagaatgcaaagtatgtgagcaagtttaggaagtcgttgaagcagcagaacattcctgataagaatgagactggagagactagtaaggtaggtgatgatgatgatgatgataagcggaagggtaaatctaataagagaattggtgtagaggatttgtacaagcagacaagagaagagatggagagagtaaggaaggagagagaggcaatgtttcaggcgaagaaggaagcgaaagaagaggctgaatctaggaggaaagaagcaaaggggaaaatgttgaggaagactcgacatggtcagcctgtaatgaaatacagaattgagcatcttcttgaatccatcaagaaatctgccggaatcaacgaaatcgcctaacttgtgcgggttgatacagtgcagatgaagaacccagtgaggagaagttgctggtgttgcggaggctcaaagcagaaaccttgttgtcactcagatactgacctttttcttcccggagatattatgttacactactgcttatactttgagagatgctttgcggcaacatatgtagttttttgctaggccttaccgtttagctcatgattttagatgtttctttacaaacttcttttactataaatcttataaaatgataattttattcc

SEQ ID NO: 25810 - protein, 185 aa, Arabidopsis thaliana
  peptide (1)..(185): Ceres Seq. ID no. 12680933
  misc_feature (99)..(179): Homolog of NCBI NO: 19115190 NR Description: very hypothetical protein [Schizosaccharomyces
  misc_feature (1)..(185): Homolog of NCBI NO: 15236259 NR Description: unknown protein; protein id: At4g03180.1,
MKKFYQNADHETDKSKSAETKKRKNMRRLGGGGLSLQTFANMKSENNRYNPSLIKKQKEFYKNAKYVSKFRKSLKQQNIPDKNETGETSKVGDDDDDDKRKGKSNKRIGVEDLYKQTREEMERVRKEREAMFQAKKEAKEEAESRRKEAKGKMLRKTRHGQPVMKYRIEHLLESIKKSAGINEIA

SEQ ID NO: 25811 - protein, 160 aa, Arabidopsis thaliana
  peptide (1)..(160): Ceres Seq. ID no. 12680934
  misc_feature (74)..(154): Homolog of NCBI NO: 19115190 NR Description: very hypothetical protein [Schizosaccharomyces
  misc_feature (1)..(160): Homolog of NCBI NO: 15236259 NR Description: unknown protein; protein id: At4g03180.1,
MRRLGGGGLSLQTFANMKSENNRYNPSLIKKQKEFYKNAKYVSKFRKSLKQQNIPDKNETGETSKVGDDDDDDKRKGKSNKRIGVEDLYKQTREEMERVRKEREAMFQAKKEAKEEAESRRKEAKGKMLRKTRHGQPVMKYRIEHLLESIKKSAGINEIA

SEQ ID NO: 25812 - protein, 144 aa, Arabidopsis thaliana
  peptide (1)..(144): Ceres Seq. ID no. 12680935
  misc_feature (58)..(138): Homolog of NCBI NO: 19115190 NR Description: very hypothetical protein [Schizosaccharomyces
  misc_feature (1)..(144): Homolog of NCBI NO: 15236259 NR Description: unknown protein; protein id: At4g03180.1,
MKSENNRYNPSLIKKQKEFYKNAKYVSKFRKSLKQQNIPDKNETGETSKVGDDDDDDKRKGKSNKRIGVEDLYKQTREEMERVRKEREAMFQAKKEAKEEAESRRKEAKGKMLRKTRHGQPVMKYRIEHLLESIKKSAGINEIA

SEQ ID NO: 25813 - DNA, 807 bp, Arabidopsis thaliana
  misc_feature (1)..(807): Ceres Seq. ID no. 13493796
  misc_feature: MA Experiment ID: 108461 Result: Up-regulated in Transcription
  misc_feature: MA Experiment 108461 PARAMETER Experiment Name: At_Germinating_Seeds_cDNA_P Parameter: Age (day) Value: 1 vs. 0
  misc_feature: MA Experiment 108461 PARAMETER Experiment Name: At_Germinating_Seeds_cDNA_P Parameter: Tissue Value: Germinating Seeds
  misc_feature: MA Experiment ID: 20000072 Result: Up-regulated in Transcription
  misc_feature: MA Experiment 20000072 PARAMETER Experiment Name: At_100uM_ABA_Mutants_cDNA_P Parameter: Plant Line Value: CS8105
  misc_feature: MA Experiment 20000072 PARAMETER Experiment Name: At_100uM_ABA_Mutants_cDNA_P Parameter: Timepoint (hr) Value: 6
  misc_feature: MA Experiment 20000072 PARAMETER Experiment Name: At_100uM_ABA_Mutants_cDNA_P Parameter: Tissue Value: Aerial
  misc_feature: MA Experiment 20000072 PARAMETER Experiment Name: At_100uM_ABA_Mutants_cDNA_P Parameter: Treatment Value: 100uM ABA vs. No Treatment
  misc_feature: MA Experiment ID: 20000111 Result: Down-regulated in Transcription
  misc_feature: MA Experiment 20000111 PARAMETER Experiment Name: At_42deg_Heat_cDNA_P Parameter: Temperature (deg C) Value: 42 vs. 22
  misc_feature: MA Experiment 20000111 PARAMETER Experiment Name: At_42deg_Heat_cDNA_P Parameter: Timepoint (hr) Value: 6
  misc_feature: MA Experiment 20000111 PARAMETER Experiment Name: At_42deg_Heat_cDNA_P Parameter: Tissue Value: Aerial
  misc_feature: MA Experiment ID: 20000117 Result: Up-regulated in Transcription
  misc_feature: MA Experiment 20000117 PARAMETER Experiment Name: At_100uM_ABA_Mutants_cDNA_P Parameter: Plant Line Value: Columbia
  misc_feature: MA Experiment 20000117 PARAMETER Experiment Name: At_100uM_ABA_Mutants_cDNA_P Parameter: Timepoint (hr) Value: 6
  misc_feature: MA Experiment 20000117 PARAMETER Experiment Name: At_100uM_ABA_Mutants_cDNA_P Parameter: Tissue Value: Aerial
  misc_feature: MA Experiment 20000117 PARAMETER Experiment Name: At_100uM_ABA_Mutants_cDNA_P Parameter: Treatment Value: 100uM ABA vs. No Treatment
aaacatgtggtaattggttcatttgtccttctttctttcttctccaatcggatctcactttctctacctcaccggtaaaaatggcgatgtgggtattcgggtacggatctttaatatggaaaacgggttttcctttcgacgaaagcctccctggtttcatcaaaggctatcgccgtgtcttccatcaaggtagtactgatcatagaggaattccggattttccgggaagaacagtgacattagaagctgctcatggagaagttttgttgtgtagttgcttacaagataactaaagaggaagataaaagagatgctttattgcatttggaagtgagggagaagcaatatgatcagaaagagtatcttgatttcttcactgactataatgcttcggaaccggctgtggcaggagtaatggtgtatatagcttcacctgacaagaagagcaacaacaactacttaggaccagctcctcttgaagatattgccaaacagatagttaaagcgaaaggaccttcagggccaaacagagactatctcttcaacctcgaagaggctcttgctcaactcgggtttaaagataaacatgtcacagatcttgcaaaccaagttaggcacattctttcagaatccgaagagttagacattgatgccaccgccgccaccgccaacaatgtctagattcacagcttcttttcgatttatccgaaaagaacaaaacccaatttttaagagatgcattttgcatcccccaattgaatctgttatcactatcaatcaactctcttctttatcatatttgatcac

SEQ ID NO: 25814 - protein, 142 aa, Arabidopsis thaliana
  peptide (1)..(142): Ceres Seq. ID no. 13493797
  misc_feature (2)..(123): Pfam Name: ChaC-like protein Pfam Description: ChaC-like protein
  misc_feature (34)..(124): Homolog of NCBI NO: 7486662 NR Description: hypothetical protein F8F16.110 - Arabidopsis
  misc_feature (34)..(130): Homolog of NCBI NO: 7486723 NR Description: hypothetical protein F9D12.14 - Arabidopsis
  misc_feature (5)..(124): Homolog of NCBI NO: 27525010 NR Description: putative cation transporter [Beta procumbens]
  misc_feature (5)..(130): Homolog of NCBI NO: 15239626 NR Description: expressed protein [Arabidopsis thaliana]
  misc_feature (2)..(127): Homolog of NCBI NO: 21593515 NR Description: unknown [Arabidopsis thaliana]
  misc_feature (2)..(127): Homolog of NCBI NO: 18417778 NR Description: expressed protein [Arabidopsis thaliana]
  misc_feature (5)..(121): Homolog of NCBI NO: 38344831 NR Description: OSJNBa0064H22.12 [Oryza sativa (japonica
  misc_feature (16)..(142): Homolog of NCBI NO: 25349686 NR Description: hypothetical protein T12C22.6 [imported] -
  misc_feature (2)..(142): Homolog of NCBI NO: 12083292 NR Description: unknown protein [Arabidopsis thaliana]
  misc_feature (2)..(142): Homolog of NCBI NO: 18401334 NR Description: expressed protein [Arabidopsis thaliana]
MEKFCCVVAYKITKEEDKRDALLHLEVREKQYDQKEYLDFFTDYNASEPAVAGVMVYIASPDKKSNNNYLGPAPLEDIAKQIVKAKGPSGPNRDYLFNLEEALAQLGFKDKHVTDLANQVRHILSESEELDIDATAATANNV

SEQ ID NO: 25815 - protein, 96 aa, Arabidopsis thaliana
  peptide (1)..(96): Ceres Seq. ID no. 13493798
  misc_feature (29)..(87): Pfam Name: ChaC-like protein Pfam Description: ChaC-like protein
  misc_feature (27)..(90): Homolog of NCBI NO: 7486662 NR Description: hypothetical protein F8F16.110 - Arabidopsis
  misc_feature (27)..(87): Homolog of NCBI NO: 7486723 NR Description: hypothetical protein F9D12.14 - Arabidopsis
  misc_feature (27)..(90): Homolog of NCBI NO: 27525010 NR Description: putative cation transporter [Beta procumbens]
  misc_feature (27)..(87): Homolog of NCBI NO: 15239626 NR Description: expressed protein [Arabidopsis thaliana]
  misc_feature (27)..(90): Homolog of NCBI NO: 21593515 NR Description: unknown [Arabidopsis thaliana]
  misc_feature (27)..(90): Homolog of NCBI NO: 18417778 NR Description: expressed protein [Arabidopsis thaliana]
  misc_feature (27)..(85): Homolog of NCBI NO: 38344831 NR Description: OSJNBa0064H22.12 [Oryza sativa (japonica
  misc_feature (29)..(87): Homolog of NCBI NO: 25349686 NR Description: hypothetical protein T12C22.6 [imported] -
  misc_feature (29)..(87): Homolog of NCBI NO: 12083292 NR Description: unknown protein [Arabidopsis thaliana]
  misc_feature (27)..(87): Homolog of NCBI NO: 18401334 NR Description: expressed protein [Arabidopsis thaliana]
TCGNWFICPSFFLLQSDLTFSTSPVKMAMWVFGYGSLIWKTGFPFDESLPGFIKGYRRVFHQGSTDHRGIPDFPGRTVTLEAAHGEVLLCSCLQDN

SEQ ID NO: 25816 - protein, 88 aa, Arabidopsis thaliana
  peptide (1)..(88): Ceres Seq. ID no. 13493799
  misc_feature (1)..(69): Pfam Name: ChaC-like protein Pfam Description: ChaC-like protein
  misc_feature (1)..(70): Homolog of NCBI NO: 7486662 NR Description: hypothetical protein F8F16.110 - Arabidopsis
  misc_feature (1)..(76): Homolog of NCBI NO: 7486723 NR Description: hypothetical protein F9D12.14 - Arabidopsis
  misc_feature (1)..(70): Homolog of NCBI NO: 27525010 NR Description: putative cation transporter [Beta procumbens]
  misc_feature (1)..(76): Homolog of NCBI NO: 15239626 NR Description: expressed protein [Arabidopsis thaliana]
  misc_feature (1)..(73): Homolog of NCBI NO: 21593515 NR Description: unknown [Arabidopsis thaliana]
  misc_feature (1)..(73): Homolog of NCBI NO: 18417778 NR Description: expressed protein [Arabidopsis thaliana]
  misc_feature (1)..(67): Homolog of NCBI NO: 38344831 NR Description: OSJNBa0064H22.12 [Oryza sativa (japonica
  misc_feature (1)..(88): Homolog of NCBI NO: 25349686 NR Description: hypothetical protein T12C22.6 [imported] -
  misc_feature (1)..(88): Homolog of NCBI NO: 12083292 NR Description: unknown protein [Arabidopsis thaliana]
  misc_feature (1)..(88): Homolog of NCBI NO: 18401334 NR Description: expressed protein [Arabidopsis thaliana]
MVYIASPDKKSNNNYLGPAPLEDIAKQIVKAKGPSGPNRDYLFNLEEALAQLGFKDKHVTDLANQVRHILSESEELDIDATAATANNV

SEQ ID NO: 25817 - DNA, 1093 bp, Arabidopsis thaliana
  misc_feature (1)..(1093): Ceres Seq. ID no. 13487392
aattaacaaactcggccgtcgtcatgtctctccgtaaaaccctaaccgccgtgaatcaatcttcgttaccgccggattctttaatctccgccggtaatctcactgtttcagaggtctctggttcatcttctagaatcagatttcgtcctcgtaaaatcaggaaagtttcgtcagatccgtcgccgaggatcattatcaccgcgtctcctcctctatcaacaaaatcgactgttgatatcgctctacgtcacttacaaagctccgatgaacttctcggagcattaatcacaacgcacaacgatcctccactgttcgactcaagtaatactccgtttctctccttagcgagatcaatcctataccaacaactcgcgacgaaagcagcgaaatgtatctacgatcgattcatctctctattcaacggtggagaagcaggtgttgttcctgaatctgtgatctcactctccgccgttgatcttcgtaagatcggtgtctccgggagaaaagctagttacctccacgatctagctgataaatacaacaacggtgtgctttctgatgaattgattctgaaaatgagtgatgaagagttgattgataggttaactttggttaaaggaattggagtgtggactgttcatatgtttatgatcttctcgttgcatagacctgatgtgttgcctgtgggagatcttggtgtgaggaaaggtgtgaaagatctttatggtttgaaaaatcttccaggtccattgcaaatggagcagctttgtgagaaatggcgtccttataggtctgttggttcatggtacatgtggagactaatcgagtctcgtaagaccaaatagcacctgcctgtaatcgggcagttaatatgatcctgtgacgaagaagcttttccatgcccatcacttcctttccaagtttcacttgctggtaatctgagttattttgtgtctgtaaattatggagcacgtaagaaaaatccttcttgtattttaactgtattccacggattatatttctgtgactgttgtaaacatgtatcatgtatggggtttcatttgacttggatattgagaagcatggcttattt

SEQ ID NO: 25818 - protein, 280 aa, Arabidopsis thaliana
  peptide (1)..(280): Ceres Seq. ID no. 13487393
  misc_feature (115)..(180): Pfam Name: HhH-GPD superfamily base excision DNA repair protein Pfam Description: HhH-GPD superfamily base excision DNA repair
  misc_feature (61)..(279): Homolog of NCBI NO: 18394744 NR Description: expressed protein [Arabidopsis thaliana]
  misc_feature (23)..(277): Homolog of NCBI NO: 5091600 NR Description: This gene is a member of PF|01332 Alkylbase DNA
  misc_feature (80)..(272): Homolog of NCBI NO: 22971879 NR Description: hypothetical protein [Chloroflexus aurantiacus]
  misc_feature (61)..(279): Homolog of NCBI NO: 25402893 NR Description: protein F18O14.25 [imported] - Arabidopsis
  misc_feature (48)..(279): Homolog of NCBI NO: 18410802 NR Description: 3-methyladenine DNA glycosylase -related
  misc_feature (61)..(279): Homolog of NCBI NO: 21593178 NR Description: unknown [Arabidopsis thaliana]
  misc_feature (48)..(279): Homolog of NCBI NO: 25406423 NR Description: hypothetical protein F22H5.5 [imported] -
  misc_feature (80)..(275): Homolog of NCBI NO: 37521587 NR Description: probable DNA-3-methyladenine glycosylase
  misc_feature (78)..(275): Homolog of NCBI NO: 33592951 NR Description: DNA-3-methyladenine glycosylase [Bordetella
  misc_feature (8)..(280): Homolog of NCBI NO: 15230333 NR Description: DNA-3-methyladenine glycosidase -related
LTNSAVVMSLRKTLTAVNQSSLPPDSLISAGNLTVSEVSGSSSRIRFRPRKIRKVSSDPSPRIIITASPPLSTKSTVDIALRHLQSSDELLGALITTHNDPPLFDSSNTPFLSLARSILYQQLATKAAKCIYDRFISLFNGGEAGVVPESVISLSAVDLRKIGVSGRKASYLHDLADKYNNGVLSDELILKMSDEELIDRLTLVKGIGVWTVHMFMIFSLHRPDVLPVGDLGVRKGVKDLYGLKNLPGPLQMEQLCEKWRPYRSVGSWYMWRLIESRKTK

SEQ ID NO: 25819 - protein, 273 aa, Arabidopsis thaliana
  peptide (1)..(273): Ceres Seq. ID no. 13487394
  misc_feature (108)..(173): Pfam Name: HhH-GPD superfamily base excision DNA repair protein Pfam Description: HhH-GPD superfamily base excision DNA repair
  misc_feature (71)..(268): Homolog of NCBI NO: 33592951 NR Description: DNA-3-methyladenine glycosylase [Bordetella
  misc_feature (73)..(265): Homolog of NCBI NO: 22971879 NR Description: hypothetical protein [Chloroflexus aurantiacus]
  misc_feature (73)..(268): Homolog of NCBI NO: 37521587 NR Description: probable DNA-3-methyladenine glycosylase
  misc_feature (54)..(272): Homolog of NCBI NO: 25402893 NR Description: protein F18O14.25 [imported] - Arabidopsis
  misc_feature (41)..(272): Homolog of NCBI NO: 25406423 NR Description: hypothetical protein F22H5.5 [imported] -
  misc_feature (41)..(272): Homolog of NCBI NO: 18410802 NR Description: 3-methyladenine DNA glycosylase -related
  misc_feature (54)..(272): Homolog of NCBI NO: 21593178 NR Description: unknown [Arabidopsis thaliana]
  misc_feature (54)..(272): Homolog of NCBI NO: 18394744 NR Description: expressed protein [Arabidopsis thaliana]
  misc_feature (16)..(270): Homolog of NCBI NO: 5091600 NR Description: This gene is a member of PF|01332 Alkylbase DNA
  misc_feature (1)..(273): Homolog of NCBI NO: 15230333 NR Description: DNA-3-methyladenine glycosidase -related
MSLRKTLTAVNQSSLPPDSLISAGNLTVSEVSGSSSRIRFRPRKIRKVSSDPSPRIIITASPPLSTKSTVDIALRHLQSSDELLGALITTHNDPPLFDSSNTPFLSLARSILYQQLATKAAKCIYDRFISLFNGGEAGVVPESVISLSAVDLRKIGVSGRKASYLHDLADKYNNGVLSDELILKMSDEELIDRLTLVKGIGVWTVHMFMIFSLHRPDVLPVGDLGVRKGVKDLYGLKNLPGPLQMEQLCEKWRPYRSVGSWYMWRLIESRKTK

SEQ ID NO: 25820 - DNA, 698 bp, Arabidopsis thaliana
  misc_feature (1)..(698): Ceres Seq. ID no. 12323364
  misc_feature: MA Experiment ID: 108434 Result: Up-regulated in Transcription
  misc_feature: MA Experiment 108434 PARAMETER Experiment Name: At_Root_Tips_cDNA_P Parameter: Tissue Value: Root Tips
  misc_feature: MA Experiment ID: 108462 Result: Down-regulated in Transcription
  misc_feature: MA Experiment 108462 PARAMETER Experiment Name: At_Germinating_Seeds_cDNA_P Parameter: Age (day) Value: 2 vs. 0
  misc_feature: MA Experiment 108462 PARAMETER Experiment Name: At_Germinating_Seeds_cDNA_P Parameter: Tissue Value: Germinating Seeds
  misc_feature: MA Experiment ID: 108463 Result: Down-regulated in Transcription
  misc_feature: MA Experiment 108463 PARAMETER Experiment Name: At_Germinating_Seeds_cDNA_P Parameter: Age (day) Value: 3 vs. 0
  misc_feature: MA Experiment 108463 PARAMETER Experiment Name: At_Germinating_Seeds_cDNA_P Parameter: Tissue Value: Germinating Seeds
  misc_feature: MA Experiment ID: 108464 Result: Down-regulated in Transcription
  misc_feature: MA Experiment 108464 PARAMETER Experiment Name: At_Germinating_Seeds_cDNA_P Parameter: Age (day) Value: 4 vs. 0
  misc_feature: MA Experiment 108464 PARAMETER Experiment Name: At_Germinating_Seeds_cDNA_P Parameter: Tissue Value: Germinating Seeds
  misc_feature: MA Experiment ID: 20000227 Result: Up-regulated in Transcription
  misc_feature: MA Experiment 20000227 PARAMETER Experiment Name: At_Root-Tips-vs-Tops_P Parameter: Tissue Value: Root Tips vs. Root Tops
  misc_feature: MA Experiment ID: 20001557 Result: Up-regulated in Transcription
  misc_feature: MA Experiment 20001557 PARAMETER Experiment Name: At_Drought_Soil_Dry_P Parameter: Age (day) Value: 27
  misc_feature: MA Experiment 20001557 PARAMETER Experiment Name: At_Drought_Soil_Dry_P Parameter: Organism Value: A. thaliana
  misc_feature: MA Experiment 20001557 PARAMETER Experiment Name: At_Drought_Soil_Dry_P Parameter: Plant Line Value: WS
  misc_feature: MA Experiment 20001557 PARAMETER Experiment Name: At_Drought_Soil_Dry_P Parameter: Post Timepoint (hr) Value: 3
  misc_feature: MA Experiment 20001557 PARAMETER Experiment Name: At_Drought_Soil_Dry_P Parameter: Post-Treatment Value: Re-Water vs. No Drought
  misc_feature: MA Experiment 20001557 PARAMETER Experiment Name: At_Drought_Soil_Dry_P Parameter: Timepoint (day) Value: 13
  misc_feature: MA Experiment 20001557 PARAMETER Experiment Name: At_Drought_Soil_Dry_P Parameter: Treatment Value: Drought vs. No Drought
  misc_feature: MA Experiment ID: 20001558 Result: Up-regulated in Transcription
  misc_feature: MA Experiment 20001558 PARAMETER Experiment Name: At_Drought_Soil_Dry_P Parameter: Age (day) Value: 27
  misc_feature: MA Experiment 20001558 PARAMETER Experiment Name: At_Drought_Soil_Dry_P Parameter: Organism Value: A. thaliana
  misc_feature: MA Experiment 20001558 PARAMETER Experiment Name: At_Drought_Soil_Dry_P Parameter: Plant Line Value: WS
  misc_feature: MA Experiment 20001558 PARAMETER Experiment Name: At_Drought_Soil_Dry_P Parameter: Post Timepoint (hr) Value: 6
  misc_feature: MA Experiment 20001558 PARAMETER Experiment Name: At_Drought_Soil_Dry_P Parameter: Post-Treatment Value: Re-Water vs. No Drought
  misc_feature: MA Experiment 20001558 PARAMETER Experiment Name: At_Drought_Soil_Dry_P Parameter: Timepoint (day) Value: 13
  misc_feature: MA Experiment 20001558 PARAMETER Experiment Name: At_Drought_Soil_Dry_P Parameter: Treatment Value: Drought vs. No Drought
aaaagctcccaagcctagagattctgttgttgatccgattcccgctctccttctccggtagtacaatctccgtcgccggttacatcagccagggaagagttttaagagatggcatcaaagttgctacaattgaaatccaaggcatgtgaagcatcaaagtttgtttccaagcatggaacaacttactacaaacagttgctggataagaacaagatgtatatccaggagccagctactatagagaaatgcaatgaattgtctaagcagcttctctacactcgtcttgctagcattcctgggcgttctgagtcattttggaaggaagtcaatcacgtgaagggtttatggaagaatcgggcggatttgaaggttgaagatgctggaatagctgcactttttggtctggaatgctttgcgtggtactgtgcaggagagattgtaggaaggggcttcactttcaccggctactacccttgaagaaagaaagcaaccccctcataaacaaacatgcgtttcagatccattgaataccgaaaagcctttttatatcataattagcggcttattatctatctcactgctgacattagaagcaaagttaatttctgtttctctggataatttatacacaaaagttttgaaggtgaggcatcatcactcgtgctagctctaataatatcagtcgactaatgttggcc

SEQ ID NO: 25821 - protein, 122 aa, Arabidopsis thaliana
  peptide (1)..(122): Ceres Seq. ID no. 12323365
  misc_feature (8)..(122): Pfam Name: Mitochondrial ATP synthase g subunit Pfam Description: Mitochondrial ATP synthase g subunit
  misc_feature (1)..(120): Homolog of NCBI NO: 34912342 NR Description: P0518F01.5 [Oryza sativa (japonica
  misc_feature (1)..(122): Homolog of NCBI NO: 15224821 NR Description: copia-like retroelement pol polyprotein
  misc_feature (1)..(122): Homolog of NCBI NO: 15233603 NR Description: putative protein
  misc_feature (1)..(122): Homolog of NCBI NO: 15236143 NR Description: putative protein
MASKLLQLKSKACEASKFVSKHGTTYYKQLLDKNKMYIQEPATIEKCNELSKQLLYTRLASIPGRSESFWKEVNHVKGLWKNRADLKVEDAGIAALFGLECFAWYCAGEIVGRGFTFTGYYP

SEQ ID NO: 25822 - protein, 87 aa, Arabidopsis thaliana
  peptide (1)..(87): Ceres Seq. ID no. 12323366
  misc_feature (1)..(87): Pfam Name: Mitochondrial ATP synthase g subunit Pfam Description: Mitochondrial ATP synthase g subunit
  misc_feature (1)..(85): Homolog of NCBI NO: 34912342 NR Description: P0518F01.5 [Oryza sativa (japonica
  misc_feature (1)..(87): Homolog of NCBI NO: 15224821 NR Description: copia-like retroelement pol polyprotein
  misc_feature (1)..(87): Homolog of NCBI NO: 15233603 NR Description: putative protein
  misc_feature (1)..(87): Homolog of NCBI NO: 15236143 NR Description: putative protein
MYIQEPATIEKCNELSKQLLYTRLASIPGRSESFWKEVNHVKGLWKNRADLKVEDAGIAALFGLECFAWYCAGEIVGRGFTFTGYYP

SEQ ID NO: 25823 - DNA, 912 bp, Arabidopsis thaliana
  misc_feature (1)..(912): Ceres Seq. ID no. 12562055
  misc_feature: MA Experiment ID: 108434 Result: Down-regulated in Transcription
  misc_feature: MA Experiment 108434 PARAMETER Experiment Name: At_Root_Tips_cDNA_P Parameter: Tissue Value: Root Tips
  misc_feature: MA Experiment ID: 108435 Result: Down-regulated in Transcription
  misc_feature: MA Experiment 108435 PARAMETER Experiment Name: At_stm_Mutants_cDNA_P Parameter: Plant Line Value: wt Landsburg vs stm
  misc_feature: MA Experiment 108435 PARAMETER Experiment Name: At_stm_Mutants_cDNA_P Parameter: Tissue Value: Shoot Apical Meristem Region
  misc_feature: MA Experiment ID: 108461 Result: Down-regulated in Transcription
  misc_feature: MA Experiment 108461 PARAMETER Experiment Name: At_Germinating_Seeds_cDNA_P Parameter: Age (day) Value: 1 vs. 0
  misc_feature: MA Experiment 108461 PARAMETER Experiment Name: At_Germinating_Seeds_cDNA_P Parameter: Tissue Value: Germinating Seeds
  misc_feature: MA Experiment ID: 108462 Result: Up-regulated in Transcription
  misc_feature: MA Experiment 108462 PARAMETER Experiment Name: At_Germinating_Seeds_cDNA_P Parameter: Age (day) Value: 2 vs. 0
  misc_feature: MA Experiment 108462 PARAMETER Experiment Name: At_Germinating_Seeds_cDNA_P Parameter: Tissue Value: Germinating Seeds
  misc_feature: MA Experiment ID: 108463 Result: Up-regulated in Transcription
  misc_feature: MA Experiment 108463 PARAMETER Experiment Name: At_Germinating_Seeds_cDNA_P Parameter: Age (day) Value: 3 vs. 0
  misc_feature: MA Experiment 108463 PARAMETER Experiment Name: At_Germinating_Seeds_cDNA_P Parameter: Tissue Value: Germinating Seeds
  misc_feature: MA Experiment ID: 108464 Result: Up-regulated in Transcription
  misc_feature: MA Experiment 108464 PARAMETER Experiment Name: At_Germinating_Seeds_cDNA_P Parameter: Age (day) Value: 4 vs. 0
  misc_feature: MA Experiment 108464 PARAMETER Experiment Name: At_Germinating_Seeds_cDNA_P Parameter: Tissue Value: Germinating Seeds
  misc_feature: MA Experiment ID: 108469 Result: Up-regulated in Transcription
  misc_feature: MA Experiment ID: 20000070 Result: Up-regulated in Transcription
  misc_feature: MA Experiment 20000070 PARAMETER Experiment Name: At_100uM_ABA_Mutants_cDNA_P Parameter: Plant Line Value: CS24
  misc_feature: MA Experiment 20000070 PARAMETER Experiment Name: At_100uM_ABA_Mutants_cDNA_P Parameter: Timepoint (hr) Value: 6
  misc_feature: MA Experiment 20000070 PARAMETER Experiment Name: At_100uM_ABA_Mutants_cDNA_P Parameter: Tissue Value: Aerial
  misc_feature: MA Experiment 20000070 PARAMETER Experiment Name: At_100uM_ABA_Mutants_cDNA_P Parameter: Treatment Value: 100uM ABA vs. No Treatment
  misc_feature: MA Experiment ID: 20000071 Result: Up-regulated in Transcription
  misc_feature: MA Experiment 20000071 PARAMETER Experiment Name: At_100uM_ABA_Mutants_cDNA_P Parameter: Plant Line Value: CS8104
  misc_feature: MA Experiment 20000071 PARAMETER Experiment Name: At_100uM_ABA_Mutants_cDNA_P Parameter: Timepoint (hr) Value: 6
  misc_feature: MA Experiment 20000071 PARAMETER Experiment Name: At_100uM_ABA_Mutants_cDNA_P Parameter: Tissue Value: Aerial
  misc_feature: MA Experiment 20000071 PARAMETER Experiment Name: At_100uM_ABA_Mutants_cDNA_P Parameter: Treatment Value: 100uM ABA vs. No Treatment
  misc_feature: MA Experiment ID: 20000089 Result: Up-regulated in Transcription
  misc_feature: MA Experiment ID: 20000090 Result: Up-regulated in Transcription
  misc_feature: MA Experiment ID: 20000117 Result: Up-regulated in Transcription
  misc_feature: MA Experiment 20000117 PARAMETER Experiment Name: At_100uM_ABA_Mutants_cDNA_P Parameter: Plant Line Value: Columbia
  misc_feature: MA Experiment 20000117 PARAMETER Experiment Name: At_100uM_ABA_Mutants_cDNA_P Parameter: Timepoint (hr) Value: 6
  misc_feature: MA Experiment 20000117 PARAMETER Experiment Name: At_100uM_ABA_Mutants_cDNA_P Parameter: Tissue Value: Aerial
  misc_feature: MA Experiment 20000117 PARAMETER Experiment Name: At_100uM_ABA_Mutants_cDNA_P Parameter: Treatment Value: 100uM ABA vs. No Treatment
  misc_feature: MA Experiment ID: 20000179 Result: Down-regulated in Transcription
  misc_feature: MA Experiment 20000179 PARAMETER Experiment Name: At_Germinating_Seeds_P Parameter: Age (hr) Value: 6 vs. 0
  misc_feature: MA Experiment 20000179 PARAMETER Experiment Name: At_Germinating_Seeds_P Parameter: Tissue Value: Germinating Seeds
  misc_feature: MA Experiment ID: 20000182 Result: Up-regulated in Transcription
  misc_feature: MA Experiment 20000182 PARAMETER Experiment Name: At_2mM_SA_P Parameter: Age (day) Value: 14
  misc_feature: MA Experiment 20000182 PARAMETER Experiment Name: At_2mM_SA_P Parameter: Organism Value: A. thaliana
  misc_feature: MA Experiment 20000182 PARAMETER Experiment Name: At_2mM_SA_P Parameter: Plant Line Value: WS
  misc_feature: MA Experiment 20000182 PARAMETER Experiment Name: At_2mM_SA_P Parameter: Timepoint (hr) Value: 6
  misc_feature: MA Experiment 20000182 PARAMETER Experiment Name: At_2mM_SA_P Parameter: Tissue Value: Aerial
  misc_feature: MA Experiment 20000182 PARAMETER Experiment Name: At_2mM_SA_P Parameter: Treatment Value: 2mM SA vs. No Treatment
  misc_feature: MA Experiment ID: 20000185 Result: Up-regulated in Transcription
  misc_feature: MA Experiment 20000185 PARAMETER Experiment Name: At_Roots__P Parameter: Age (day) Value: 7 vs. 21
  misc_feature: MA Experiment 20000185 PARAMETER Experiment Name: At_Roots__P Parameter: Organism Value: A. thaliana
  misc_feature: MA Experiment 20000185 PARAMETER Experiment Name: At_Roots__P Parameter: Tissue Value: Roots vs. Whole Plant
  misc_feature: MA Experiment ID: 20000227 Result: Up-regulated in Transcription
  misc_feature: MA Experiment 20000227 PARAMETER Experiment Name: At_Root-Tips-vs-Tops_P Parameter: Tissue Value: Root Tips vs. Root Tops
  misc_feature: MA Experiment ID: 20000234 Result: Down-regulated in Transcription
  misc_feature: MA Experiment 20000234 PARAMETER Experiment Name: At_Siliques_P Parameter: Age (day) Value: 21
  misc_feature: MA Experiment 20000234 PARAMETER Experiment Name: At_Siliques_P Parameter: Organism Value: A. thaliana
  misc_feature: MA Experiment 20000234 PARAMETER Experiment Name: At_Siliques_P Parameter: Plant Line Value: WS
  misc_feature: MA Experiment 20000234 PARAMETER Experiment Name: At_Siliques_P Parameter: Tissue Value: Less Than 5mm Siliques vs. Whole Plant
  misc_feature: MA Experiment ID: 20000235 Result: Down-regulated in Transcription
  misc_feature: MA Experiment 20000235 PARAMETER Experiment Name: At_Siliques_P Parameter: Age (day) Value: 21
  misc_feature: MA Experiment 20000235 PARAMETER Experiment Name: At_Siliques_P Parameter: Organism Value: A. thaliana
  misc_feature: MA Experiment 20000235 PARAMETER Experiment Name: At_Siliques_P Parameter: Plant Line Value: WS
  misc_feature: MA Experiment 20000235 PARAMETER Experiment Name: At_Siliques_P Parameter: Tissue Value: 5-10mm Siliques vs. Whole Plant
  misc_feature: MA Experiment ID: 20000264 Result: Down-regulated in Transcription
  misc_feature: MA Experiment 20000264 PARAMETER Experiment Name: At_Open_Flower_P Parameter: Age (day) Value: 21
  misc_feature: MA Experiment 20000264 PARAMETER Experiment Name: At_Open_Flower_P Parameter: Plant Line Value: WS
  misc_feature: MA Experiment 20000264 PARAMETER Experiment Name: At_Open_Flower_P Parameter: Tissue Value: Open Flower vs. Whole Plant
  misc_feature: MA Experiment ID: 20000265 Result: Down-regulated in Transcription
  misc_feature: MA Experiment 20000265 PARAMETER Experiment Name: At_Open_Flower_P Parameter: Age (day) Value: 21
  misc_feature: MA Experiment 20000265 PARAMETER Experiment Name: At_Open_Flower_P Parameter: Plant Line Value: WS
  misc_feature: MA Experiment 20000265 PARAMETER Experiment Name: At_Open_Flower_P Parameter: Tissue Value: Closed Flower vs. Whole Plant
  misc_feature: MA Experiment ID: 20000286 Result: Down-regulated in Transcription
  misc_feature: MA Experiment 20000286 PARAMETER Experiment Name: At_Open_Flower_P Parameter: Age (day) Value: 21
  misc_feature: MA Experiment 20000286 PARAMETER Experiment Name: At_Open_Flower_P Parameter: Plant Line Value: WS
  misc_feature: MA Experiment 20000286 PARAMETER Experiment Name: At_Open_Flower_P Parameter: Tissue Value: Half Open vs. Whole Plant
  misc_feature: MA Experiment ID: 20000439 Result: Up-regulated in Transcription
  misc_feature: MA Experiment 20000439 PARAMETER Experiment Name: At_Roots__P Parameter: Age (day) Value: 14 vs. 21
  misc_feature: MA Experiment 20000439 PARAMETER Experiment Name: At_Roots__P Parameter: Organism Value: A. thaliana
  misc_feature: MA Experiment 20000439 PARAMETER Experiment Name: At_Roots__P Parameter: Tissue Value: Roots vs. Whole Plant
  misc_feature: MA Experiment ID: 20000456 Result: Up-regulated in Transcription
  misc_feature: MA Experiment 20000456 PARAMETER Experiment Name: At_100uM_BA_P Parameter: Age (day) Value: 14
  misc_feature: MA Experiment 20000456 PARAMETER Experiment Name: At_100uM_BA_P Parameter: Organism Value: A. thaliana
  misc_feature: MA Experiment 20000456 PARAMETER Experiment Name: At_100uM_BA_P Parameter: Plant Line Value: WS
  misc_feature: MA Experiment 20000456 PARAMETER Experiment Name: At_100uM_BA_P Parameter: Timepoint (hr) Value: 6
  misc_feature: MA Experiment 20000456 PARAMETER Experiment Name: At_100uM_BA_P Parameter: Tissue Value: Aerial
  misc_feature: MA Experiment 20000456 PARAMETER Experiment Name: At_100uM_BA_P Parameter: Treatment Value: 100uM BA vs. No Treatment
  misc_feature: MA Experiment ID: 20000573 Result: Up-regulated in Transcription
  misc_feature: MA Experiment 20000573 PARAMETER Experiment Name: At_100uM_ABA_Mutants__P Parameter: Organism Value: A. thaliana
  misc_feature: MA Experiment 20000573 PARAMETER Experiment Name: At_100uM_ABA_Mutants__P Parameter: Plant Line Value: CS22 vs. Ler wt
  misc_feature: MA Experiment 20000573 PARAMETER Experiment Name: At_100uM_ABA_Mutants__P Parameter: Timepoint (hr) Value: N/A
  misc_feature: MA Experiment 20000573 PARAMETER Experiment Name: At_100uM_ABA_Mutants__P Parameter: Tissue Value: Whole Plant
  misc_feature: MA Experiment 20000573 PARAMETER Experiment Name: At_100uM_ABA_Mutants__P Parameter: Treatment Value: None
  misc_feature: MA Experiment ID: 20000574 Result: Up-regulated in Transcription
  misc_feature: MA Experiment 20000574 PARAMETER Experiment Name: At_100uM_ABA_Mutants__P Parameter: Organism Value: A. thaliana
  misc_feature: MA Experiment 20000574 PARAMETER Experiment Name: At_100uM_ABA_Mutants__P Parameter: Plant Line Value: CS23 vs. Ler wt
  misc_feature: MA Experiment 20000574 PARAMETER Experiment Name: At_100uM_ABA_Mutants__P Parameter: Timepoint (hr) Value: N/A
  misc_feature: MA Experiment 20000574 PARAMETER Experiment Name: At_100uM_ABA_Mutants__P Parameter: Tissue Value: Whole Plant
  misc_feature: MA Experiment 20000574 PARAMETER Experiment Name: At_100uM_ABA_Mutants__P Parameter: Treatment Value: None
  misc_feature: MA Experiment ID: 20000709 Result: Up-regulated in Transcription
  misc_feature: MA Experiment 20000709 PARAMETER Experiment Name: At_15mM_NH4NO3_L-to-H_P Parameter: Age (hr) Value: 14
  misc_feature: MA Experiment 20000709 PARAMETER Experiment Name: At_15mM_NH4NO3_L-to-H_P Parameter: Organism Value: A. thaliana
  misc_feature: MA Experiment 20000709 PARAMETER Experiment Name: At_15mM_NH4NO3_L-to-H_P Parameter: Plant Line Value: WS
  misc_feature: MA Experiment 20000709 PARAMETER Experiment Name: At_15mM_NH4NO3_L-to-H_P Parameter: Timepoint (hr) Value: 4
  misc_feature: MA Experiment 20000709 PARAMETER Experiment Name: At_15mM_NH4NO3_L-to-H_P Parameter: Tissue Value: Aerial
  misc_feature: MA Experiment 20000709 PARAMETER Experiment Name: At_15mM_NH4NO3_L-to-H_P Parameter: Treatment Value: 15mM NH4NO3 vs. 30mM Mannitol
  misc_feature: MA Experiment ID: 20000794 Result: Down-regulated in Transcription
  misc_feature: MA Experiment 20000794 PARAMETER Experiment Name: At_Petals_P Parameter: Age (day) Value: 23-25 days
  misc_feature: MA Experiment 20000794 PARAMETER Experiment Name: At_Petals_P Parameter: Plant Line Value: WS
  misc_feature: MA Experiment 20000794 PARAMETER Experiment Name: At_Petals_P Parameter: Tissue Value: Petals vs. Whole plant
  misc_feature: MA Experiment ID: 20001451 Result: Up-regulated in Transcription
  misc_feature: MA Experiment 20001451 PARAMETER Experiment Name: At_Far-red-induction_P Parameter: Age (day) Value: 7
  misc_feature: MA Experiment 20001451 PARAMETER Experiment Name: At_Far-red-induction_P Parameter: Light Value: Far-red vs. White
  misc_feature: MA Experiment 20001451 PARAMETER Experiment Name: At_Far-red-induction_P Parameter: Organism Value: A. thaliana
  misc_feature: MA Experiment 20001451 PARAMETER Experiment Name: At_Far-red-induction_P Parameter: Plant Line Value: Columbia
  misc_feature: MA Experiment 20001451 PARAMETER Experiment Name: At_Far-red-induction_P Parameter: Timepoint (hr) Value: 24
  misc_feature: MA Experiment 20001451 PARAMETER Experiment Name: At_Far-red-induction_P Parameter: Tissue Value: Whole Plant
  misc_feature: MA Experiment ID: 20001457 Result: Down-regulated in Transcription
  misc_feature: MA Experiment 20001457 PARAMETER Experiment Name: At_50mM_NH4NO3_L-to-H_P Parameter: Age (day) Value: Undefined
  misc_feature: MA Experiment 20001457 PARAMETER Experiment Name: At_50mM_NH4NO3_L-to-H_P Parameter: Organism Value: Undefined
  misc_feature: MA Experiment 20001457 PARAMETER Experiment Name: At_50mM_NH4NO3_L-to-H_P Parameter: Plant Line Value: Undefined
  misc_feature: MA Experiment 20001457 PARAMETER Experiment Name: At_50mM_NH4NO3_L-to-H_P Parameter: Timepoint (hr) Value: 0.5
  misc_feature: MA Experiment 20001457 PARAMETER Experiment Name: At_50mM_NH4NO3_L-to-H_P Parameter: Tissue Value: Siliques
  misc_feature: MA Experiment 20001457 PARAMETER Experiment Name: At_50mM_NH4NO3_L-to-H_P Parameter: Treatment Value: 50mM NH4NO3 vs. 100mM Manitol
  misc_feature: MA Experiment ID: 20001557 Result: Up-regulated in Transcription
  misc_feature: MA Experiment 20001557 PARAMETER Experiment Name: At_Drought_Soil_Dry_P Parameter: Age (day) Value: 27
  misc_feature: MA Experiment 20001557 PARAMETER Experiment Name: At_Drought_Soil_Dry_P Parameter: Organism Value: A. thaliana
  misc_feature: MA Experiment 20001557 PARAMETER Experiment Name: At_Drought_Soil_Dry_P Parameter: Plant Line Value: WS
  misc_feature: MA Experiment 20001557 PARAMETER Experiment Name: At_Drought_Soil_Dry_P Parameter: Post Timepoint (hr) Value: 3
  misc_feature: MA Experiment 20001557 PARAMETER Experiment Name: At_Drought_Soil_Dry_P Parameter: Post-Treatment Value: Re-Water vs. No Drought
  misc_feature: MA Experiment 20001557 PARAMETER Experiment Name: At_Drought_Soil_Dry_P Parameter: Timepoint (day) Value: 13
  misc_feature: MA Experiment 20001557 PARAMETER Experiment Name: At_Drought_Soil_Dry_P Parameter: Treatment Value: Drought vs. No Drought
  misc_feature: MA Experiment ID: 20001559 Result: Down-regulated in Transcription
  misc_feature: MA Experiment 20001559 PARAMETER Experiment Name: At_Drought_Soil_Dry_P Parameter: Age (day) Value: 28
  misc_feature: MA Experiment 20001559 PARAMETER Experiment Name: At_Drought_Soil_Dry_P Parameter: Organism Value: A. thaliana
  misc_feature: MA Experiment 20001559 PARAMETER Experiment Name: At_Drought_Soil_Dry_P Parameter: Plant Line Value: WS
  misc_feature: MA Experiment 20001559 PARAMETER Experiment Name: At_Drought_Soil_Dry_P Parameter: Post Timepoint (hr) Value: 29
  misc_feature: MA Experiment 20001559 PARAMETER Experiment Name: At_Drought_Soil_Dry_P Parameter: Post-Treatment Value: Re-Water vs. No Drought
  misc_feature: MA Experiment 20001559 PARAMETER Experiment Name: At_Drought_Soil_Dry_P Parameter: Timepoint (day) Value: 14
  misc_feature: MA Experiment 20001559 PARAMETER Experiment Name: At_Drought_Soil_Dry_P Parameter: Treatment Value: Drought vs. No Drought
  misc_feature: MA Experiment ID: 20001560 Result: Up-regulated in Transcription
  misc_feature: MA Experiment 20001560 PARAMETER Experiment Name: At_Drought_Soil_Dry_P Parameter: Age (day) Value: 28
  misc_feature: MA Experiment 20001560 PARAMETER Experiment Name: At_Drought_Soil_Dry_P Parameter: Organism Value: A. thaliana
  misc_feature: MA Experiment 20001560 PARAMETER Experiment Name: At_Drought_Soil_Dry_P Parameter: Plant Line Value: WS
  misc_feature: MA Experiment 20001560 PARAMETER Experiment Name: At_Drought_Soil_Dry_P Parameter: Post Timepoint (hr) Value: None
  misc_feature: MA Experiment 20001560 PARAMETER Experiment Name: At_Drought_Soil_Dry_P Parameter: Post-Treatment Value: None
  misc_feature: MA Experiment 20001560 PARAMETER Experiment Name: At_Drought_Soil_Dry_P Parameter: Timepoint (day) Value: 14
  misc_feature: MA Experiment 20001560 PARAMETER Experiment Name: At_Drought_Soil_Dry_P Parameter: Treatment Value: Drought vs. No Drought
aaaaattcagaggaaaaaaaacacgatcgagaaatggagaataatccaagaagctcatcgtctctccctctagccgggcgtgtagctatagtgaccggagccaccagaggcatgggccgtgaaatcgcgattcacctccactctcttggtgcaagagtcaccatcaattatgtctcgagctcatcaaaagctgaactcttggtttcagaactaaacgactcatctcaattaaagtcagcgatcgcagttaaagcagatgtgtcagacccggaccagatcaacaacttgtttgatcaaacagaacaagagttcggatctaaagttcacatcgtcgtgaattgtgcaggtgttttggatccaaagtatccatctttatccgagacgacactagaagatttcgataacacattcacaataaacacaagagggtctttcttgtgttgcaaggaagcagctaaaagggttatgagaggaggtggtggaagaatcattatgatgtctacatcaatggttggtggtctcgccccgggttatggagtttacgcagcatcaaaggccgccgttgagacaatggtgaaagtgttggcgaaggagcttaagggaagccggataaccgcgaattgcgtggcgccagggccggttgcgacggagatgttttatgctggaaagagtgatgaaacggtgaaaatgcttgcaggggcttgtcctatggggaggatcggtgagtcaaaggatataaccgagattgtagggtttttggccggtgatggtggtgaatggattaacggtcaagttattagagccaatggaggctttgttgtctaataaatgaagaactaacaatggaatttgatgtcttcttcttcttttcgtgtgttgaactacttttatgtcaatgatgatgagttgttt

SEQ ID NO: 25824 - protein, 274 aa, Arabidopsis thaliana
  peptide (1)..(274): Ceres Seq. ID no. 12562056
  misc_feature (20)..(273): Homolog of NCBI NO: 34395019 NR Description: putative short-chain dehydrogenase/reductase
  misc_feature (18)..(272): Homolog of NCBI NO: 37534988 NR Description: putative short-chain alcohol dehydrogenase
  misc_feature (11)..(273): Homolog of NCBI NO: 1711355 NR Description: SHORT-CHAIN TYPE DEHYDROGENASE/REDUCTASE
  misc_feature (14)..(273): Homolog of NCBI NO: 34393370 NR Description: putative short-chain dehydrogenase/reductase
  misc_feature (18)..(271): Homolog of NCBI NO: 30679011 NR Description: short-chain type dehydrogenase/reductase -related
  misc_feature (19)..(271): Homolog of NCBI NO: 34395018 NR Description: putative short-chain dehydrogenase/reductase
  misc_feature (18)..(258): Homolog of NCBI NO: 30686710 NR Description: short-chain dehydrogenase/reductase family
  misc_feature (18)..(273): Homolog of NCBI NO: 9758903 NR Description: Brn1-like protein [Arabidopsis thaliana]
  misc_feature (18)..(273): Homolog of NCBI NO: 15229203 NR Description: putative short-chain type dehydrogenase/reductase
  misc_feature (12)..(274): Homolog of NCBI NO: 15235621 NR Description: short-chain alcohol dehydrogenase like protein
KNSEEKKHDREMENNPRSSSSLPLAGRVAIVTGATRGMGREIAIHLHSLGARVTINYVSSSSKAELLVSELNDSSQLKSAIAVKADVSDPDQINNLFDQTEQEFGSKVHIVVNCAGVLDPKYPSLSETTLEDFDNTFTINTRGSFLCCKEAAKRVMRGGGGRIIMMSTSMVGGLAPGYGVYAASKAAVETMVKVLAKELKGSRITANCVAPGPVATEMFYAGKSDETVKMLAGACPMGRIGESKDITEIVGFLAGDGGEWINGQVIRANGGFVV

SEQ ID NO: 25825 - protein, 263 aa, Arabidopsis thaliana
  peptide (1)..(263): Ceres Seq. ID no. 12562057
  misc_feature (9)..(262): Homolog of NCBI NO: 34395019 NR Description: putative short-chain dehydrogenase/reductase
  misc_feature (7)..(261): Homolog of NCBI NO: 37534988 NR Description: putative short-chain alcohol dehydrogenase
  misc_feature (1)..(262): Homolog of NCBI NO: 1711355 NR Description: SHORT-CHAIN TYPE DEHYDROGENASE/REDUCTASE
  misc_feature (3)..(262): Homolog of NCBI NO: 34393370 NR Description: putative short-chain dehydrogenase/reductase
  misc_feature (7)..(260): Homolog of NCBI NO: 30679011 NR Description: short-chain type dehydrogenase/reductase -related
  misc_feature (8)..(260): Homolog of NCBI NO: 34395018 NR Description: putative short-chain dehydrogenase/reductase
  misc_feature (7)..(247): Homolog of NCBI NO: 30686710 NR Description: short-chain dehydrogenase/reductase family
  misc_feature (7)..(262): Homolog of NCBI NO: 9758903 NR Description: Brn1-like protein [Arabidopsis thaliana]
  misc_feature (7)..(262): Homolog of NCBI NO: 15229203 NR Description: putative short-chain type dehydrogenase/reductase
  misc_feature (1)..(263): Homolog of NCBI NO: 15235621 NR Description: short-chain alcohol dehydrogenase like protein
MENNPRSSSSLPLAGRVAIVTGATRGMGREIAIHLHSLGARVTINYVSSSSKAELLVSELNDSSQLKSAIAVKADVSDPDQINNLFDQTEQEFGSKVHIVVNCAGVLDPKYPSLSETTLEDFDNTFTINTRGSFLCCKEAAKRVMRGGGGRIIMMSTSMVGGLAPGYGVYAASKAAVETMVKVLAKELKGSRITANCVAPGPVATEMFYAGKSDETVKMLAGACPMGRIGESKDITEIVGFLAGDGGEWINGQVIRANGGFVV

SEQ ID NO: 25826 - protein, 237 aa, Arabidopsis thaliana
  peptide (1)..(237): Ceres Seq. ID no. 12562058
  misc_feature (1)..(236): Homolog of NCBI NO: 34395019 NR Description: putative short-chain dehydrogenase/reductase
  misc_feature (1)..(235): Homolog of NCBI NO: 37534988 NR Description: putative short-chain alcohol dehydrogenase
  misc_feature (1)..(236): Homolog of NCBI NO: 1711355 NR Description: SHORT-CHAIN TYPE DEHYDROGENASE/REDUCTASE
  misc_feature (1)..(236): Homolog of NCBI NO: 34393370 NR Description: putative short-chain dehydrogenase/reductase
  misc_feature (1)..(234): Homolog of NCBI NO: 30679011 NR Description: short-chain type dehydrogenase/reductase -related
  misc_feature (1)..(234): Homolog of NCBI NO: 34395018 NR Description: putative short-chain dehydrogenase/reductase
  misc_feature (1)..(221): Homolog of NCBI NO: 30686710 NR Description: short-chain dehydrogenase/reductase family
  misc_feature (1)..(236): Homolog of NCBI NO: 9758903 NR Description: Brn1-like protein [Arabidopsis thaliana]
  misc_feature (1)..(236): Homolog of NCBI NO: 15229203 NR Description: putative short-chain type dehydrogenase/reductase
  misc_feature (1)..(237): Homolog of NCBI NO: 15235621 NR Description: short-chain alcohol dehydrogenase like protein
MGREIAIHLHSLGARVTINYVSSSSKAELLVSELNDSSQLKSAIAVKADVSDPDQINNLFDQTEQEFGSKVHIVVNCAGVLDPKYPSLSETTLEDFDNTFTINTRGSFLCCKEAAKRVMRGGGGRIIMMSTSMVGGLAPGYGVYAASKAAVETMVKVLAKELKGSRITANCVAPGPVATEMFYAGKSDETVKMLAGACPMGRIGESKDITEIVGFLAGDGGEWINGQVIRANGGFVV

SEQ ID NO: 25827 - DNA, 1279 bp, Arabidopsis thaliana
  misc_feature (1)..(1279): Ceres Seq. ID no. 12421731
  misc_feature: MA Experiment ID: 108434 Result: Down-regulated in Transcription
  misc_feature: MA Experiment 108434 PARAMETER Experiment Name: At_Root_Tips_cDNA_P Parameter: Tissue Value: Root Tips
  misc_feature: MA Experiment ID: 108569 Result: Up-regulated in Transcription
  misc_feature: MA Experiment 108569 PARAMETER Experiment Name: At_0.001%_MeJA__cDNA_P Parameter: Timepoint (hr) Value: 6
  misc_feature: MA Experiment 108569 PARAMETER Experiment Name: At_0.001%_MeJA__cDNA_P Parameter: Tissue Value: Aerial
  misc_feature: MA Experiment 108569 PARAMETER Experiment Name: At_0.001%_MeJA__cDNA_P Parameter: Treatment Value: 0.001% MeJA vs. No Treatment
  misc_feature: MA Experiment ID: 108573 Result: Up-regulated in Transcription
  misc_feature: MA Experiment 108573 PARAMETER Experiment Name: At_Drought_cDNA_P Parameter: Timepoint (hr) Value: 6
  misc_feature: MA Experiment 108573 PARAMETER Experiment Name: At_Drought_cDNA_P Parameter: Tissue Value: Aerial
  misc_feature: MA Experiment 108573 PARAMETER Experiment Name: At_Drought_cDNA_P Parameter: Treatment Value: Drought vs. No Drought
  misc_feature: MA Experiment ID: 108577 Result: Up-regulated in Transcription
  misc_feature: MA Experiment 108577 PARAMETER Experiment Name: At_42deg_Heat_cDNA_P Parameter: Temperature (deg C) Value: 42 vs. 22
  misc_feature: MA Experiment 108577 PARAMETER Experiment Name: At_42deg_Heat_cDNA_P Parameter: Timepoint (hr) Value: 6
  misc_feature: MA Experiment 108577 PARAMETER Experiment Name: At_42deg_Heat_cDNA_P Parameter: Tissue Value: Aerial
  misc_feature: MA Experiment ID: 20000111 Result: Up-regulated in Transcription
  misc_feature: MA Experiment 20000111 PARAMETER Experiment Name: At_42deg_Heat_cDNA_P Parameter: Temperature (deg C) Value: 42 vs. 22
  misc_feature: MA Experiment 20000111 PARAMETER Experiment Name: At_42deg_Heat_cDNA_P Parameter: Timepoint (hr) Value: 6
  misc_feature: MA Experiment 20000111 PARAMETER Experiment Name: At_42deg_Heat_cDNA_P Parameter: Tissue Value: Aerial
  misc_feature: MA Experiment ID: 20000112 Result: Up-regulated in Transcription
  misc_feature: MA Experiment 20000112 PARAMETER Experiment Name: At_42deg_Heat_cDNA_P Parameter: Temperature (deg C) Value: 42 vs. 22
  misc_feature: MA Experiment 20000112 PARAMETER Experiment Name: At_42deg_Heat_cDNA_P Parameter: Timepoint (hr) Value: 2
  misc_feature: MA Experiment 20000112 PARAMETER Experiment Name: At_42deg_Heat_cDNA_P Parameter: Tissue Value: Aerial
  misc_feature: MA Experiment ID: 20000113 Result: Up-regulated in Transcription
  misc_feature: MA Experiment 20000113 PARAMETER Experiment Name: At_42deg_Heat_cDNA_P Parameter: Temperature (deg C) Value: 42 vs. 22
  misc_feature: MA Experiment 20000113 PARAMETER Experiment Name: At_42deg_Heat_cDNA_P Parameter: Timepoint (hr) Value: 8
  misc_feature: MA Experiment 20000113 PARAMETER Experiment Name: At_42deg_Heat_cDNA_P Parameter: Tissue Value: Aerial
  misc_feature: MA Experiment ID: 20000173 Result: Up-regulated in Transcription
  misc_feature: MA Experiment 20000173 PARAMETER Experiment Name: At_42deg_Heat_P Parameter: Age (day) Value: 14
  misc_feature: MA Experiment 20000173 PARAMETER Experiment Name: At_42deg_Heat_P Parameter: Organism Value: A. thaliana
  misc_feature: MA Experiment 20000173 PARAMETER Experiment Name: At_42deg_Heat_P Parameter: Plant Line Value: WS
  misc_feature: MA Experiment 20000173 PARAMETER Experiment Name: At_42deg_Heat_P Parameter: Temperature (deg C) Value: 42 vs. 22
  misc_feature: MA Experiment 20000173 PARAMETER Experiment Name: At_42deg_Heat_P Parameter: Timepoint (hr) Value: 6
  misc_feature: MA Experiment 20000173 PARAMETER Experiment Name: At_42deg_Heat_P Parameter: Tissue Value: Aerial
  misc_feature: MA Experiment ID: 20000527 Result: Down-regulated in Transcription
  misc_feature: MA Experiment 20000527 PARAMETER Experiment Name: At_10percent_PEG_P Parameter: Age (day) Value: 20
  misc_feature: MA Experiment 20000527 PARAMETER Experiment Name: At_10percent_PEG_P Parameter: Organism Value: A. thaliana
  misc_feature: MA Experiment 20000527 PARAMETER Experiment Name: At_10percent_PEG_P Parameter: Plant Line Value: WS
  misc_feature: MA Experiment 20000527 PARAMETER Experiment Name: At_10percent_PEG_P Parameter: Timepoint (day) Value: 20
  misc_feature: MA Experiment 20000527 PARAMETER Experiment Name: At_10percent_PEG_P Parameter: Tissue Value: Whole Plant
  misc_feature: MA Experiment 20000527 PARAMETER Experiment Name: At_10percent_PEG_P Parameter: Treatment Value: 10percent PEG vs. No Treatment
  misc_feature: MA Experiment ID: 20001905 Result: Up-regulated in Transcription
  misc_feature: MA Experiment 20001905 PARAMETER Experiment Name: At_Drought_Reproduction_P Parameter: Age (day) Value: 40
  misc_feature: MA Experiment 20001905 PARAMETER Experiment Name: At_Drought_Reproduction_P Parameter: Organism Value: A. thaliana
  misc_feature: MA Experiment 20001905 PARAMETER Experiment Name: At_Drought_Reproduction_P Parameter: Plant Line Value: WS
  misc_feature: MA Experiment 20001905 PARAMETER Experiment Name: At_Drought_Reproduction_P Parameter: Timepoint (day) Value: 10
  misc_feature: MA Experiment 20001905 PARAMETER Experiment Name: At_Drought_Reproduction_P Parameter: Tissue Value: Rosettes
  misc_feature: MA Experiment 20001905 PARAMETER Experiment Name: At_Drought_Reproduction_P Parameter: Treatment Value: Drought vs. No Drought
aacgttttatcaaaagtctaagctactctgcaaattcacttgccggcgaaaattctcaggattatttgctcagctaaaaaatgggatcaagagtgtccctttgctgccgaaagcataatccagaaatgccctttcctgagaaacatcaacaagcctaccaatttgtccttctcctccttgagttttccaattccggtgcaaggaggtaaaggtcctattttgtgtgaagatggtcctggatttgattcagcattcaagctcttccatgggaaagatggtattgtgccgctttctggtttcgctgatgattctgaagatgaggcgggtcgtcgtgctcctctgcaattcaatccacttgctggtaaggtagctacaataagcctatcagcttttggtcctggaggcccttttggttttggtcctttctcagagaaatggaagaagcaacagaagaaacctaaaccttcgaaaaaccaacagtctggggactcttcgaaacatgaggcagttggagacgaatggttaaaaaccgggaattgtcctatcgccaagtcttttagagctgcaagcaaagtcatgcctcttatttctaaagcattaacgctaccatctggtatgaaatatagatgtccagctcctatagtagctgcaagagctgcactttcgaagactgctttggtaaaaggccttcgccctcagcctttacctgaaaagatgcttgcaatcgctctcatgggaatggctgcaaatgtgcctctaggtgtatggagagaacacacaaagaagttttcgccttcatggtttttggcagtccatgctgctgtgccttttatagcaatgcttaggaaatctgtgctgatgcccaaaacagccatggctttgaccattggagcttcgatcttgggacaggtgattgggtcaagagctgagcgttaccgtctcaaagcagtagctgagaaaatggttcctgaaaccgctatggtttctggatacaaccagagccctggcgactcaggcatttctgggggacactgtggtataggggaggaagtgaagcaggtttattacaatgtaaatgttggagagtctgttaaatcaactggactctgttattgagagaatgttcttattgatttcaaaaactacaaattactatgtaaggattggatatttgtgtgtgagggaaggtttttgtaattcagtgaattgtgtaaaccataacaatggtgtcgttttatcccttcaaaatgggtctaaataaaaggttaataattccctc

SEQ ID NO: 25828 - protein, 179 aa, Arabidopsis thaliana
  peptide (1)..(179): Ceres Seq. ID no. 12421732
  misc_feature (1)..(147): Homolog of NCBI NO: 33146734 NR Description: unknown protein [Oryza sativa (japonica
  misc_feature (1)..(127): Homolog of NCBI NO: 37537220 NR Description: unknown protein [Oryza sativa (japonica
  misc_feature (1)..(179): Homolog of NCBI NO: 34897958 NR Description: contains ESTs AU068434(C30250)~similar to Oryza sativa chromosome 7,
  misc_feature (1)..(154): Homolog of NCBI NO: 15234866 NR Description: putative protein
  misc_feature (1)..(179): Homolog of NCBI NO: 21954084 NR Description: unknown protein [Arabidopsis thaliana]
  misc_feature (1)..(179): Homolog of NCBI NO: 30694759 NR Description: expressed protein [Arabidopsis thaliana]
  misc_feature (1)..(179): Homolog of NCBI NO: 21595083 NR Description: unknown [Arabidopsis thaliana]
MPLISKALTLPSGMKYRCPAPIVAARAALSKTALVKGLRPQPLPEKMLAIALMGMAANVPLGVWREHTKKFSPSWFLAVHAAVPFIAMLRKSVLMPKTAMALTIGASILGQVIGSRAERYRLKAVAEKMVPETAMVSGYNQSPGDSGISGGHCGIGEEVKQVYYNVNVGESVKSTGLCY

SEQ ID NO: 25829 - protein, 166 aa, Arabidopsis thaliana
  peptide (1)..(166): Ceres Seq. ID no. 12421733
  misc_feature (1)..(134): Homolog of NCBI NO: 33146734 NR Description: unknown protein [Oryza sativa (japonica
  misc_feature (1)..(114): Homolog of NCBI NO: 37537220 NR Description: unknown protein [Oryza sativa (japonica
  misc_feature (1)..(166): Homolog of NCBI NO: 34897958 NR Description: contains ESTs AU068434(C30250)~similar to Oryza sativa chromosome 7,
  misc_feature (1)..(141): Homolog of NCBI NO: 15234866 NR Description: putative protein
  misc_feature (1)..(166): Homolog of NCBI NO: 21954084 NR Description: unknown protein [Arabidopsis thaliana]
  misc_feature (1)..(166): Homolog of NCBI NO: 30694759 NR Description: expressed protein [Arabidopsis thaliana]
  misc_feature (1)..(166): Homolog of NCBI NO: 21595083 NR Description: unknown [Arabidopsis thaliana]
MKYRCPAPIVAARAALSKTALVKGLRPQPLPEKMLAIALMGMAANVPLGVWREHTKKFSPSWFLAVHAAVPFIAMLRKSVLMPKTAMALTIGASILGQVIGSRAERYRLKAVAEKMVPETAMVSGYNQSPGDSGISGGHCGIGEEVKQVYYNVNVGESVKSTGLCY

SEQ ID NO: 25830 - protein, 133 aa, Arabidopsis thaliana
  peptide (1)..(133): Ceres Seq. ID no. 12421734
  misc_feature (1)..(101): Homolog of NCBI NO: 33146734 NR Description: unknown protein [Oryza sativa (japonica
  misc_feature (1)..(81): Homolog of NCBI NO: 37537220 NR Description: unknown protein [Oryza sativa (japonica
  misc_feature (1)..(133): Homolog of NCBI NO: 34897958 NR Description: contains ESTs AU068434(C30250)~similar to Oryza sativa chromosome 7,
  misc_feature (1)..(108): Homolog of NCBI NO: 15234866 NR Description: putative protein
  misc_feature (1)..(133): Homolog of NCBI NO: 21954084 NR Description: unknown protein [Arabidopsis thaliana]
  misc_feature (1)..(133): Homolog of NCBI NO: 30694759 NR Description: expressed protein [Arabidopsis thaliana]
  misc_feature (1)..(133): Homolog of NCBI NO: 21595083 NR Description: unknown [Arabidopsis thaliana]
MLAIALMGMAANVPLGVWREHTKKFSPSWFLAVHAAVPFIAMLRKSVLMPKTAMALTIGASILGQVIGSRAERYRLKAVAEKMVPETAMVSGYNQSPGDSGISGGHCGIGEEVKQVYYNVNVGESVKSTGLCY

SEQ ID NO: 25831 - DNA, 834 bp, Arabidopsis thaliana
  misc_feature (1)..(834): Ceres Seq. ID no. 12394977
  misc_feature: MA Experiment ID: 108434 Result: Down-regulated in Transcription
  misc_feature: MA Experiment 108434 PARAMETER Experiment Name: At_Root_Tips_cDNA_P Parameter: Tissue Value: Root Tips
  misc_feature: MA Experiment ID: 108462 Result: Down-regulated in Transcription
  misc_feature: MA Experiment 108462 PARAMETER Experiment Name: At_Germinating_Seeds_cDNA_P Parameter: Age (day) Value: 2 vs. 0
  misc_feature: MA Experiment 108462 PARAMETER Experiment Name: At_Germinating_Seeds_cDNA_P Parameter: Tissue Value: Germinating Seeds
  misc_feature: MA Experiment ID: 108463 Result: Down-regulated in Transcription
  misc_feature: MA Experiment 108463 PARAMETER Experiment Name: At_Germinating_Seeds_cDNA_P Parameter: Age (day) Value: 3 vs. 0
  misc_feature: MA Experiment 108463 PARAMETER Experiment Name: At_Germinating_Seeds_cDNA_P Parameter: Tissue Value: Germinating Seeds
  misc_feature: MA Experiment ID: 108501 Result: Up-regulated in Transcription
  misc_feature: MA Experiment 108501 PARAMETER Experiment Name: At_ap2_floral_buds_cDNA_P Parameter: Plant Line Value: ap2 (Ler.)
  misc_feature: MA Experiment 108501 PARAMETER Experiment Name: At_ap2_floral_buds_cDNA_P Parameter: Tissue Value: Closed Flower
  misc_feature: MA Experiment ID: 20000179 Result: Up-regulated in Transcription
  misc_feature: MA Experiment 20000179 PARAMETER Experiment Name: At_Germinating_Seeds_P Parameter: Age (hr) Value: 6 vs. 0
  misc_feature: MA Experiment 20000179 PARAMETER Experiment Name: At_Germinating_Seeds_P Parameter: Tissue Value: Germinating Seeds
  misc_feature: MA Experiment ID: 20000184 Result: Down-regulated in Transcription
  misc_feature: MA Experiment 20000184 PARAMETER Experiment Name: At_Shoots__P Parameter: Age (day) Value: 7
  misc_feature: MA Experiment 20000184 PARAMETER Experiment Name: At_Shoots__P Parameter: Tissue Value: Shoots vs. Whole Plant
  misc_feature: MA Experiment ID: 20000227 Result: Down-regulated in Transcription
  misc_feature: MA Experiment 20000227 PARAMETER Experiment Name: At_Root-Tips-vs-Tops_P Parameter: Tissue Value: Root Tips vs. Root Tops
  misc_feature: MA Experiment ID: 20000234 Result: Up-regulated in Transcription
  misc_feature: MA Experiment 20000234 PARAMETER Experiment Name: At_Siliques_P Parameter: Age (day) Value: 21
  misc_feature: MA Experiment 20000234 PARAMETER Experiment Name: At_Siliques_P Parameter: Organism Value: A. thaliana
  misc_feature: MA Experiment 20000234 PARAMETER Experiment Name: At_Siliques_P Parameter: Plant Line Value: WS
  misc_feature: MA Experiment 20000234 PARAMETER Experiment Name: At_Siliques_P Parameter: Tissue Value: Less Than 5mm Siliques vs. Whole Plant
  misc_feature: MA Experiment ID: 20000235 Result: Up-regulated in Transcription
  misc_feature: MA Experiment 20000235 PARAMETER Experiment Name: At_Siliques_P Parameter: Age (day) Value: 21
  misc_feature: MA Experiment 20000235 PARAMETER Experiment Name: At_Siliques_P Parameter: Organism Value: A. thaliana
  misc_feature: MA Experiment 20000235 PARAMETER Experiment Name: At_Siliques_P Parameter: Plant Line Value: WS
  misc_feature: MA Experiment 20000235 PARAMETER Experiment Name: At_Siliques_P Parameter: Tissue Value: 5-10mm Siliques vs. Whole Plant
  misc_feature: MA Experiment ID: 20000264 Result: Up-regulated in Transcription
  misc_feature: MA Experiment 20000264 PARAMETER Experiment Name: At_Open_Flower_P Parameter: Age (day) Value: 21
  misc_feature: MA Experiment 20000264 PARAMETER Experiment Name: At_Open_Flower_P Parameter: Plant Line Value: WS
  misc_feature: MA Experiment 20000264 PARAMETER Experiment Name: At_Open_Flower_P Parameter: Tissue Value: Open Flower vs. Whole Plant
  misc_feature: MA Experiment ID: 20000286 Result: Up-regulated in Transcription
  misc_feature: MA Experiment 20000286 PARAMETER Experiment Name: At_Open_Flower_P Parameter: Age (day) Value: 21
  misc_feature: MA Experiment 20000286 PARAMETER Experiment Name: At_Open_Flower_P Parameter: Plant Line Value: WS
  misc_feature: MA Experiment 20000286 PARAMETER Experiment Name: At_Open_Flower_P Parameter: Tissue Value: Half Open vs. Whole Plant
  misc_feature: MA Experiment ID: 20000438 Result: Down-regulated in Transcription
  misc_feature: MA Experiment 20000438 PARAMETER Experiment Name: At_Shoots__P Parameter: Age (day) Value: 14
  misc_feature: MA Experiment 20000438 PARAMETER Experiment Name: At_Shoots__P Parameter: Tissue Value: Shoots vs. Whole Plant
  misc_feature: MA Experiment ID: 20000495 Result: Up-regulated in Transcription
  misc_feature: MA Experiment 20000495 PARAMETER Experiment Name: At_Guard_Cells_P Parameter: Harvest Date Value: 8/2/2002
  misc_feature: MA Experiment 20000495 PARAMETER Experiment Name: At_Guard_Cells_P Parameter: Organism Value: A. thaliana
  misc_feature: MA Experiment 20000495 PARAMETER Experiment Name: At_Guard_Cells_P Parameter: Tissue Value: Guard Cells vs. Leaves
  misc_feature: MA Experiment ID: 20000794 Result: Up-regulated in Transcription
  misc_feature: MA Experiment 20000794 PARAMETER Experiment Name: At_Petals_P Parameter: Age (day) Value: 23-25 days
  misc_feature: MA Experiment 20000794 PARAMETER Experiment Name: At_Petals_P Parameter: Plant Line Value: WS
  misc_feature: MA Experiment 20000794 PARAMETER Experiment Name: At_Petals_P Parameter: Tissue Value: Petals vs. Whole plant
  misc_feature: MA Experiment ID: 20001555 Result: Up-regulated in Transcription
  misc_feature: MA Experiment 20001555 PARAMETER Experiment Name: At_Drought_Soil_Dry_P Parameter: Age (day) Value: 24
  misc_feature: MA Experiment 20001555 PARAMETER Experiment Name: At_Drought_Soil_Dry_P Parameter: Organism Value: A. thaliana
  misc_feature: MA Experiment 20001555 PARAMETER Experiment Name: At_Drought_Soil_Dry_P Parameter: Plant Line Value: WS
  misc_feature: MA Experiment 20001555 PARAMETER Experiment Name: At_Drought_Soil_Dry_P Parameter: Post Timepoint (hr) Value: None
  misc_feature: MA Experiment 20001555 PARAMETER Experiment Name: At_Drought_Soil_Dry_P Parameter: Post-Treatment Value: None
  misc_feature: MA Experiment 20001555 PARAMETER Experiment Name: At_Drought_Soil_Dry_P Parameter: Timepoint (day) Value: 10
  misc_feature: MA Experiment 20001555 PARAMETER Experiment Name: At_Drought_Soil_Dry_P Parameter: Treatment Value: Drought vs. No Drought
attaaaaagctaatatggctactagggaagagagagataagtatagatcagtccttgaagatgcaggacaggttcaatggaggtatgataaccctccagacttcaatagtgtgaaccagctctttgaagaaggccagactaaggtgtggccagaaggttcgttagaagagacagtgcaaaacgcgatcaagtcatgggagatggagttctcacataagatccgtttacaggacttcaagactataaaccctgagaagtttaagctctttgtcaatgggagagaaggtttatcagctgaagagacgcttaggcttgggagttacaatgctttgctcaagaactctttgcctgaagagtttcagtactataagcccgaggaagagagctttgagtcatcacatgacgcctttagatctgctttaccacgcgggtttgcgtgggaaatactctctgtgtactcggggccgcctgttatagccttcaaatttagacactggggatactttgaaggaactttcaaaggtcatgctcctactggggaaatggttcaattcctgggtctaggagttctaaaggttgacgaatcacttagagcagaggagattgagatttactatgatccaggagagctgttcgggggactactcaagggacctcctatatcagagaccaaaaccacagacagtggagacaacactgcagagaaacaaagctgcccattcacacactaagataataagaaaagcagaagtgtatttgaccctttaaagaatatattgtaacagtctcttggttattgatgcatggaataaattataagttatgttaggcgcc

SEQ ID NO: 25832 - protein, 238 aa, Arabidopsis thaliana
  peptide (1)..(238): Ceres Seq. ID no. 12394978
  misc_feature (5)..(220): Homolog of NCBI NO: 23040182 NR Description: hypothetical protein [Trichodesmium erythraeum
  misc_feature (5)..(238): Homolog of NCBI NO: 23129762 NR Description: hypothetical protein [Nostoc punctiforme]
  misc_feature (1)..(217): Homolog of NCBI NO: 1346809 NR Description: Pathogen-related protein
  misc_feature (8)..(219): Homolog of NCBI NO: 34904652 NR Description: putative pathogenesis related protein
  misc_feature (7)..(225): Homolog of NCBI NO: 34904656 NR Description: putative pathogenesis related protein
  misc_feature (8)..(214): Homolog of NCBI NO: 34910862 NR Description: putative pathogenesis related protein
  misc_feature (8)..(231): Homolog of NCBI NO: 34910864 NR Description: putative pathogenesis related protein
  misc_feature (63)..(238): Homolog of NCBI NO: 30699354 NR Description: expressed protein [Arabidopsis thaliana]
  misc_feature (15)..(238): Homolog of NCBI NO: 25372796 NR Description: hypothetical protein F9K20.18 [imported] -
  misc_feature (1)..(238): Homolog of NCBI NO: 18412106 NR Description: expressed protein
MATREERDKYRSVLEDAGQVQWRYDNPPDFNSVNQLFEEGQTKVWPEGSLEETVQNAIKSWEMEFSHKIRLQDFKTINPEKFKLFVNGREGLSAEETLRLGSYNALLKNSLPEEFQYYKPEEESFESSHDAFRSALPRGFAWEILSVYSGPPVIAFKFRHWGYFEGTFKGHAPTGEMVQFLGLGVLKVDESLRAEEIEIYYDPGELFGGLLKGPPISETKTTDSGDNTAEKQSCPFTH

SEQ ID NO: 25833 - protein, 176 aa, Arabidopsis thaliana
  peptide (1)..(176): Ceres Seq. ID no. 12394979
  misc_feature (1)..(158): Homolog of NCBI NO: 23040182 NR Description: hypothetical protein [Trichodesmium erythraeum
  misc_feature (1)..(176): Homolog of NCBI NO: 23129762 NR Description: hypothetical protein [Nostoc punctiforme]
  misc_feature (1)..(155): Homolog of NCBI NO: 1346809 NR Description: Pathogen-related protein
  misc_feature (1)..(157): Homolog of NCBI NO: 34904652 NR Description: putative pathogenesis related protein
  misc_feature (1)..(163): Homolog of NCBI NO: 34904656 NR Description: putative pathogenesis related protein
  misc_feature (1)..(152): Homolog of NCBI NO: 34910862 NR Description: putative pathogenesis related protein
  misc_feature (1)..(169): Homolog of NCBI NO: 34910864 NR Description: putative pathogenesis related protein
  misc_feature (1)..(176): Homolog of NCBI NO: 30699354 NR Description: expressed protein [Arabidopsis thaliana]
  misc_feature (1)..(176): Homolog of NCBI NO: 25372796 NR Description: hypothetical protein F9K20.18 [imported] -
  misc_feature (1)..(176): Homolog of NCBI NO: 18412106 NR Description: expressed protein
MEFSHKIRLQDFKTINPEKFKLFVNGREGLSAEETLRLGSYNALLKNSLPEEFQYYKPEEESFESSHDAFRSALPRGFAWEILSVYSGPPVIAFKFRHWGYFEGTFKGHAPTGEMVQFLGLGVLKVDESLRAEEIEIYYDPGELFGGLLKGPPISETKTTDSGDNTAEKQSCPFTH

SEQ ID NO: 25834 - DNA, 1742 bp, Arabidopsis thaliana
  misc_feature (1)..(1742): Ceres Seq. ID no. 12371553
  misc_feature: MA Experiment ID: 108462 Result: Down-regulated in Transcription
  misc_feature: MA Experiment 108462 PARAMETER Experiment Name: At_Germinating_Seeds_cDNA_P Parameter: Age (day) Value: 2 vs. 0
  misc_feature: MA Experiment 108462 PARAMETER Experiment Name: At_Germinating_Seeds_cDNA_P Parameter: Tissue Value: Germinating Seeds
  misc_feature: MA Experiment ID: 108473 Result: Down-regulated in Transcription
  misc_feature: MA Experiment 108473 PARAMETER Experiment Name: At_Drought_Flowers_cDNA_P Parameter: Timepoint (hr) Value: 7 d
  misc_feature: MA Experiment 108473 PARAMETER Experiment Name: At_Drought_Flowers_cDNA_P Parameter: Tissue Value: Flower
  misc_feature: MA Experiment 108473 PARAMETER Experiment Name: At_Drought_Flowers_cDNA_P Parameter: Treatment Value: Drought vs. No Drought
  misc_feature: MA Experiment ID: 108474 Result: Up-regulated in Transcription
  misc_feature: MA Experiment 108474 PARAMETER Experiment Name: At_Drought_Flowers_cDNA_P Parameter: Timepoint (hr) Value: null
  misc_feature: MA Experiment 108474 PARAMETER Experiment Name: At_Drought_Flowers_cDNA_P Parameter: Treatment Value: Drought vs. No Drought
  misc_feature: MA Experiment ID: 108501 Result: Down-regulated in Transcription
  misc_feature: MA Experiment 108501 PARAMETER Experiment Name: At_ap2_floral_buds_cDNA_P Parameter: Plant Line Value: ap2 (Ler.)
  misc_feature: MA Experiment 108501 PARAMETER Experiment Name: At_ap2_floral_buds_cDNA_P Parameter: Tissue Value: Closed Flower
  misc_feature: MA Experiment ID: 20000234 Result: Down-regulated in Transcription
  misc_feature: MA Experiment 20000234 PARAMETER Experiment Name: At_Siliques_P Parameter: Age (day) Value: 21
  misc_feature: MA Experiment 20000234 PARAMETER Experiment Name: At_Siliques_P Parameter: Organism Value: A. thaliana
  misc_feature: MA Experiment 20000234 PARAMETER Experiment Name: At_Siliques_P Parameter: Plant Line Value: WS
  misc_feature: MA Experiment 20000234 PARAMETER Experiment Name: At_Siliques_P Parameter: Tissue Value: Less Than 5mm Siliques vs. Whole Plant
  misc_feature: MA Experiment ID: 20000265 Result: Up-regulated in Transcription
  misc_feature: MA Experiment 20000265 PARAMETER Experiment Name: At_Open_Flower_P Parameter: Age (day) Value: 21
  misc_feature: MA Experiment 20000265 PARAMETER Experiment Name: At_Open_Flower_P Parameter: Plant Line Value: WS
  misc_feature: MA Experiment 20000265 PARAMETER Experiment Name: At_Open_Flower_P Parameter: Tissue Value: Closed Flower vs. Whole Plant
  misc_feature: MA Experiment ID: 20000286 Result: Up-regulated in Transcription
  misc_feature: MA Experiment 20000286 PARAMETER Experiment Name: At_Open_Flower_P Parameter: Age (day) Value: 21
  misc_feature: MA Experiment 20000286 PARAMETER Experiment Name: At_Open_Flower_P Parameter: Plant Line Value: WS
  misc_feature: MA Experiment 20000286 PARAMETER Experiment Name: At_Open_Flower_P Parameter: Tissue Value: Half Open vs. Whole Plant
  misc_feature: MA Experiment ID: 20001451 Result: Up-regulated in Transcription
  misc_feature: MA Experiment 20001451 PARAMETER Experiment Name: At_Far-red-induction_P Parameter: Age (day) Value: 7
  misc_feature: MA Experiment 20001451 PARAMETER Experiment Name: At_Far-red-induction_P Parameter: Light Value: Far-red vs. White
  misc_feature: MA Experiment 20001451 PARAMETER Experiment Name: At_Far-red-induction_P Parameter: Organism Value: A. thaliana
  misc_feature: MA Experiment 20001451 PARAMETER Experiment Name: At_Far-red-induction_P Parameter: Plant Line Value: Columbia
  misc_feature: MA Experiment 20001451 PARAMETER Experiment Name: At_Far-red-induction_P Parameter: Timepoint (hr) Value: 24
  misc_feature: MA Experiment 20001451 PARAMETER Experiment Name: At_Far-red-induction_P Parameter: Tissue Value: Whole Plant
  misc_feature: MA Experiment ID: 20001910 Result: Down-regulated in Transcription
  misc_feature: MA Experiment 20001910 PARAMETER Experiment Name: At_Drought_Reproduction_P Parameter: Age (day) Value: 37
  misc_feature: MA Experiment 20001910 PARAMETER Experiment Name: At_Drought_Reproduction_P Parameter: Organism Value: A. thaliana
  misc_feature: MA Experiment 20001910 PARAMETER Experiment Name: At_Drought_Reproduction_P Parameter: Plant Line Value: WS
  misc_feature: MA Experiment 20001910 PARAMETER Experiment Name: At_Drought_Reproduction_P Parameter: Timepoint (day) Value: 7
  misc_feature: MA Experiment 20001910 PARAMETER Experiment Name: At_Drought_Reproduction_P Parameter: Tissue Value: Flowers
  misc_feature: MA Experiment 20001910 PARAMETER Experiment Name: At_Drought_Reproduction_P Parameter: Treatment Value: Drought vs. No Drought
aatgtacatcaaacttacatcattaactgttgtttcacatcgtcgaagcaaaaatgattatatatctaatttcattactccctatcatcgtcgccaccctcatgctttatcaacgatggtggagatccaacataccgccgggaccaaaaccaaagtttctgcttggaaaccttcatcaaatgaaaccactttggacgcattctttctcggagtggtcagagacttatggtcctatcatatcggtgtggatagggtcacagctcactgtcgtggtctcgagctctgatctagccagacaagtgttgagagacaaagaccatcagttgtctaaccgacacaggatcgcaaggatgactcagaccggtactgatcttgtttggtccgattacagtccacattatgtgaaactgaggaaactctgtacactcgagctcttctctctgaaaagcatcgaaaatttcaggtccttgagagagatggaagcaagatcgatggttgtgtcgattctgaaggacttaatgagcaattcaggggatgatcaggagcgaaaaccggtgattgtgaggaagtacctagctgcggttgttttgaataccatctcaaggttaatgatagggaaagagttcgggtctgaggaaggaaaagagtttaaagccatcgttgagaaagaacatcttctcagtgactcagggacgattcttgatcacgtctggtggctcaaatgggtttcttcttggttctttagtgataaggaattcttagcgcacaaggatcggagaacaaagtggtttagaggagctattatggtggaagaagatatagaaatagaggatcacaggggatttgttcggaaattgttggtgttaaaagagcagaaagagctgagcgaagagacggttgggggactagtctggaacatgttaaccgcgggtgctgacacaactgcagttgttatcgaatgggctatggcagagatgatcaaatgcccgaccgtgcaagaaaaggcgcaacaggagcttgattctgtggttggatccgaaaggttaatgactgaatcagatatccccatactgccatatctgcaatgtgtggttaaagaagctctccggcttcacccgtcaacaccattaatgcttccacacaaagcaagtgaaactgtttgggtaggtgggtacaaggttcctaagggagccacagtttatgtcaatgtgcaggcgattgggcgggaccctgcaaactggataaacccatatgagttcagaccagagcggttccttcaggaagaaaccgatgttaaaggtcgagactttagggttcttccatttggatcaggaagaaggatgtgtccagcggcacagctcagcatgaacttgatgacattggtgatgggaaatttgttgcattgcttctcatggagttcccctgttcctggagagaggattgacatgagcgagaatcctggattgctttgtaacatgaggactccattgcaggctctagctttgccgagagctgccgcaagagcaatacctttacctttagattaaaatagataaacaatcagacacataagataagataatcaaaatccatataccatgaagactctcataatggacacgaagatgtagctatgtaaaacccaagaggcattgcaagatttgagacatggttgagtatagtttcatacaataacatgtagctattatatatggaaataaaagagtcaatatttacatggc

SEQ ID NO: 25835 - protein, 497 aa, Arabidopsis thaliana
  peptide (1)..(497): Ceres Seq. ID no. 12371554
  misc_feature (3)..(486): Homolog of NCBI NO: 22651519 NR Description: p-coumaroyl shikimate 3'-hydroxylase isoform 1
  misc_feature (4)..(486): Homolog of NCBI NO: 30688445 NR Description: cytochrome P450 98A3 [Arabidopsis thaliana]
  misc_feature (2)..(486): Homolog of NCBI NO: 22651521 NR Description: p-coumaroyl shikimate 3'-hydroxylase isoform 2
  misc_feature (1)..(486): Homolog of NCBI NO: 15221296 NR Description: cytochrome p450 monooxygenase, putative
  misc_feature (1)..(497): Homolog of NCBI NO: 15221294 NR Description: cytochrome p450 monooxygenase, putative
  misc_feature (1)..(497): Homolog of NCBI NO: 21595281 NR Description: putative cytochrome P450 [Arabidopsis thaliana]
MIIYLISLLPIIVATLMLYQRWWRSNIPPGPKPKFLLGNLHQMKPLWTHSFSEWSETYGPIISVWIGSQLTVVVSSSDLARQVLRDKDHQLSNRHRIARMTQTGTDLVWSDYSPHYVKLRKLCTLELFSLKSIENFRSLREMEARSMVVSILKDLMSNSGDDQERKPVIVRKYLAAVVLNTISRLMIGKEFGSEEGKEFKAIVEKEHLLSDSGTILDHVWWLKWVSSWFFSDKEFLAHKDRRTKWFRGAIMVEEDIEIEDHRGFVRKLLVLKEQKELSEETVGGLVWNMLTAGADTTAVVIEWAMAEMIKCPTVQEKAQQELDSVVGSERLMTESDIPILPYLQCVVKEALRLHPSTPLMLPHKASETVWVGGYKVPKGATVYVNVQAIGRDPANWINPYEFRPERFLQEETDVKGRDFRVLPFGSGRRMCPAAQLSMNLMTLVMGNLLHCFSWSSPVPGERIDMSENPGLLCNMRTPLQALALPRAAARAIPLPLD

SEQ ID NO: 25836 - protein, 481 aa, Arabidopsis thaliana
  peptide (1)..(481): Ceres Seq. ID no. 12371555
  misc_feature (1)..(470): Homolog of NCBI NO: 22651519 NR Description: p-coumaroyl shikimate 3'-hydroxylase isoform 1
  misc_feature (1)..(470): Homolog of NCBI NO: 30688445 NR Description: cytochrome P450 98A3 [Arabidopsis thaliana]
  misc_feature (1)..(470): Homolog of NCBI NO: 22651521 NR Description: p-coumaroyl shikimate 3'-hydroxylase isoform 2
  misc_feature (1)..(470): Homolog of NCBI NO: 15221296 NR Description: cytochrome p450 monooxygenase, putative
  misc_feature (1)..(481): Homolog of NCBI NO: 15221294 NR Description: cytochrome p450 monooxygenase, putative
  misc_feature (1)..(481): Homolog of NCBI NO: 21595281 NR Description: putative cytochrome P450 [Arabidopsis thaliana]
MLYQRWWRSNIPPGPKPKFLLGNLHQMKPLWTHSFSEWSETYGPIISVWIGSQLTVVVSSSDLARQVLRDKDHQLSNRHRIARMTQTGTDLVWSDYSPHYVKLRKLCTLELFSLKSIENFRSLREMEARSMVVSILKDLMSNSGDDQERKPVIVRKYLAAVVLNTISRLMIGKEFGSEEGKEFKAIVEKEHLLSDSGTILDHVWWLKWVSSWFFSDKEFLAHKDRRTKWFRGAIMVEEDIEIEDHRGFVRKLLVLKEQKELSEETVGGLVWNMLTAGADTTAVVIEWAMAEMIKCPTVQEKAQQELDSVVGSERLMTESDIPILPYLQCVVKEALRLHPSTPLMLPHKASETVWVGGYKVPKGATVYVNVQAIGRDPANWINPYEFRPERFLQEETDVKGRDFRVLPFGSGRRMCPAAQLSMNLMTLVMGNLLHCFSWSSPVPGERIDMSENPGLLCNMRTPLQALALPRAAARAIPLPLD

SEQ ID NO: 25837 - protein, 455 aa, Arabidopsis thaliana
  peptide (1)..(455): Ceres Seq. ID no. 12371556
  misc_feature (1)..(444): Homolog of NCBI NO: 22651519 NR Description: p-coumaroyl shikimate 3'-hydroxylase isoform 1
  misc_feature (1)..(444): Homolog of NCBI NO: 30688445 NR Description: cytochrome P450 98A3 [Arabidopsis thaliana]
  misc_feature (1)..(444): Homolog of NCBI NO: 22651521 NR Description: p-coumaroyl shikimate 3'-hydroxylase isoform 2
  misc_feature (1)..(444): Homolog of NCBI NO: 15221296 NR Description: cytochrome p450 monooxygenase, putative
  misc_feature (1)..(455): Homolog of NCBI NO: 15221294 NR Description: cytochrome p450 monooxygenase, putative
  misc_feature (1)..(455): Homolog of NCBI NO: 21595281 NR Description: putative cytochrome P450 [Arabidopsis thaliana]
MKPLWTHSFSEWSETYGPIISVWIGSQLTVVVSSSDLARQVLRDKDHQLSNRHRIARMTQTGTDLVWSDYSPHYVKLRKLCTLELFSLKSIENFRSLREMEARSMVVSILKDLMSNSGDDQERKPVIVRKYLAAVVLNTISRLMIGKEFGSEEGKEFKAIVEKEHLLSDSGTILDHVWWLKWVSSWFFSDKEFLAHKDRRTKWFRGAIMVEEDIEIEDHRGFVRKLLVLKEQKELSEETVGGLVWNMLTAGADTTAVVIEWAMAEMIKCPTVQEKAQQELDSVVGSERLMTESDIPILPYLQCVVKEALRLHPSTPLMLPHKASETVWVGGYKVPKGATVYVNVQAIGRDPANWINPYEFRPERFLQEETDVKGRDFRVLPFGSGRRMCPAAQLSMNLMTLVMGNLLHCFSWSSPVPGERIDMSENPGLLCNMRTPLQALALPRAAARAIPLPLD

SEQ ID NO: 25838 - DNA, 1555 bp, Arabidopsis thaliana
  misc_feature (1)..(1555): Ceres Seq. ID no. 12348635
  misc_feature: MA Experiment ID: 108435 Result: Up-regulated in Transcription
  misc_feature: MA Experiment 108435 PARAMETER Experiment Name: At_stm_Mutants_cDNA_P Parameter: Plant Line Value: wt Landsburg vs stm
  misc_feature: MA Experiment 108435 PARAMETER Experiment Name: At_stm_Mutants_cDNA_P Parameter: Tissue Value: Shoot Apical Meristem Region
  misc_feature: MA Experiment ID: 108461 Result: Up-regulated in Transcription
  misc_feature: MA Experiment 108461 PARAMETER Experiment Name: At_Germinating_Seeds_cDNA_P Parameter: Age (day) Value: 1 vs. 0
  misc_feature: MA Experiment 108461 PARAMETER Experiment Name: At_Germinating_Seeds_cDNA_P Parameter: Tissue Value: Germinating Seeds
  misc_feature: MA Experiment ID: 108462 Result: Up-regulated in Transcription
  misc_feature: MA Experiment 108462 PARAMETER Experiment Name: At_Germinating_Seeds_cDNA_P Parameter: Age (day) Value: 2 vs. 0
  misc_feature: MA Experiment 108462 PARAMETER Experiment Name: At_Germinating_Seeds_cDNA_P Parameter: Tissue Value: Germinating Seeds
  misc_feature: MA Experiment ID: 108463 Result: Up-regulated in Transcription
  misc_feature: MA Experiment 108463 PARAMETER Experiment Name: At_Germinating_Seeds_cDNA_P Parameter: Age (day) Value: 3 vs. 0
  misc_feature: MA Experiment 108463 PARAMETER Experiment Name: At_Germinating_Seeds_cDNA_P Parameter: Tissue Value: Germinating Seeds
  misc_feature: MA Experiment ID: 108464 Result: Up-regulated in Transcription
  misc_feature: MA Experiment 108464 PARAMETER Experiment Name: At_Germinating_Seeds_cDNA_P Parameter: Age (day) Value: 4 vs. 0
  misc_feature: MA Experiment 108464 PARAMETER Experiment Name: At_Germinating_Seeds_cDNA_P Parameter: Tissue Value: Germinating Seeds
  misc_feature: MA Experiment ID: 108488 Result: Down-regulated in Transcription
  misc_feature: MA Experiment ID: 108489 Result: Down-regulated in Transcription
  misc_feature: MA Experiment ID: 108574 Result: Up-regulated in Transcription
  misc_feature: MA Experiment 108574 PARAMETER Experiment Name: At_Wounding__cDNA_P Parameter: Timepoint (hr) Value: 1
  misc_feature: MA Experiment 108574 PARAMETER Experiment Name: At_Wounding__cDNA_P Parameter: Tissue Value: Aerial
  misc_feature: MA Experiment 108574 PARAMETER Experiment Name: At_Wounding__cDNA_P Parameter: Treatment Value: Wounding vs. No Wounding
  misc_feature: MA Experiment ID: 108579 Result: Up-regulated in Transcription
  misc_feature: MA Experiment 108579 PARAMETER Experiment Name: At_4deg_Cold_cDNA_P Parameter: Temperature (deg C) Value: 4 vs. 22
  misc_feature: MA Experiment 108579 PARAMETER Experiment Name: At_4deg_Cold_cDNA_P Parameter: Timepoint (hr) Value: 6
  misc_feature: MA Experiment 108579 PARAMETER Experiment Name: At_4deg_Cold_cDNA_P Parameter: Tissue Value: Aerial
  misc_feature: MA Experiment ID: 108668 Result: Down-regulated in Transcription
  misc_feature: MA Experiment 108668 PARAMETER Experiment Name: At_2mM_SA_cDNA_P Parameter: Plant Line Value: WS
  misc_feature: MA Experiment 108668 PARAMETER Experiment Name: At_2mM_SA_cDNA_P Parameter: Timepoint (hr) Value: 6
  misc_feature: MA Experiment 108668 PARAMETER Experiment Name: At_2mM_SA_cDNA_P Parameter: Treatment Value: 2mM SA vs. No Treatment
  misc_feature: MA Experiment ID: 20000093 Result: Down-regulated in Transcription
  misc_feature: MA Experiment 20000093 PARAMETER Experiment Name: At_42deg_Heat_cDNA_P Parameter: Temperature (deg C) Value: 42 vs. 22
  misc_feature: MA Experiment 20000093 PARAMETER Experiment Name: At_42deg_Heat_cDNA_P Parameter: Timepoint (hr) Value: 0.5
  misc_feature: MA Experiment 20000093 PARAMETER Experiment Name: At_42deg_Heat_cDNA_P Parameter: Tissue Value: Aerial
  misc_feature: MA Experiment ID: 20000171 Result: Up-regulated in Transcription
  misc_feature: MA Experiment 20000171 PARAMETER Experiment Name: At_42deg_Heat_P Parameter: Age (day) Value: 14
  misc_feature: MA Experiment 20000171 PARAMETER Experiment Name: At_42deg_Heat_P Parameter: Organism Value: A. thaliana
  misc_feature: MA Experiment 20000171 PARAMETER Experiment Name: At_42deg_Heat_P Parameter: Plant Line Value: WS
  misc_feature: MA Experiment 20000171 PARAMETER Experiment Name: At_42deg_Heat_P Parameter: Temperature (deg C) Value: 42 vs. 22
  misc_feature: MA Experiment 20000171 PARAMETER Experiment Name: At_42deg_Heat_P Parameter: Timepoint (hr) Value: 1
  misc_feature: MA Experiment 20000171 PARAMETER Experiment Name: At_42deg_Heat_P Parameter: Tissue Value: Aerial
  misc_feature: MA Experiment ID: 20000173 Result: Up-regulated in Transcription
  misc_feature: MA Experiment 20000173 PARAMETER Experiment Name: At_42deg_Heat_P Parameter: Age (day) Value: 14
  misc_feature: MA Experiment 20000173 PARAMETER Experiment Name: At_42deg_Heat_P Parameter: Organism Value: A. thaliana
  misc_feature: MA Experiment 20000173 PARAMETER Experiment Name: At_42deg_Heat_P Parameter: Plant Line Value: WS
  misc_feature: MA Experiment 20000173 PARAMETER Experiment Name: At_42deg_Heat_P Parameter: Temperature (deg C) Value: 42 vs. 22
  misc_feature: MA Experiment 20000173 PARAMETER Experiment Name: At_42deg_Heat_P Parameter: Timepoint (hr) Value: 6
  misc_feature: MA Experiment 20000173 PARAMETER Experiment Name: At_42deg_Heat_P Parameter: Tissue Value: Aerial
  misc_feature: MA Experiment ID: 20000180 Result: Up-regulated in Transcription
  misc_feature: MA Experiment 20000180 PARAMETER Experiment Name: At_Germinating_Seeds_P Parameter: Age (hr) Value: 24 vs. 0
  misc_feature: MA Experiment 20000180 PARAMETER Experiment Name: At_Germinating_Seeds_P Parameter: Tissue Value: Germinating Seeds
  misc_feature: MA Experiment ID: 20000182 Result: Down-regulated in Transcription
  misc_feature: MA Experiment 20000182 PARAMETER Experiment Name: At_2mM_SA_P Parameter: Age (day) Value: 14
  misc_feature: MA Experiment 20000182 PARAMETER Experiment Name: At_2mM_SA_P Parameter: Organism Value: A. thaliana
  misc_feature: MA Experiment 20000182 PARAMETER Experiment Name: At_2mM_SA_P Parameter: Plant Line Value: WS
  misc_feature: MA Experiment 20000182 PARAMETER Experiment Name: At_2mM_SA_P Parameter: Timepoint (hr) Value: 6
  misc_feature: MA Experiment 20000182 PARAMETER Experiment Name: At_2mM_SA_P Parameter: Tissue Value: Aerial
  misc_feature: MA Experiment 20000182 PARAMETER Experiment Name: At_2mM_SA_P Parameter: Treatment Value: 2mM SA vs. No Treatment
  misc_feature: MA Experiment ID: 20000184 Result: Up-regulated in Transcription
  misc_feature: MA Experiment 20000184 PARAMETER Experiment Name: At_Shoots__P Parameter: Age (day) Value: 7
  misc_feature: MA Experiment 20000184 PARAMETER Experiment Name: At_Shoots__P Parameter: Tissue Value: Shoots vs. Whole Plant
  misc_feature: MA Experiment ID: 20000234 Result: Up-regulated in Transcription
  misc_feature: MA Experiment 20000234 PARAMETER Experiment Name: At_Siliques_P Parameter: Age (day) Value: 21
  misc_feature: MA Experiment 20000234 PARAMETER Experiment Name: At_Siliques_P Parameter: Organism Value: A. thaliana
  misc_feature: MA Experiment 20000234 PARAMETER Experiment Name: At_Siliques_P Parameter: Plant Line Value: WS
  misc_feature: MA Experiment 20000234 PARAMETER Experiment Name: At_Siliques_P Parameter: Tissue Value: Less Than 5mm Siliques vs. Whole Plant
  misc_feature: MA Experiment ID: 20000264 Result: Up-regulated in Transcription
  misc_feature: MA Experiment 20000264 PARAMETER Experiment Name: At_Open_Flower_P Parameter: Age (day) Value: 21
  misc_feature: MA Experiment 20000264 PARAMETER Experiment Name: At_Open_Flower_P Parameter: Plant Line Value: WS
  misc_feature: MA Experiment 20000264 PARAMETER Experiment Name: At_Open_Flower_P Parameter: Tissue Value: Open Flower vs. Whole Plant
  misc_feature: MA Experiment ID: 20000267 Result: Up-regulated in Transcription
  misc_feature: MA Experiment 20000267 PARAMETER Experiment Name: At_Drought_P Parameter: Age (day) Value: 7
  misc_feature: MA Experiment 20000267 PARAMETER Experiment Name: At_Drought_P Parameter: Organism Value: A. thaliana
  misc_feature: MA Experiment 20000267 PARAMETER Experiment Name: At_Drought_P Parameter: Plant Line Value: WS
  misc_feature: MA Experiment 20000267 PARAMETER Experiment Name: At_Drought_P Parameter: Timepoint (hr) Value: 6
  misc_feature: MA Experiment 20000267 PARAMETER Experiment Name: At_Drought_P Parameter: Tissue Value: Whole Plant
  misc_feature: MA Experiment 20000267 PARAMETER Experiment Name: At_Drought_P Parameter: Treatment Value: Drought vs. No Drought
  misc_feature: MA Experiment ID: 20000268 Result: Up-regulated in Transcription
  misc_feature: MA Experiment 20000268 PARAMETER Experiment Name: At_100mM_NaCl__P Parameter: Age (day) Value: 14
  misc_feature: MA Experiment 20000268 PARAMETER Experiment Name: At_100mM_NaCl__P Parameter: Organism Value: A. thaliana
  misc_feature: MA Experiment 20000268 PARAMETER Experiment Name: At_100mM_NaCl__P Parameter: Plant Line Value: WS
  misc_feature: MA Experiment 20000268 PARAMETER Experiment Name: At_100mM_NaCl__P Parameter: Timepoint (hr) Value: 6
  misc_feature: MA Experiment 20000268 PARAMETER Experiment Name: At_100mM_NaCl__P Parameter: Tissue Value: Whole Plant
  misc_feature: MA Experiment 20000268 PARAMETER Experiment Name: At_100mM_NaCl__P Parameter: Treatment Value: 100mM NaCl vs. No Treatment
  misc_feature: MA Experiment ID: 20000308 Result: Up-regulated in Transcription
  misc_feature: MA Experiment 20000308 PARAMETER Experiment Name: At_100mM_NaCl__P Parameter: Age (day) Value: 17
  misc_feature: MA Experiment 20000308 PARAMETER Experiment Name: At_100mM_NaCl__P Parameter: Organism Value: A. thaliana
  misc_feature: MA Experiment 20000308 PARAMETER Experiment Name: At_100mM_NaCl__P Parameter: Plant Line Value: WS
  misc_feature: MA Experiment 20000308 PARAMETER Experiment Name: At_100mM_NaCl__P Parameter: Timepoint (hr) Value: 72
  misc_feature: MA Experiment 20000308 PARAMETER Experiment Name: At_100mM_NaCl__P Parameter: Tissue Value: Whole Plant
  misc_feature: MA Experiment 20000308 PARAMETER Experiment Name: At_100mM_NaCl__P Parameter: Treatment Value: 100mM NaCl vs. No Treatment
  misc_feature: MA Experiment ID: 20000506 Result: Up-regulated in Transcription
  misc_feature: MA Experiment 20000506 PARAMETER Experiment Name: At_Wounding_P Parameter: Organism Value: A. thaliana
  misc_feature: MA Experiment 20000506 PARAMETER Experiment Name: At_Wounding_P Parameter: Plant Line Value: WS
  misc_feature: MA Experiment 20000506 PARAMETER Experiment Name: At_Wounding_P Parameter: Timepoint (hr) Value: 6
  misc_feature: MA Experiment 20000506 PARAMETER Experiment Name: At_Wounding_P Parameter: Tissue Value: Aerial
  misc_feature: MA Experiment 20000506 PARAMETER Experiment Name: At_Wounding_P Parameter: Treatment Value: Wounding vs. No Wounding
  misc_feature: MA Experiment ID: 20000573 Result: Down-regulated in Transcription
  misc_feature: MA Experiment 20000573 PARAMETER Experiment Name: At_100uM_ABA_Mutants__P Parameter: Organism Value: A. thaliana
  misc_feature: MA Experiment 20000573 PARAMETER Experiment Name: At_100uM_ABA_Mutants__P Parameter: Plant Line Value: CS22 vs. Ler wt
  misc_feature: MA Experiment 20000573 PARAMETER Experiment Name: At_100uM_ABA_Mutants__P Parameter: Timepoint (hr) Value: N/A
  misc_feature: MA Experiment 20000573 PARAMETER Experiment Name: At_100uM_ABA_Mutants__P Parameter: Tissue Value: Whole Plant
  misc_feature: MA Experiment 20000573 PARAMETER Experiment Name: At_100uM_ABA_Mutants__P Parameter: Treatment Value: None
  misc_feature: MA Experiment ID: 20000574 Result: Down-regulated in Transcription
  misc_feature: MA Experiment 20000574 PARAMETER Experiment Name: At_100uM_ABA_Mutants__P Parameter: Organism Value: A. thaliana
  misc_feature: MA Experiment 20000574 PARAMETER Experiment Name: At_100uM_ABA_Mutants__P Parameter: Plant Line Value: CS23 vs. Ler wt
  misc_feature: MA Experiment 20000574 PARAMETER Experiment Name: At_100uM_ABA_Mutants__P Parameter: Timepoint (hr) Value: N/A
  misc_feature: MA Experiment 20000574 PARAMETER Experiment Name: At_100uM_ABA_Mutants__P Parameter: Tissue Value: Whole Plant
  misc_feature: MA Experiment 20000574 PARAMETER Experiment Name: At_100uM_ABA_Mutants__P Parameter: Treatment Value: None
  misc_feature: MA Experiment ID: 20001248 Result: Down-regulated in Transcription
  misc_feature: MA Experiment 20001248 PARAMETER Experiment Name: At_Far-red-induction_P Parameter: Age (day) Value: 7
  misc_feature: MA Experiment 20001248 PARAMETER Experiment Name: At_Far-red-induction_P Parameter: Light Value: Far-red vs. White
  misc_feature: MA Experiment 20001248 PARAMETER Experiment Name: At_Far-red-induction_P Parameter: Organism Value: A. thaliana
  misc_feature: MA Experiment 20001248 PARAMETER Experiment Name: At_Far-red-induction_P Parameter: Plant Line Value: Columbia
  misc_feature: MA Experiment 20001248 PARAMETER Experiment Name: At_Far-red-induction_P Parameter: Timepoint (hr) Value: 4
  misc_feature: MA Experiment 20001248 PARAMETER Experiment Name: At_Far-red-induction_P Parameter: Tissue Value: Whole Plant
  misc_feature: MA Experiment ID: 20001450 Result: Down-regulated in Transcription
  misc_feature: MA Experiment 20001450 PARAMETER Experiment Name: At_Far-red-induction_P Parameter: Age (day) Value: 7
  misc_feature: MA Experiment 20001450 PARAMETER Experiment Name: At_Far-red-induction_P Parameter: Light Value: Far-red vs. White
  misc_feature: MA Experiment 20001450 PARAMETER Experiment Name: At_Far-red-induction_P Parameter: Organism Value: A. thaliana
  misc_feature: MA Experiment 20001450 PARAMETER Experiment Name: At_Far-red-induction_P Parameter: Plant Line Value: Columbia
  misc_feature: MA Experiment 20001450 PARAMETER Experiment Name: At_Far-red-induction_P Parameter: Timepoint (hr) Value: 8
  misc_feature: MA Experiment 20001450 PARAMETER Experiment Name: At_Far-red-induction_P Parameter: Tissue Value: Whole Plant
  misc_feature: MA Experiment ID: 20001458 Result: Down-regulated in Transcription
  misc_feature: MA Experiment 20001458 PARAMETER Experiment Name: At_50mM_NH4NO3_L-to-H_P Parameter: Age (day) Value: Undefined
  misc_feature: MA Experiment 20001458 PARAMETER Experiment Name: At_50mM_NH4NO3_L-to-H_P Parameter: Organism Value: Undefined
  misc_feature: MA Experiment 20001458 PARAMETER Experiment Name: At_50mM_NH4NO3_L-to-H_P Parameter: Plant Line Value: Undefined
  misc_feature: MA Experiment 20001458 PARAMETER Experiment Name: At_50mM_NH4NO3_L-to-H_P Parameter: Timepoint (hr) Value: 2
  misc_feature: MA Experiment 20001458 PARAMETER Experiment Name: At_50mM_NH4NO3_L-to-H_P Parameter: Tissue Value: Siliques
  misc_feature: MA Experiment 20001458 PARAMETER Experiment Name: At_50mM_NH4NO3_L-to-H_P Parameter: Treatment Value: 50mM NH4NO3 vs. 100mM Manitol
  misc_feature: MA Experiment ID: 20001554 Result: Up-regulated in Transcription
  misc_feature: MA Experiment 20001554 PARAMETER Experiment Name: At_Drought_Soil_Dry_P Parameter: Age (day) Value: 21
  misc_feature: MA Experiment 20001554 PARAMETER Experiment Name: At_Drought_Soil_Dry_P Parameter: Organism Value: A. thaliana
  misc_feature: MA Experiment 20001554 PARAMETER Experiment Name: At_Drought_Soil_Dry_P Parameter: Plant Line Value: WS
  misc_feature: MA Experiment 20001554 PARAMETER Experiment Name: At_Drought_Soil_Dry_P Parameter: Post Timepoint (hr) Value: None
  misc_feature: MA Experiment 20001554 PARAMETER Experiment Name: At_Drought_Soil_Dry_P Parameter: Post-Treatment Value: None
  misc_feature: MA Experiment 20001554 PARAMETER Experiment Name: At_Drought_Soil_Dry_P Parameter: Timepoint (day) Value: 7
  misc_feature: MA Experiment 20001554 PARAMETER Experiment Name: At_Drought_Soil_Dry_P Parameter: Treatment Value: Drought vs. No Drought
  misc_feature: MA Experiment ID: 20001555 Result: Up-regulated in Transcription
  misc_feature: MA Experiment 20001555 PARAMETER Experiment Name: At_Drought_Soil_Dry_P Parameter: Age (day) Value: 24
  misc_feature: MA Experiment 20001555 PARAMETER Experiment Name: At_Drought_Soil_Dry_P Parameter: Organism Value: A. thaliana
  misc_feature: MA Experiment 20001555 PARAMETER Experiment Name: At_Drought_Soil_Dry_P Parameter: Plant Line Value: WS
  misc_feature: MA Experiment 20001555 PARAMETER Experiment Name: At_Drought_Soil_Dry_P Parameter: Post Timepoint (hr) Value: None
  misc_feature: MA Experiment 20001555 PARAMETER Experiment Name: At_Drought_Soil_Dry_P Parameter: Post-Treatment Value: None
  misc_feature: MA Experiment 20001555 PARAMETER Experiment Name: At_Drought_Soil_Dry_P Parameter: Timepoint (day) Value: 10
  misc_feature: MA Experiment 20001555 PARAMETER Experiment Name: At_Drought_Soil_Dry_P Parameter: Treatment Value: Drought vs. No Drought
  misc_feature: MA Experiment ID: 20001556 Result: Up-regulated in Transcription
  misc_feature: MA Experiment 20001556 PARAMETER Experiment Name: At_Drought_Soil_Dry_P Parameter: Age (day) Value: 26
  misc_feature: MA Experiment 20001556 PARAMETER Experiment Name: At_Drought_Soil_Dry_P Parameter: Organism Value: A. thaliana
  misc_feature: MA Experiment 20001556 PARAMETER Experiment Name: At_Drought_Soil_Dry_P Parameter: Plant Line Value: WS
  misc_feature: MA Experiment 20001556 PARAMETER Experiment Name: At_Drought_Soil_Dry_P Parameter: Post Timepoint (hr) Value: None
  misc_feature: MA Experiment 20001556 PARAMETER Experiment Name: At_Drought_Soil_Dry_P Parameter: Post-Treatment Value: None
  misc_feature: MA Experiment 20001556 PARAMETER Experiment Name: At_Drought_Soil_Dry_P Parameter: Timepoint (day) Value: 12
  misc_feature: MA Experiment 20001556 PARAMETER Experiment Name: At_Drought_Soil_Dry_P Parameter: Treatment Value: Drought vs. No Drought
  misc_feature: MA Experiment ID: 20001557 Result: Up-regulated in Transcription
  misc_feature: MA Experiment 20001557 PARAMETER Experiment Name: At_Drought_Soil_Dry_P Parameter: Age (day) Value: 27
  misc_feature: MA Experiment 20001557 PARAMETER Experiment Name: At_Drought_Soil_Dry_P Parameter: Organism Value: A. thaliana
  misc_feature: MA Experiment 20001557 PARAMETER Experiment Name: At_Drought_Soil_Dry_P Parameter: Plant Line Value: WS
  misc_feature: MA Experiment 20001557 PARAMETER Experiment Name: At_Drought_Soil_Dry_P Parameter: Post Timepoint (hr) Value: 3
  misc_feature: MA Experiment 20001557 PARAMETER Experiment Name: At_Drought_Soil_Dry_P Parameter: Post-Treatment Value: Re-Water vs. No Drought
  misc_feature: MA Experiment 20001557 PARAMETER Experiment Name: At_Drought_Soil_Dry_P Parameter: Timepoint (day) Value: 13
  misc_feature: MA Experiment 20001557 PARAMETER Experiment Name: At_Drought_Soil_Dry_P Parameter: Treatment Value: Drought vs. No Drought
  misc_feature: MA Experiment ID: 20001560 Result: Up-regulated in Transcription
  misc_feature: MA Experiment 20001560 PARAMETER Experiment Name: At_Drought_Soil_Dry_P Parameter: Age (day) Value: 28
  misc_feature: MA Experiment 20001560 PARAMETER Experiment Name: At_Drought_Soil_Dry_P Parameter: Organism Value: A. thaliana
  misc_feature: MA Experiment 20001560 PARAMETER Experiment Name: At_Drought_Soil_Dry_P Parameter: Plant Line Value: WS
  misc_feature: MA Experiment 20001560 PARAMETER Experiment Name: At_Drought_Soil_Dry_P Parameter: Post Timepoint (hr) Value: None
  misc_feature: MA Experiment 20001560 PARAMETER Experiment Name: At_Drought_Soil_Dry_P Parameter: Post-Treatment Value: None
  misc_feature: MA Experiment 20001560 PARAMETER Experiment Name: At_Drought_Soil_Dry_P Parameter: Timepoint (day) Value: 14
  misc_feature: MA Experiment 20001560 PARAMETER Experiment Name: At_Drought_Soil_Dry_P Parameter: Treatment Value: Drought vs. No Drought
  misc_feature: MA Experiment ID: 20001757 Result: Down-regulated in Transcription
  misc_feature: MA Experiment 20001757 PARAMETER Experiment Name: At_50mM_NH4NO3_L-to-H_P Parameter: Timepoint (hr) Value: 6
  misc_feature: MA Experiment 20001757 PARAMETER Experiment Name: At_50mM_NH4NO3_L-to-H_P Parameter: Tissue Value: Leaf
  misc_feature: MA Experiment 20001757 PARAMETER Experiment Name: At_50mM_NH4NO3_L-to-H_P Parameter: Treatment Value: 50mM NH4NO3 vs 100mM Mannitol
  misc_feature: MA Experiment ID: 20001761 Result: Down-regulated in Transcription
  misc_feature: MA Experiment 20001761 PARAMETER Experiment Name: At_50mM_NH4NO3_L-to-H_P Parameter: Timepoint (hr) Value: 4
  misc_feature: MA Experiment 20001761 PARAMETER Experiment Name: At_50mM_NH4NO3_L-to-H_P Parameter: Tissue Value: Siliques
  misc_feature: MA Experiment 20001761 PARAMETER Experiment Name: At_50mM_NH4NO3_L-to-H_P Parameter: Treatment Value: 50mM NH4NO3 vs 100mM Mannitol
  misc_feature: MA Experiment ID: 20001904 Result: Up-regulated in Transcription
  misc_feature: MA Experiment 20001904 PARAMETER Experiment Name: At_Drought_Reproduction_P Parameter: Age (day) Value: 37
  misc_feature: MA Experiment 20001904 PARAMETER Experiment Name: At_Drought_Reproduction_P Parameter: Organism Value: A. thaliana
  misc_feature: MA Experiment 20001904 PARAMETER Experiment Name: At_Drought_Reproduction_P Parameter: Plant Line Value: WS
  misc_feature: MA Experiment 20001904 PARAMETER Experiment Name: At_Drought_Reproduction_P Parameter: Timepoint (day) Value: 7
  misc_feature: MA Experiment 20001904 PARAMETER Experiment Name: At_Drought_Reproduction_P Parameter: Tissue Value: Rosettes
  misc_feature: MA Experiment 20001904 PARAMETER Experiment Name: At_Drought_Reproduction_P Parameter: Treatment Value: Drought vs. No Drought
acaaaaaagaacaaagataacaaaaaaagaagtctaataaggatcttccggtagttaaagtgaaatacaagagagtccaagaaaatgggtgtttttggatcgaatgaatcgtcaagcatgagtattgtgatgtatccgtggttagcctttggtcatatgactccttttcttcacctctccaacaagctcgcagagaaaggtcacaagattgttttcttgcttcccaagacagcactaaaccagctcgaacctcttaatctctacccaaatctcatcacttttcacaccatctctatccctcaggtcaaagggcttcctcccggtgcggagaccaactccgacgtccctttcttcttgactcatttgcttgcagttgcaatggaccaaacccggccagaggtcgagaccattttccgtacaatcaaaccggacttggttttttatgactctgcccattggataccggatattgctaaaccggtcggtgctaaaaccgtttgcttcaacatcgttagcgctgcgtcaatcgcactgtctcttgtccctgctgcggagagagaagtcattgatgggaaggaaatgtcaggggaggagttagctaagacgcctctaggttacccatcttcgaaagtagtcttacgtccgcacgaagcaaaatccctgagtttcgtgtggaggaagcacgaggcgattggctctttctttgatgggaaagttaccgcaatgagaaactgcgacgcaatcgctataaggacttgccgtgagacagaaggcaaattctgcgattacatcagtagccagtacagtaaaccggtttatctaactggaccggttctccctggatcccaacctaatcagccctccttagagcctcaatgggtggagtggctagccaaattcaaccacggttcggttgtgttctgcgctttcggtagccaacccgttgtaaacaagatagatcagtttcaagaactctgtttagggctagaatcaactggttttccgtttctggttgccattaagcctccttccggtgtatcaacagtcgaggaagccttaccggaaggattcaaagagagggttgaaggacgtggcgttgtatttggaggttggattcagcaaccgttggtgttgaaccatccttcagtgggttgttttgttagccattgcgggtttgggtcgatgtgggagtctttgatgagtgattgtcagatcgttttggttccgcagcacggtgaacagattttgaacgcaaggctgatgacggaggagatggaggtggcggttgaagtggagagggaaaagaatgggtggttctcgcggcaaagcttggagaatgctgtgaagagtgtgatggaggaaggtagtgaggtcggtgagaaagtgaggaagaatcatgacaagtggagatgtgttttgagtgactctggttttgcagatggttatattgatatgtttgaacagaatttaatcgaatttgtgaagtcatgagttcattgtaataatttctttgtgttataaacattatgaaacgagatgtaacgattacttatgc

SEQ ID NO: 25839 - protein, 468 aa, Arabidopsis thaliana
  peptide (1)..(468): Ceres Seq. ID no. 12348636
  misc_feature (12)..(468): Pfam Name: UDP-glucoronosyl and UDP-glucosyl transferase Pfam Description: UDP-glucoronosyl and UDP-glucosyl transferase
  misc_feature (16)..(229): Homolog of NCBI NO: 28393204 NR Description: unknown protein [Arabidopsis thaliana]
  misc_feature (228)..(464): Homolog of NCBI NO: 28393204 NR Description: unknown protein [Arabidopsis thaliana]
  misc_feature (10)..(468): Homolog of NCBI NO: 15230017 NR Description: flavonol 3-O-Glucosyltransferase, putative
  misc_feature (14)..(456): Homolog of NCBI NO: 15982889 NR Description: AT4g27560/T29A15_50 [Arabidopsis thaliana]
  misc_feature (16)..(468): Homolog of NCBI NO: 21593514 NR Description: UDP rhamnose-anthocyanidin-3-glucoside
  misc_feature (16)..(466): Homolog of NCBI NO: 15217796 NR Description: anthocyanidin-3-glucoside rhamnosyltransferase,
  misc_feature (14)..(468): Homolog of NCBI NO: 15234195 NR Description: UDP rhamnose-anthocyanidin-3-glucoside
  misc_feature (14)..(468): Homolog of NCBI NO: 15234196 NR Description: UDP rhamnose--anthocyanidin-3-glucoside
  misc_feature (10)..(468): Homolog of NCBI NO: 15239525 NR Description: flavonol 3-O-glucosyltransferase-like protein
  misc_feature (1)..(468): Homolog of NCBI NO: 15239543 NR Description: flavonol 3-O-glucosyltransferase-like; protein
MGVFGSNESSSMSIVMYPWLAFGHMTPFLHLSNKLAEKGHKIVFLLPKTALNQLEPLNLYPNLITFHTISIPQVKGLPPGAETNSDVPFFLTHLLAVAMDQTRPEVETIFRTIKPDLVFYDSAHWIPDIAKPVGAKTVCFNIVSAASIALSLVPAAEREVIDGKEMSGEELAKTPLGYPSSKVVLRPHEAKSLSFVWRKHEAIGSFFDGKVTAMRNCDAIAIRTCRETEGKFCDYISSQYSKPVYLTGPVLPGSQPNQPSLEPQWVEWLAKFNHGSVVFCAFGSQPVVNKIDQFQELCLGLESTGFPFLVAIKPPSGVSTVEEALPEGFKERVEGRGVVFGGWIQQPLVLNHPSVGCFVSHCGFGSMWESLMSDCQIVLVPQHGEQILNARLMTEEMEVAVEVEREKNGWFSRQSLENAVKSVMEEGSEVGEKVRKNHDKWRCVLSDSGFADGYIDMFEQNLIEFVKS

SEQ ID NO: 25840 - protein, 457 aa, Arabidopsis thaliana
  peptide (1)..(457): Ceres Seq. ID no. 12348637
  misc_feature (1)..(457): Pfam Name: UDP-glucoronosyl and UDP-glucosyl transferase Pfam Description: UDP-glucoronosyl and UDP-glucosyl transferase
  misc_feature (5)..(218): Homolog of NCBI NO: 28393204 NR Description: unknown protein [Arabidopsis thaliana]
  misc_feature (217)..(453): Homolog of NCBI NO: 28393204 NR Description: unknown protein [Arabidopsis thaliana]
  misc_feature (1)..(457): Homolog of NCBI NO: 15230017 NR Description: flavonol 3-O-Glucosyltransferase, putative
  misc_feature (3)..(445): Homolog of NCBI NO: 15982889 NR Description: AT4g27560/T29A15_50 [Arabidopsis thaliana]
  misc_feature (5)..(457): Homolog of NCBI NO: 21593514 NR Description: UDP rhamnose-anthocyanidin-3-glucoside
  misc_feature (5)..(455): Homolog of NCBI NO: 15217796 NR Description: anthocyanidin-3-glucoside rhamnosyltransferase,
  misc_feature (3)..(457): Homolog of NCBI NO: 15234195 NR Description: UDP rhamnose-anthocyanidin-3-glucoside
  misc_feature (3)..(457): Homolog of NCBI NO: 15234196 NR Description: UDP rhamnose--anthocyanidin-3-glucoside
  misc_feature (1)..(457): Homolog of NCBI NO: 15239525 NR Description: flavonol 3-O-glucosyltransferase-like protein
  misc_feature (1)..(457): Homolog of NCBI NO: 15239543 NR Description: flavonol 3-O-glucosyltransferase-like; protein
MSIVMYPWLAFGHMTPFLHLSNKLAEKGHKIVFLLPKTALNQLEPLNLYPNLITFHTISIPQVKGLPPGAETNSDVPFFLTHLLAVAMDQTRPEVETIFRTIKPDLVFYDSAHWIPDIAKPVGAKTVCFNIVSAASIALSLVPAAEREVIDGKEMSGEELAKTPLGYPSSKVVLRPHEAKSLSFVWRKHEAIGSFFDGKVTAMRNCDAIAIRTCRETEGKFCDYISSQYSKPVYLTGPVLPGSQPNQPSLEPQWVEWLAKFNHGSVVFCAFGSQPVVNKIDQFQELCLGLESTGFPFLVAIKPPSGVSTVEEALPEGFKERVEGRGVVFGGWIQQPLVLNHPSVGCFVSHCGFGSMWESLMSDCQIVLVPQHGEQILNARLMTEEMEVAVEVEREKNGWFSRQSLENAVKSVMEEGSEVGEKVRKNHDKWRCVLSDSGFADGYIDMFEQNLIEFVKS

SEQ ID NO: 25841 - protein, 453 aa, Arabidopsis thaliana
  peptide (1)..(453): Ceres Seq. ID no. 12348638
  misc_feature (1)..(453): Pfam Name: UDP-glucoronosyl and UDP-glucosyl transferase Pfam Description: UDP-glucoronosyl and UDP-glucosyl transferase
  misc_feature (1)..(214): Homolog of NCBI NO: 28393204 NR Description: unknown protein [Arabidopsis thaliana]
  misc_feature (213)..(449): Homolog of NCBI NO: 28393204 NR Description: unknown protein [Arabidopsis thaliana]
  misc_feature (1)..(453): Homolog of NCBI NO: 15230017 NR Description: flavonol 3-O-Glucosyltransferase, putative
  misc_feature (1)..(441): Homolog of NCBI NO: 15982889 NR Description: AT4g27560/T29A15_50 [Arabidopsis thaliana]
  misc_feature (1)..(453): Homolog of NCBI NO: 21593514 NR Description: UDP rhamnose-anthocyanidin-3-glucoside
  misc_feature (1)..(451): Homolog of NCBI NO: 15217796 NR Description: anthocyanidin-3-glucoside rhamnosyltransferase,
  misc_feature (1)..(453): Homolog of NCBI NO: 15234195 NR Description: UDP rhamnose-anthocyanidin-3-glucoside
  misc_feature (1)..(453): Homolog of NCBI NO: 15234196 NR Description: UDP rhamnose--anthocyanidin-3-glucoside
  misc_feature (1)..(453): Homolog of NCBI NO: 15239525 NR Description: flavonol 3-O-glucosyltransferase-like protein
  misc_feature (1)..(453): Homolog of NCBI NO: 15239543 NR Description: flavonol 3-O-glucosyltransferase-like; protein
MYPWLAFGHMTPFLHLSNKLAEKGHKIVFLLPKTALNQLEPLNLYPNLITFHTISIPQVKGLPPGAETNSDVPFFLTHLLAVAMDQTRPEVETIFRTIKPDLVFYDSAHWIPDIAKPVGAKTVCFNIVSAASIALSLVPAAEREVIDGKEMSGEELAKTPLGYPSSKVVLRPHEAKSLSFVWRKHEAIGSFFDGKVTAMRNCDAIAIRTCRETEGKFCDYISSQYSKPVYLTGPVLPGSQPNQPSLEPQWVEWLAKFNHGSVVFCAFGSQPVVNKIDQFQELCLGLESTGFPFLVAIKPPSGVSTVEEALPEGFKERVEGRGVVFGGWIQQPLVLNHPSVGCFVSHCGFGSMWESLMSDCQIVLVPQHGEQILNARLMTEEMEVAVEVEREKNGWFSRQSLENAVKSVMEEGSEVGEKVRKNHDKWRCVLSDSGFADGYIDMFEQNLIEFVKS

SEQ ID NO: 25842 - DNA, 1429 bp, Arabidopsis thaliana
  misc_feature (1)..(1429): Ceres Seq. ID no. 13494248
  misc_feature: MA Experiment ID: 108461 Result: Down-regulated in Transcription
  misc_feature: MA Experiment 108461 PARAMETER Experiment Name: At_Germinating_Seeds_cDNA_P Parameter: Age (day) Value: 1 vs. 0
  misc_feature: MA Experiment 108461 PARAMETER Experiment Name: At_Germinating_Seeds_cDNA_P Parameter: Tissue Value: Germinating Seeds
  misc_feature: MA Experiment ID: 108462 Result: Down-regulated in Transcription
  misc_feature: MA Experiment 108462 PARAMETER Experiment Name: At_Germinating_Seeds_cDNA_P Parameter: Age (day) Value: 2 vs. 0
  misc_feature: MA Experiment 108462 PARAMETER Experiment Name: At_Germinating_Seeds_cDNA_P Parameter: Tissue Value: Germinating Seeds
  misc_feature: MA Experiment ID: 108463 Result: Down-regulated in Transcription
  misc_feature: MA Experiment 108463 PARAMETER Experiment Name: At_Germinating_Seeds_cDNA_P Parameter: Age (day) Value: 3 vs. 0
  misc_feature: MA Experiment 108463 PARAMETER Experiment Name: At_Germinating_Seeds_cDNA_P Parameter: Tissue Value: Germinating Seeds
  misc_feature: MA Experiment ID: 108464 Result: Down-regulated in Transcription
  misc_feature: MA Experiment 108464 PARAMETER Experiment Name: At_Germinating_Seeds_cDNA_P Parameter: Age (day) Value: 4 vs. 0
  misc_feature: MA Experiment 108464 PARAMETER Experiment Name: At_Germinating_Seeds_cDNA_P Parameter: Tissue Value: Germinating Seeds
  misc_feature: MA Experiment ID: 20000179 Result: Down-regulated in Transcription
  misc_feature: MA Experiment 20000179 PARAMETER Experiment Name: At_Germinating_Seeds_P Parameter: Age (hr) Value: 6 vs. 0
  misc_feature: MA Experiment 20000179 PARAMETER Experiment Name: At_Germinating_Seeds_P Parameter: Tissue Value: Germinating Seeds
  misc_feature: MA Experiment ID: 20000180 Result: Down-regulated in Transcription
  misc_feature: MA Experiment 20000180 PARAMETER Experiment Name: At_Germinating_Seeds_P Parameter: Age (hr) Value: 24 vs. 0
  misc_feature: MA Experiment 20000180 PARAMETER Experiment Name: At_Germinating_Seeds_P Parameter: Tissue Value: Germinating Seeds
  misc_feature: MA Experiment ID: 20000184 Result: Down-regulated in Transcription
  misc_feature: MA Experiment 20000184 PARAMETER Experiment Name: At_Shoots__P Parameter: Age (day) Value: 7
  misc_feature: MA Experiment 20000184 PARAMETER Experiment Name: At_Shoots__P Parameter: Tissue Value: Shoots vs. Whole Plant
  misc_feature: MA Experiment ID: 20000224 Result: Up-regulated in Transcription
  misc_feature: MA Experiment ID: 20000437 Result: Up-regulated in Transcription
  misc_feature: MA Experiment 20000437 PARAMETER Experiment Name: At_Drought_P Parameter: Age (day) Value: 8
  misc_feature: MA Experiment 20000437 PARAMETER Experiment Name: At_Drought_P Parameter: Organism Value: A. thaliana
  misc_feature: MA Experiment 20000437 PARAMETER Experiment Name: At_Drought_P Parameter: Plant Line Value: WS
  misc_feature: MA Experiment 20000437 PARAMETER Experiment Name: At_Drought_P Parameter: Timepoint (hr) Value: 24
  misc_feature: MA Experiment 20000437 PARAMETER Experiment Name: At_Drought_P Parameter: Tissue Value: Whole Plant
  misc_feature: MA Experiment 20000437 PARAMETER Experiment Name: At_Drought_P Parameter: Treatment Value: Drought vs. No Drought
  misc_feature: MA Experiment ID: 20000495 Result: Up-regulated in Transcription
  misc_feature: MA Experiment 20000495 PARAMETER Experiment Name: At_Guard_Cells_P Parameter: Harvest Date Value: 8/2/2002
  misc_feature: MA Experiment 20000495 PARAMETER Experiment Name: At_Guard_Cells_P Parameter: Organism Value: A. thaliana
  misc_feature: MA Experiment 20000495 PARAMETER Experiment Name: At_Guard_Cells_P Parameter: Tissue Value: Guard Cells vs. Leaves
  misc_feature: MA Experiment ID: 20000794 Result: Up-regulated in Transcription
  misc_feature: MA Experiment 20000794 PARAMETER Experiment Name: At_Petals_P Parameter: Age (day) Value: 23-25 days
  misc_feature: MA Experiment 20000794 PARAMETER Experiment Name: At_Petals_P Parameter: Plant Line Value: WS
  misc_feature: MA Experiment 20000794 PARAMETER Experiment Name: At_Petals_P Parameter: Tissue Value: Petals vs. Whole plant
  misc_feature: MA Experiment ID: 20001757 Result: Down-regulated in Transcription
  misc_feature: MA Experiment 20001757 PARAMETER Experiment Name: At_50mM_NH4NO3_L-to-H_P Parameter: Timepoint (hr) Value: 6
  misc_feature: MA Experiment 20001757 PARAMETER Experiment Name: At_50mM_NH4NO3_L-to-H_P Parameter: Tissue Value: Leaf
  misc_feature: MA Experiment 20001757 PARAMETER Experiment Name: At_50mM_NH4NO3_L-to-H_P Parameter: Treatment Value: 50mM NH4NO3 vs 100mM Mannitol
  misc_feature: MA Experiment ID: 20001905 Result: Up-regulated in Transcription
  misc_feature: MA Experiment 20001905 PARAMETER Experiment Name: At_Drought_Reproduction_P Parameter: Age (day) Value: 40
  misc_feature: MA Experiment 20001905 PARAMETER Experiment Name: At_Drought_Reproduction_P Parameter: Organism Value: A. thaliana
  misc_feature: MA Experiment 20001905 PARAMETER Experiment Name: At_Drought_Reproduction_P Parameter: Plant Line Value: WS
  misc_feature: MA Experiment 20001905 PARAMETER Experiment Name: At_Drought_Reproduction_P Parameter: Timepoint (day) Value: 10
  misc_feature: MA Experiment 20001905 PARAMETER Experiment Name: At_Drought_Reproduction_P Parameter: Tissue Value: Rosettes
  misc_feature: MA Experiment 20001905 PARAMETER Experiment Name: At_Drought_Reproduction_P Parameter: Treatment Value: Drought vs. No Drought
atggacgctataaggaagcagcttgatgtgctcatgggagctaaccgaaacggcgacgttcaggaggtgaatcgcaaatactacgaccgtgatgtgtgtcgtctttacttgtctggtctctgccctcacgatctcttccaattgacgaaaatggatatgggaccatgcccaaaggtgcactctttgcagcttcggaaagaataccgagaagcaagggcaaaaggtgttgataactacgacagggaattggaagatgccatagacaggcttatcgttgagtgtgataggaagattggtagggcccttaagcgtcttcaagaagaggacgccaaagctgccattgccatttctgtctctgaagtcactcagtcgcctgaaattctcgagttatcggagaaaatcaaagagaagatgaaggaagcagatatccacgatcttgaaggcaaaatggatcttaagattagagctcttgagttagtcgaagagatgaggaccaagagagctgaccaacaggcggtgttgctgttggaagccttcaacaaagatagagcatccttgccacagcccgttccagctcaaccaccatcttccgaattacctccaccggatcctcgcactcaagaaatgataaatgagaaactgaagaaggcagaagatcttggtgaacaaggaatggttgatgaagcccagaaagccctggaagaggctgaagctcttaagaagcttacagttagacgagaacctccagcagattcaacgaagtacaccgctgttgatgtgcgcatcacagaccaaaagttgcgtctatgtgacatatgtggagcattcttgagcgtctatgacagtgatcgccgtttagctgatcattttggggggaagcttcatctaggatacatgctagtccgggacaaattaacagagcttctggatgagaaggccaatatacgcaaggaaagatcaaaggaacggaacagtaaggagagagaatcaagtaaagaccgagagaaagaacaagaaactagtcgtgaacatcgaagagattatgatcgcaggagtagagatcgagataggcaccatgaccgtgatcgtgaacaagacagagactatgatcggtcacactcaagaagcagacgtaggtcacgctcacggtccaggtcaagagatagaccaagggactatgatcgccacaggcgtcacaaccgctactagatcgatcggtcttgctgtctaacagggtttacaagttacaaatggttttaggatctatcaccgaaacttttttctgtctacatgtatgttactcaagtatgttagatgagtttcaaaaaatttcacatctttttcttttaccacaaactaaagacttggaagaaacaagatgtggtttatgtttttaccacatctgagaagcgtgtatgcactatcatcg

SEQ ID NO: 25843 - protein, 402 aa, Arabidopsis thaliana
  peptide (1)..(402): Ceres Seq. ID no. 13494249
  misc_feature (1)..(335): Pfam Name: LUC7 N_terminus Pfam Description: LUC7 N_terminus
  misc_feature (143)..(402): Homolog of NCBI NO: 38614131 NR Description: Unknown (protein for MGC:73932) [Mus musculus]
  misc_feature (1)..(372): Homolog of NCBI NO: 24640172 NR Description: CG3198-PA [Drosophila melanogaster]
  misc_feature (1)..(396): Homolog of NCBI NO: 11357938 NR Description: hypothetical protein K3M16_10 - Arabidopsis
  misc_feature (1)..(399): Homolog of NCBI NO: 6017114 NR Description: unknown protein [Arabidopsis thaliana]
  misc_feature (67)..(402): Homolog of NCBI NO: 11357938 NR Description: hypothetical protein K3M16_10 - Arabidopsis
  misc_feature (1)..(402): Homolog of NCBI NO: 29367401 NR Description: sarcoplasmic reticulum protein-like protein
  misc_feature (98)..(402): Homolog of NCBI NO: 6017114 NR Description: unknown protein [Arabidopsis thaliana]
  misc_feature (1)..(402): Homolog of NCBI NO: 18418301 NR Description: expressed protein [Arabidopsis thaliana]
  misc_feature (51)..(402): Homolog of NCBI NO: 21595481 NR Description: unknown [Arabidopsis thaliana]
  misc_feature (1)..(402): Homolog of NCBI NO: 30678827 NR Description: expressed protein [Arabidopsis thaliana]
MDAIRKQLDVLMGANRNGDVQEVNRKYYDRDVCRLYLSGLCPHDLFQLTKMDMGPCPKVHSLQLRKEYREARAKGVDNYDRELEDAIDRLIVECDRKIGRALKRLQEEDAKAAIAISVSEVTQSPEILELSEKIKEKMKEADIHDLEGKMDLKIRALELVEEMRTKRADQQAVLLLEAFNKDRASLPQPVPAQPPSSELPPPDPRTQEMINEKLKKAEDLGEQGMVDEAQKALEEAEALKKLTVRREPPADSTKYTAVDVRITDQKLRLCDICGAFLSVYDSDRRLADHFGGKLHLGYMLVRDKLTELLDEKANIRKERSKERNSKERESSKDREKEQETSREHRRDYDRRSRDRDRHHDRDREQDRDYDRSHSRSRRRSRSRSRSRDRPRDYDRHRRHNRY

SEQ ID NO: 25844 - protein, 391 aa, Arabidopsis thaliana
  peptide (1)..(391): Ceres Seq. ID no. 13494250
  misc_feature (1)..(324): Pfam Name: LUC7 N_terminus Pfam Description: LUC7 N_terminus
  misc_feature (87)..(391): Homolog of NCBI NO: 6017114 NR Description: unknown protein [Arabidopsis thaliana]
  misc_feature (1)..(391): Homolog of NCBI NO: 18418301 NR Description: expressed protein [Arabidopsis thaliana]
  misc_feature (132)..(391): Homolog of NCBI NO: 38614131 NR Description: Unknown (protein for MGC:73932) [Mus musculus]
  misc_feature (1)..(385): Homolog of NCBI NO: 11357938 NR Description: hypothetical protein K3M16_10 - Arabidopsis
  misc_feature (56)..(391): Homolog of NCBI NO: 11357938 NR Description: hypothetical protein K3M16_10 - Arabidopsis
  misc_feature (1)..(391): Homolog of NCBI NO: 29367401 NR Description: sarcoplasmic reticulum protein-like protein
  misc_feature (1)..(388): Homolog of NCBI NO: 6017114 NR Description: unknown protein [Arabidopsis thaliana]
  misc_feature (1)..(361): Homolog of NCBI NO: 24640172 NR Description: CG3198-PA [Drosophila melanogaster]
  misc_feature (40)..(391): Homolog of NCBI NO: 21595481 NR Description: unknown [Arabidopsis thaliana]
  misc_feature (1)..(391): Homolog of NCBI NO: 30678827 NR Description: expressed protein [Arabidopsis thaliana]
MGANRNGDVQEVNRKYYDRDVCRLYLSGLCPHDLFQLTKMDMGPCPKVHSLQLRKEYREARAKGVDNYDRELEDAIDRLIVECDRKIGRALKRLQEEDAKAAIAISVSEVTQSPEILELSEKIKEKMKEADIHDLEGKMDLKIRALELVEEMRTKRADQQAVLLLEAFNKDRASLPQPVPAQPPSSELPPPDPRTQEMINEKLKKAEDLGEQGMVDEAQKALEEAEALKKLTVRREPPADSTKYTAVDVRITDQKLRLCDICGAFLSVYDSDRRLADHFGGKLHLGYMLVRDKLTELLDEKANIRKERSKERNSKERESSKDREKEQETSREHRRDYDRRSRDRDRHHDRDREQDRDYDRSHSRSRRRSRSRSRSRDRPRDYDRHRRHNRY

SEQ ID NO: 25845 - protein, 352 aa, Arabidopsis thaliana
  peptide (1)..(352): Ceres Seq. ID no. 13494251
  misc_feature (1)..(285): Pfam Name: LUC7 N_terminus Pfam Description: LUC7 N_terminus
  misc_feature (93)..(352): Homolog of NCBI NO: 38614131 NR Description: Unknown (protein for MGC:73932) [Mus musculus]
  misc_feature (1)..(322): Homolog of NCBI NO: 24640172 NR Description: CG3198-PA [Drosophila melanogaster]
  misc_feature (1)..(346): Homolog of NCBI NO: 11357938 NR Description: hypothetical protein K3M16_10 - Arabidopsis
  misc_feature (1)..(349): Homolog of NCBI NO: 6017114 NR Description: unknown protein [Arabidopsis thaliana]
  misc_feature (17)..(352): Homolog of NCBI NO: 11357938 NR Description: hypothetical protein K3M16_10 - Arabidopsis
  misc_feature (1)..(352): Homolog of NCBI NO: 29367401 NR Description: sarcoplasmic reticulum protein-like protein
  misc_feature (48)..(352): Homolog of NCBI NO: 6017114 NR Description: unknown protein [Arabidopsis thaliana]
  misc_feature (1)..(352): Homolog of NCBI NO: 18418301 NR Description: expressed protein [Arabidopsis thaliana]
  misc_feature (1)..(352): Homolog of NCBI NO: 21595481 NR Description: unknown [Arabidopsis thaliana]
  misc_feature (1)..(352): Homolog of NCBI NO: 30678827 NR Description: expressed protein [Arabidopsis thaliana]
MDMGPCPKVHSLQLRKEYREARAKGVDNYDRELEDAIDRLIVECDRKIGRALKRLQEEDAKAAIAISVSEVTQSPEILELSEKIKEKMKEADIHDLEGKMDLKIRALELVEEMRTKRADQQAVLLLEAFNKDRASLPQPVPAQPPSSELPPPDPRTQEMINEKLKKAEDLGEQGMVDEAQKALEEAEALKKLTVRREPPADSTKYTAVDVRITDQKLRLCDICGAFLSVYDSDRRLADHFGGKLHLGYMLVRDKLTELLDEKANIRKERSKERNSKERESSKDREKEQETSREHRRDYDRRSRDRDRHHDRDREQDRDYDRSHSRSRRRSRSRSRSRDRPRDYDRHRRHNRY

SEQ ID NO: 25846 - DNA, 1418 bp, Arabidopsis thaliana
  misc_feature (1)..(1418): Ceres Seq. ID no. 12562549
  misc_feature: MA Experiment ID: 108433 Result: Up-regulated in Transcription
  misc_feature: MA Experiment 108433 PARAMETER Experiment Name: At_rhl_Mutant2_cDNA_P Parameter: Age (day) Value: 7
  misc_feature: MA Experiment 108433 PARAMETER Experiment Name: At_rhl_Mutant2_cDNA_P Parameter: Organism Value: A. thaliana
  misc_feature: MA Experiment 108433 PARAMETER Experiment Name: At_rhl_Mutant2_cDNA_P Parameter: Plant Line Value: rhl Mutant vs. wt landsburg
  misc_feature: MA Experiment 108433 PARAMETER Experiment Name: At_rhl_Mutant2_cDNA_P Parameter: Tissue Value: Roots
cctttctacccatttcgtctccttcattttgacgttttctttagatctgttaataatccatccatggcttggtctagtcactagtggtgttatctctctgtgtggaagaaaaagcaaggttttttgatcacttggattgttttaagatatggcaactttgaacccttttgatttgttggatgatgatgctgaggatccaagccagctcgctgtttccatcgagaagattgataagtccaagaaatctggaccggtttcgagcttgcctgctaagtcagctcctaagcttccctctaagccacttcctcctgctcaagccgtgagagaggccaggagtgatgctccacgtggtggtggaggccgtggaggatttaatcgtggtcgtggtggttacaaccgtgatgatggtaacaatggatatttagggggatacactaagccctcagatgaaggagatgtttcaaagtcttcttacgagaggcgtggcggtggtgaaggggagcgtcctcgaagggcctttgagcgtcgtagtggaactggcagagggagtgacttcaagcgtgacggatctggtcgtgggaattggggaactccaggggaagagatagctgctgagactgaagcagtagctggtgttgagactgagaaggatgttggagagaagccagctgttgatgatgtagctgctgatgctaacaaggagaatactgttgttgaggagaaagagcctgaggataaggaaatgactcttgatgagtatgagaaaatacttgaggagaagaaaaaggcacttcaatcattaaccacctctgagaggaaagttgatacgaaagtgtttgaatcaatgcaacaactgtcaaacaagaagtctaatgatgaaatcttcatcaagctgggttctgataaggacaaacgcaaagatgacaaagaagagaaggctaagaaggctgtgagcatcaatgagtttctgaagccagcagagggtgggaactactaccgaggaggccgtggtggccgtggacgtggtggtcgtggccgtggaggtgtttctagtggcgaatctggtggttaccgtaatgaagctgcaccagctattggagatgctgctcagttcccatctcttgggggcaagtaagatacatccatgataacgtccatactcgtgcatcctcctttaggattttgtgcgaggatttactgtttactggtctctcgttgtcagatgtaaataattaggtgtcgtcgtcagtttttagattttatgctaaactttacacttgttggtgttctttacttttgaaacactacactcttcttagttttaccattttactcgttttgtgtttgttgttttcttattgggatatgaaacatgttttgagacggacatatctaatgttatcggggttgagtctttt

SEQ ID NO: 25847 - protein, 328 aa, Arabidopsis thaliana
  peptide (1)..(328): Ceres Seq. ID no. 12562550
  misc_feature (114)..(271): Pfam Name: Hyaluronan / mRNA binding family Pfam Description: Hyaluronan / mRNA binding family
  misc_feature (114)..(271): Pfam Name: Hyaluronan / mRNA binding family Pfam Description: Hyaluronan / mRNA binding family
  misc_feature (29)..(326): Homolog of NCBI NO: 21593013 NR Description: nuclear RNA binding protein A-like protein
  misc_feature (1)..(306): Homolog of NCBI NO: 21537052 NR Description: nuclear antigen homolog [Arabidopsis thaliana]
  misc_feature (1)..(260): Homolog of NCBI NO: 15235894 NR Description: nuclear antigen homolog
  misc_feature (5)..(328): Homolog of NCBI NO: 39725276 NR Description: salt tolerance protein 1 [Beta vulgaris]
  misc_feature (70)..(328): Homolog of NCBI NO: 6492262 NR Description: nuclear RNA binding protein [Nicotiana tabacum]
  misc_feature (29)..(326): Homolog of NCBI NO: 21593013 NR Description: nuclear RNA binding protein A-like protein
  misc_feature (1)..(260): Homolog of NCBI NO: 15235894 NR Description: nuclear antigen homolog
  misc_feature (70)..(328): Homolog of NCBI NO: 6492262 NR Description: nuclear RNA binding protein [Nicotiana tabacum]
  misc_feature (16)..(328): Homolog of NCBI NO: 15235894 NR Description: nuclear antigen homolog
  misc_feature (29)..(328): Homolog of NCBI NO: 21537052 NR Description: nuclear antigen homolog [Arabidopsis thaliana]
  misc_feature (94)..(328): Homolog of NCBI NO: 7488863 NR Description: probable transcription factor - fava bean
  misc_feature (14)..(328): Homolog of NCBI NO: 6492266 NR Description: nuclear RNA binding protein A [Spinacia oleracea]
  misc_feature (62)..(326): Homolog of NCBI NO: 39725278 NR Description: salt tolerance protein 2 [Beta vulgaris]
  misc_feature (5)..(328): Homolog of NCBI NO: 39725276 NR Description: salt tolerance protein 1 [Beta vulgaris]
  misc_feature (1)..(306): Homolog of NCBI NO: 21537052 NR Description: nuclear antigen homolog [Arabidopsis thaliana]
  misc_feature (62)..(326): Homolog of NCBI NO: 39725278 NR Description: salt tolerance protein 2 [Beta vulgaris]
  misc_feature (14)..(328): Homolog of NCBI NO: 6492266 NR Description: nuclear RNA binding protein A [Spinacia oleracea]
  misc_feature (94)..(328): Homolog of NCBI NO: 7488863 NR Description: probable transcription factor - fava bean
  misc_feature (29)..(328): Homolog of NCBI NO: 21537052 NR Description: nuclear antigen homolog [Arabidopsis thaliana]
  misc_feature (16)..(328): Homolog of NCBI NO: 15235894 NR Description: nuclear antigen homolog
MATLNPFDLLDDDAEDPSQLAVSIEKIDKSKKSGPVSSLPAKSAPKLPSKPLPPAQAVREARSDAPRGGGGRGGFNRGRGGYNRDDGNNGYLGGYTKPSDEGDVSKSSYERRGGGEGERPRRAFERRSGTGRGSDFKRDGSGRGNWGTPGEEIAAETEAVAGVETEKDVGEKPAVDDVAADANKENTVVEEKEPEDKEMTLDEYEKILEEKKKALQSLTTSERKVDTKVFESMQQLSNKKSNDEIFIKLGSDKDKRKDDKEEKAKKAVSINEFLKPAEGGNYYRGGRGGRGRGGRGRGGVSSGESGGYRNEAAPAIGDAAQFPSLGGK

SEQ ID NO: 25848 - DNA, 771 bp, Arabidopsis thaliana
  misc_feature (1)..(771): Ceres Seq. ID no. 13503800
  misc_feature: MA Experiment ID: 108434 Result: Down-regulated in Transcription
  misc_feature: MA Experiment 108434 PARAMETER Experiment Name: At_Root_Tips_cDNA_P Parameter: Tissue Value: Root Tips
  misc_feature: MA Experiment ID: 20000214 Result: Up-regulated in Transcription
  misc_feature: MA Experiment 20000214 PARAMETER Experiment Name: At_4deg_Cold_P Parameter: Timepoint (hr) Value: 6
  misc_feature: MA Experiment ID: 20001451 Result: Up-regulated in Transcription
  misc_feature: MA Experiment 20001451 PARAMETER Experiment Name: At_Far-red-induction_P Parameter: Age (day) Value: 7
  misc_feature: MA Experiment 20001451 PARAMETER Experiment Name: At_Far-red-induction_P Parameter: Light Value: Far-red vs. White
  misc_feature: MA Experiment 20001451 PARAMETER Experiment Name: At_Far-red-induction_P Parameter: Organism Value: A. thaliana
  misc_feature: MA Experiment 20001451 PARAMETER Experiment Name: At_Far-red-induction_P Parameter: Plant Line Value: Columbia
  misc_feature: MA Experiment 20001451 PARAMETER Experiment Name: At_Far-red-induction_P Parameter: Timepoint (hr) Value: 24
  misc_feature: MA Experiment 20001451 PARAMETER Experiment Name: At_Far-red-induction_P Parameter: Tissue Value: Whole Plant
agtactttgaacattctctctctctcttttatctctgagattgcttcttcgctattgctcaattctctctctcacctaaccctaattattcattattcctgagattcatcggcgatgagttcggaggaagccaaggtcgttgttccgaggaactttagattgttggaagagcttgaaagaggtgagaaaggtattggagatggtactgttagctatggaatggatgatgctgatgatatttatatgcaatcttggactggcaccattcttggtcctcctaatactgcatatgaagggaaaatctttcagctgaagcttttctgtggtaaggagtaccctgaaagtccaccgactgtgaggttccagacccggataaacatggcttgtgttaacccagaaactggagtggttgaaccgagtctcttccctatgctcactaactggcggcgagaatatacaatggaggacatactggttaagctgaaaaaagaaatgatgacttcgcataaccggaagttagctcaacccccggaaggtaacgaggaagctagggcagatccaaaaggaccagctaaatgttgtgtgatgtgaagagaggttggtgggaatcagctatttgtattaatagaaggaacagtgtatataaaacatcatttgaagctttgaaattccctacaacttcctaatgttatagtcttgtttgagaatatatatatgtccgccaaaaacagttgatgattattttaataaacctcatctctactttctctc

SEQ ID NO: 25849 - protein, 158 aa, Arabidopsis thaliana
  peptide (1)..(158): Ceres Seq. ID no. 13503801
  misc_feature (6)..(141): Homolog of NCBI NO: 2982253 NR Description: CROC-1-like protein [Picea mariana]
  misc_feature (6)..(141): Homolog of NCBI NO: 30686662 NR Description: ubiquitin-conjugating enzyme family [Arabidopsis
  misc_feature (6)..(141): Homolog of NCBI NO: 18404032 NR Description: ubiquitin-conjugating enzyme family [Arabidopsis
  misc_feature (1)..(141): Homolog of NCBI NO: 30693656 NR Description: ubiquitin-conjugating enzyme family [Arabidopsis
  misc_feature (1)..(141): Homolog of NCBI NO: 18409633 NR Description: ubiquitin-conjugating enzyme family [Arabidopsis
  misc_feature (10)..(158): Homolog of NCBI NO: 13324790 NR Description: putative DNA-binding protein [Oryza sativa]
  misc_feature (1)..(158): Homolog of NCBI NO: 18409647 NR Description: ubiquitin-conjugating enzyme family [Arabidopsis
  misc_feature (1)..(158): Homolog of NCBI NO: 21593918 NR Description: E2, ubiquitin-conjugating enzyme, putative
  misc_feature (1)..(158): Homolog of NCBI NO: 25326240 NR Description: protein F26F24.10 [imported] - Arabidopsis
  misc_feature (1)..(158): Homolog of NCBI NO: 18395221 NR Description: ubiquitin-conjugating enzyme family [Arabidopsis
  misc_feature (6)..(141): Homolog of NCBI NO: 2982253 NR Description: CROC-1-like protein [Picea mariana]
  misc_feature (6)..(141): Homolog of NCBI NO: 30686662 NR Description: ubiquitin-conjugating enzyme family [Arabidopsis
  misc_feature (6)..(141): Homolog of NCBI NO: 18404032 NR Description: ubiquitin-conjugating enzyme family [Arabidopsis
  misc_feature (1)..(141): Homolog of NCBI NO: 30693656 NR Description: ubiquitin-conjugating enzyme family [Arabidopsis
  misc_feature (1)..(141): Homolog of NCBI NO: 18409633 NR Description: ubiquitin-conjugating enzyme family [Arabidopsis
  misc_feature (10)..(158): Homolog of NCBI NO: 13324790 NR Description: putative DNA-binding protein [Oryza sativa]
  misc_feature (1)..(158): Homolog of NCBI NO: 18409647 NR Description: ubiquitin-conjugating enzyme family [Arabidopsis
  misc_feature (1)..(158): Homolog of NCBI NO: 21593918 NR Description: E2, ubiquitin-conjugating enzyme, putative
  misc_feature (1)..(158): Homolog of NCBI NO: 25326240 NR Description: protein F26F24.10 [imported] - Arabidopsis
  misc_feature (1)..(158): Homolog of NCBI NO: 18395221 NR Description: ubiquitin-conjugating enzyme family [Arabidopsis
MSSEEAKVVVPRNFRLLEELERGEKGIGDGTVSYGMDDADDIYMQSWTGTILGPPNTAYEGKIFQLKLFCGKEYPESPPTVRFQTRINMACVNPETGVVEPSLFPMLTNWRREYTMEDILVKLKKEMMTSHNRKLAQPPEGNEEARADPKGPAKCCVM

SEQ ID NO: 25850 - protein, 123 aa, Arabidopsis thaliana
  peptide (1)..(123): Ceres Seq. ID no. 13503802
  misc_feature (1)..(106): Homolog of NCBI NO: 2982253 NR Description: CROC-1-like protein [Picea mariana]
  misc_feature (1)..(106): Homolog of NCBI NO: 30686662 NR Description: ubiquitin-conjugating enzyme family [Arabidopsis
  misc_feature (1)..(106): Homolog of NCBI NO: 18404032 NR Description: ubiquitin-conjugating enzyme family [Arabidopsis
  misc_feature (1)..(106): Homolog of NCBI NO: 30693656 NR Description: ubiquitin-conjugating enzyme family [Arabidopsis
  misc_feature (1)..(106): Homolog of NCBI NO: 18409633 NR Description: ubiquitin-conjugating enzyme family [Arabidopsis
  misc_feature (1)..(123): Homolog of NCBI NO: 13324790 NR Description: putative DNA-binding protein [Oryza sativa]
  misc_feature (1)..(123): Homolog of NCBI NO: 18409647 NR Description: ubiquitin-conjugating enzyme family [Arabidopsis
  misc_feature (1)..(123): Homolog of NCBI NO: 21593918 NR Description: E2, ubiquitin-conjugating enzyme, putative
  misc_feature (1)..(123): Homolog of NCBI NO: 25326240 NR Description: protein F26F24.10 [imported] - Arabidopsis
  misc_feature (1)..(123): Homolog of NCBI NO: 18395221 NR Description: ubiquitin-conjugating enzyme family [Arabidopsis
  misc_feature (1)..(106): Homolog of NCBI NO: 2982253 NR Description: CROC-1-like protein [Picea mariana]
  misc_feature (1)..(106): Homolog of NCBI NO: 30686662 NR Description: ubiquitin-conjugating enzyme family [Arabidopsis
  misc_feature (1)..(106): Homolog of NCBI NO: 18404032 NR Description: ubiquitin-conjugating enzyme family [Arabidopsis
  misc_feature (1)..(106): Homolog of NCBI NO: 30693656 NR Description: ubiquitin-conjugating enzyme family [Arabidopsis
  misc_feature (1)..(106): Homolog of NCBI NO: 18409633 NR Description: ubiquitin-conjugating enzyme family [Arabidopsis
  misc_feature (1)..(123): Homolog of NCBI NO: 13324790 NR Description: putative DNA-binding protein [Oryza sativa]
  misc_feature (1)..(123): Homolog of NCBI NO: 18409647 NR Description: ubiquitin-conjugating enzyme family [Arabidopsis
  misc_feature (1)..(123): Homolog of NCBI NO: 21593918 NR Description: E2, ubiquitin-conjugating enzyme, putative
  misc_feature (1)..(123): Homolog of NCBI NO: 25326240 NR Description: protein F26F24.10 [imported] - Arabidopsis
  misc_feature (1)..(123): Homolog of NCBI NO: 18395221 NR Description: ubiquitin-conjugating enzyme family [Arabidopsis
MDDADDIYMQSWTGTILGPPNTAYEGKIFQLKLFCGKEYPESPPTVRFQTRINMACVNPETGVVEPSLFPMLTNWRREYTMEDILVKLKKEMMTSHNRKLAQPPEGNEEARADPKGPAKCCVM

SEQ ID NO: 25851 - protein, 115 aa, Arabidopsis thaliana
  peptide (1)..(115): Ceres Seq. ID no. 13503803
  misc_feature (1)..(98): Homolog of NCBI NO: 2982253 NR Description: CROC-1-like protein [Picea mariana]
  misc_feature (1)..(98): Homolog of NCBI NO: 30686662 NR Description: ubiquitin-conjugating enzyme family [Arabidopsis
  misc_feature (1)..(98): Homolog of NCBI NO: 18404032 NR Description: ubiquitin-conjugating enzyme family [Arabidopsis
  misc_feature (1)..(98): Homolog of NCBI NO: 30693656 NR Description: ubiquitin-conjugating enzyme family [Arabidopsis
  misc_feature (1)..(98): Homolog of NCBI NO: 18409633 NR Description: ubiquitin-conjugating enzyme family [Arabidopsis
  misc_feature (1)..(115): Homolog of NCBI NO: 13324790 NR Description: putative DNA-binding protein [Oryza sativa]
  misc_feature (1)..(115): Homolog of NCBI NO: 18409647 NR Description: ubiquitin-conjugating enzyme family [Arabidopsis
  misc_feature (1)..(115): Homolog of NCBI NO: 21593918 NR Description: E2, ubiquitin-conjugating enzyme, putative
  misc_feature (1)..(115): Homolog of NCBI NO: 25326240 NR Description: protein F26F24.10 [imported] - Arabidopsis
  misc_feature (1)..(115): Homolog of NCBI NO: 18395221 NR Description: ubiquitin-conjugating enzyme family [Arabidopsis
  misc_feature (1)..(98): Homolog of NCBI NO: 2982253 NR Description: CROC-1-like protein [Picea mariana]
  misc_feature (1)..(98): Homolog of NCBI NO: 30686662 NR Description: ubiquitin-conjugating enzyme family [Arabidopsis
  misc_feature (1)..(98): Homolog of NCBI NO: 18404032 NR Description: ubiquitin-conjugating enzyme family [Arabidopsis
  misc_feature (1)..(98): Homolog of NCBI NO: 30693656 NR Description: ubiquitin-conjugating enzyme family [Arabidopsis
  misc_feature (1)..(98): Homolog of NCBI NO: 18409633 NR Description: ubiquitin-conjugating enzyme family [Arabidopsis
  misc_feature (1)..(115): Homolog of NCBI NO: 13324790 NR Description: putative DNA-binding protein [Oryza sativa]
  misc_feature (1)..(115): Homolog of NCBI NO: 18409647 NR Description: ubiquitin-conjugating enzyme family [Arabidopsis
  misc_feature (1)..(115): Homolog of NCBI NO: 21593918 NR Description: E2, ubiquitin-conjugating enzyme, putative
  misc_feature (1)..(115): Homolog of NCBI NO: 25326240 NR Description: protein F26F24.10 [imported] - Arabidopsis
  misc_feature (1)..(115): Homolog of NCBI NO: 18395221 NR Description: ubiquitin-conjugating enzyme family [Arabidopsis
MQSWTGTILGPPNTAYEGKIFQLKLFCGKEYPESPPTVRFQTRINMACVNPETGVVEPSLFPMLTNWRREYTMEDILVKLKKEMMTSHNRKLAQPPEGNEEARADPKGPAKCCVM

SEQ ID NO: 25852 - DNA, 1106 bp, Arabidopsis thaliana
  misc_feature (1)..(1106): Ceres Seq. ID no. 12326637
  misc_feature: MA Experiment ID: 108434 Result: Up-regulated in Transcription
  misc_feature: MA Experiment 108434 PARAMETER Experiment Name: At_Root_Tips_cDNA_P Parameter: Tissue Value: Root Tips
  misc_feature: MA Experiment ID: 108461 Result: Down-regulated in Transcription
  misc_feature: MA Experiment 108461 PARAMETER Experiment Name: At_Germinating_Seeds_cDNA_P Parameter: Age (day) Value: 1 vs. 0
  misc_feature: MA Experiment 108461 PARAMETER Experiment Name: At_Germinating_Seeds_cDNA_P Parameter: Tissue Value: Germinating Seeds
  misc_feature: MA Experiment ID: 108462 Result: Down-regulated in Transcription
  misc_feature: MA Experiment 108462 PARAMETER Experiment Name: At_Germinating_Seeds_cDNA_P Parameter: Age (day) Value: 2 vs. 0
  misc_feature: MA Experiment 108462 PARAMETER Experiment Name: At_Germinating_Seeds_cDNA_P Parameter: Tissue Value: Germinating Seeds
  misc_feature: MA Experiment ID: 108463 Result: Down-regulated in Transcription
  misc_feature: MA Experiment 108463 PARAMETER Experiment Name: At_Germinating_Seeds_cDNA_P Parameter: Age (day) Value: 3 vs. 0
  misc_feature: MA Experiment 108463 PARAMETER Experiment Name: At_Germinating_Seeds_cDNA_P Parameter: Tissue Value: Germinating Seeds
  misc_feature: MA Experiment ID: 108464 Result: Down-regulated in Transcription
  misc_feature: MA Experiment 108464 PARAMETER Experiment Name: At_Germinating_Seeds_cDNA_P Parameter: Age (day) Value: 4 vs. 0
  misc_feature: MA Experiment 108464 PARAMETER Experiment Name: At_Germinating_Seeds_cDNA_P Parameter: Tissue Value: Germinating Seeds
  misc_feature: MA Experiment ID: 108573 Result: Down-regulated in Transcription
  misc_feature: MA Experiment 108573 PARAMETER Experiment Name: At_Drought_cDNA_P Parameter: Timepoint (hr) Value: 6
  misc_feature: MA Experiment 108573 PARAMETER Experiment Name: At_Drought_cDNA_P Parameter: Tissue Value: Aerial
  misc_feature: MA Experiment 108573 PARAMETER Experiment Name: At_Drought_cDNA_P Parameter: Treatment Value: Drought vs. No Drought
  misc_feature: MA Experiment ID: 108585 Result: Down-regulated in Transcription
  misc_feature: MA Experiment 108585 PARAMETER Experiment Name: At_5mM_NaNP_cDNA_P Parameter: Timepoint (hr) Value: 6
  misc_feature: MA Experiment 108585 PARAMETER Experiment Name: At_5mM_NaNP_cDNA_P Parameter: Tissue Value: Aerial
  misc_feature: MA Experiment 108585 PARAMETER Experiment Name: At_5mM_NaNP_cDNA_P Parameter: Treatment Value: null
  misc_feature: MA Experiment ID: 20000224 Result: Up-regulated in Transcription
  misc_feature: MA Experiment ID: 20000227 Result: Up-regulated in Transcription
  misc_feature: MA Experiment 20000227 PARAMETER Experiment Name: At_Root-Tips-vs-Tops_P Parameter: Tissue Value: Root Tips vs. Root Tops
  misc_feature: MA Experiment ID: 20000794 Result: Down-regulated in Transcription
  misc_feature: MA Experiment 20000794 PARAMETER Experiment Name: At_Petals_P Parameter: Age (day) Value: 23-25 days
  misc_feature: MA Experiment 20000794 PARAMETER Experiment Name: At_Petals_P Parameter: Plant Line Value: WS
  misc_feature: MA Experiment 20000794 PARAMETER Experiment Name: At_Petals_P Parameter: Tissue Value: Petals vs. Whole plant
  misc_feature: MA Experiment ID: 20001247 Result: Down-regulated in Transcription
  misc_feature: MA Experiment 20001247 PARAMETER Experiment Name: At_Far-red-induction_P Parameter: Age (day) Value: 7
  misc_feature: MA Experiment 20001247 PARAMETER Experiment Name: At_Far-red-induction_P Parameter: Light Value: Far-red vs. White
  misc_feature: MA Experiment 20001247 PARAMETER Experiment Name: At_Far-red-induction_P Parameter: Organism Value: A. thaliana
  misc_feature: MA Experiment 20001247 PARAMETER Experiment Name: At_Far-red-induction_P Parameter: Plant Line Value: Columbia
  misc_feature: MA Experiment 20001247 PARAMETER Experiment Name: At_Far-red-induction_P Parameter: Timepoint (hr) Value: 1
  misc_feature: MA Experiment 20001247 PARAMETER Experiment Name: At_Far-red-induction_P Parameter: Tissue Value: Whole Plant
  misc_feature: MA Experiment ID: 20001458 Result: Up-regulated in Transcription
  misc_feature: MA Experiment 20001458 PARAMETER Experiment Name: At_50mM_NH4NO3_L-to-H_P Parameter: Age (day) Value: Undefined
  misc_feature: MA Experiment 20001458 PARAMETER Experiment Name: At_50mM_NH4NO3_L-to-H_P Parameter: Organism Value: Undefined
  misc_feature: MA Experiment 20001458 PARAMETER Experiment Name: At_50mM_NH4NO3_L-to-H_P Parameter: Plant Line Value: Undefined
  misc_feature: MA Experiment 20001458 PARAMETER Experiment Name: At_50mM_NH4NO3_L-to-H_P Parameter: Timepoint (hr) Value: 2
  misc_feature: MA Experiment 20001458 PARAMETER Experiment Name: At_50mM_NH4NO3_L-to-H_P Parameter: Tissue Value: Siliques
  misc_feature: MA Experiment 20001458 PARAMETER Experiment Name: At_50mM_NH4NO3_L-to-H_P Parameter: Treatment Value: 50mM NH4NO3 vs. 100mM Manitol
  misc_feature: MA Experiment ID: 20001555 Result: Up-regulated in Transcription
  misc_feature: MA Experiment 20001555 PARAMETER Experiment Name: At_Drought_Soil_Dry_P Parameter: Age (day) Value: 24
  misc_feature: MA Experiment 20001555 PARAMETER Experiment Name: At_Drought_Soil_Dry_P Parameter: Organism Value: A. thaliana
  misc_feature: MA Experiment 20001555 PARAMETER Experiment Name: At_Drought_Soil_Dry_P Parameter: Plant Line Value: WS
  misc_feature: MA Experiment 20001555 PARAMETER Experiment Name: At_Drought_Soil_Dry_P Parameter: Post Timepoint (hr) Value: None
  misc_feature: MA Experiment 20001555 PARAMETER Experiment Name: At_Drought_Soil_Dry_P Parameter: Post-Treatment Value: None
  misc_feature: MA Experiment 20001555 PARAMETER Experiment Name: At_Drought_Soil_Dry_P Parameter: Timepoint (day) Value: 10
  misc_feature: MA Experiment 20001555 PARAMETER Experiment Name: At_Drought_Soil_Dry_P Parameter: Treatment Value: Drought vs. No Drought
  misc_feature: MA Experiment ID: 20001556 Result: Up-regulated in Transcription
  misc_feature: MA Experiment 20001556 PARAMETER Experiment Name: At_Drought_Soil_Dry_P Parameter: Age (day) Value: 26
  misc_feature: MA Experiment 20001556 PARAMETER Experiment Name: At_Drought_Soil_Dry_P Parameter: Organism Value: A. thaliana
  misc_feature: MA Experiment 20001556 PARAMETER Experiment Name: At_Drought_Soil_Dry_P Parameter: Plant Line Value: WS
  misc_feature: MA Experiment 20001556 PARAMETER Experiment Name: At_Drought_Soil_Dry_P Parameter: Post Timepoint (hr) Value: None
  misc_feature: MA Experiment 20001556 PARAMETER Experiment Name: At_Drought_Soil_Dry_P Parameter: Post-Treatment Value: None
  misc_feature: MA Experiment 20001556 PARAMETER Experiment Name: At_Drought_Soil_Dry_P Parameter: Timepoint (day) Value: 12
  misc_feature: MA Experiment 20001556 PARAMETER Experiment Name: At_Drought_Soil_Dry_P Parameter: Treatment Value: Drought vs. No Drought
  misc_feature: MA Experiment ID: 20001558 Result: Up-regulated in Transcription
  misc_feature: MA Experiment 20001558 PARAMETER Experiment Name: At_Drought_Soil_Dry_P Parameter: Age (day) Value: 27
  misc_feature: MA Experiment 20001558 PARAMETER Experiment Name: At_Drought_Soil_Dry_P Parameter: Organism Value: A. thaliana
  misc_feature: MA Experiment 20001558 PARAMETER Experiment Name: At_Drought_Soil_Dry_P Parameter: Plant Line Value: WS
  misc_feature: MA Experiment 20001558 PARAMETER Experiment Name: At_Drought_Soil_Dry_P Parameter: Post Timepoint (hr) Value: 6
  misc_feature: MA Experiment 20001558 PARAMETER Experiment Name: At_Drought_Soil_Dry_P Parameter: Post-Treatment Value: Re-Water vs. No Drought
  misc_feature: MA Experiment 20001558 PARAMETER Experiment Name: At_Drought_Soil_Dry_P Parameter: Timepoint (day) Value: 13
  misc_feature: MA Experiment 20001558 PARAMETER Experiment Name: At_Drought_Soil_Dry_P Parameter: Treatment Value: Drought vs. No Drought
  misc_feature: MA Experiment ID: 20001757 Result: Up-regulated in Transcription
  misc_feature: MA Experiment 20001757 PARAMETER Experiment Name: At_50mM_NH4NO3_L-to-H_P Parameter: Timepoint (hr) Value: 6
  misc_feature: MA Experiment 20001757 PARAMETER Experiment Name: At_50mM_NH4NO3_L-to-H_P Parameter: Tissue Value: Leaf
  misc_feature: MA Experiment 20001757 PARAMETER Experiment Name: At_50mM_NH4NO3_L-to-H_P Parameter: Treatment Value: 50mM NH4NO3 vs 100mM Mannitol
atcgggagctagggttttagctgattctcttgtgacggaaccacaagaagagaagagaccaaaaggaggagccaaaatcctctctttctttggaattagggtttcctcaaaggaagtgaactgaaaatggtcgcggacaagagcaagaagtcgaaaattgaagagaaaggcgaagaagaaaacttggagcaaatcgacgcagagcttgttctctcaattgagaagcttcaggagattcaagacgacctcgagaagattaacgaaaaggccagtgacgaggtcttggaagtagagcagaaatataacgtgatacggaaacctgtctatgacaagcgcaatgaagttatccaatcgattcctggcttttggatgactgcttttttgagtcatcctgccttaggcgacctcttgactgaagaagaccaaaagatttttaagtacttgaactctctggaagtggaggatgccaaagatgtgaaatctggatactctataacttttcacttcacttcaaacccgttctttgaggatgccaagcttaccaagacatttactttccttgaagaaggaacaacaaaaatcactgcaactcctatcaaatggaaggagggcaagggcttgccaaatggagtgaaccatgatgataagaaaggaaataaacgtgcattgccagaggagagtttctttacttggtttactgatgctcaacataaggaagatgctggggatgagattcatgatgaggttgctgatattatcaaggaagatctctggtccaaccctctcacctacttcaacaatgatgctgatgaagaggattttgatggagatgatgatggtgacgaagagggagaagaagacgatgacgatgaagaggaggaagatggtgaggaatgatgggagcccaaagataacacattgctggcttgcttctataacagatgtgtaaagtttgtgttatgaggttctcaattttagcaatgatgagactaagctttctcttttggaatatttagtttatttactatcaatagctacattctgtttgtacgaaccatgtcatcatccatgtcctaaatcttgccataactacatctgtttttcgc

SEQ ID NO: 25853 - protein, 256 aa, Arabidopsis thaliana
  peptide (1)..(256): Ceres Seq. ID no. 12326638
  misc_feature (31)..(229): Pfam Name: Nucleosome assembly protein (NAP) Pfam Description: Nucleosome assembly protein (NAP)
  misc_feature (10)..(256): Homolog of NCBI NO: 13591862 NR Description: SET translocation [Mus musculus]
  misc_feature (10)..(256): Homolog of NCBI NO: 2144099 NR Description: Set alpha isoform - rat
  misc_feature (1)..(256): Homolog of NCBI NO: 2253411 NR Description: PP2A inhibitor [Tetraodon fluviatilis]
  misc_feature (1)..(256): Homolog of NCBI NO: 21739223 NR Description: OSJNBa0072F16.2 [Oryza sativa (japonica
  misc_feature (3)..(253): Homolog of NCBI NO: 14550110 NR Description: nucleosome/chromatin assembly factor A [Zea mays]
  misc_feature (3)..(256): Homolog of NCBI NO: 14550112 NR Description: nucleosome/chromatin assembly factor A [Zea mays]
  misc_feature (1)..(231): Homolog of NCBI NO: 26451105 NR Description: unknown protein [Arabidopsis thaliana]
  misc_feature (1)..(256): Homolog of NCBI NO: 18394656 NR Description: expressed protein
  misc_feature (1)..(256): Homolog of NCBI NO: 25354177 NR Description: hypothetical protein F6A14.10 [imported] -
  misc_feature (1)..(256): Homolog of NCBI NO: 15221298 NR Description: putative SET protein, phospatase 2A inhibitor
MVADKSKKSKIEEKGEEENLEQIDAELVLSIEKLQEIQDDLEKINEKASDEVLEVEQKYNVIRKPVYDKRNEVIQSIPGFWMTAFLSHPALGDLLTEEDQKIFKYLNSLEVEDAKDVKSGYSITFHFTSNPFFEDAKLTKTFTFLEEGTTKITATPIKWKEGKGLPNGVNHDDKKGNKRALPEESFFTWFTDAQHKEDAGDEIHDEVADIIKEDLWSNPLTYFNNDADEEDFDGDDDGDEEGEEDDDDEEEEDGEE

SEQ ID NO: 25854 - protein, 175 aa, Arabidopsis thaliana
  peptide (1)..(175): Ceres Seq. ID no. 12326639
  misc_feature (1)..(148): Pfam Name: Nucleosome assembly protein (NAP) Pfam Description: Nucleosome assembly protein (NAP)
  misc_feature (1)..(175): Homolog of NCBI NO: 13591862 NR Description: SET translocation [Mus musculus]
  misc_feature (1)..(175): Homolog of NCBI NO: 2144099 NR Description: Set alpha isoform - rat
  misc_feature (1)..(175): Homolog of NCBI NO: 2253411 NR Description: PP2A inhibitor [Tetraodon fluviatilis]
  misc_feature (1)..(175): Homolog of NCBI NO: 21739223 NR Description: OSJNBa0072F16.2 [Oryza sativa (japonica
  misc_feature (1)..(172): Homolog of NCBI NO: 14550110 NR Description: nucleosome/chromatin assembly factor A [Zea mays]
  misc_feature (1)..(175): Homolog of NCBI NO: 14550112 NR Description: nucleosome/chromatin assembly factor A [Zea mays]
  misc_feature (1)..(150): Homolog of NCBI NO: 26451105 NR Description: unknown protein [Arabidopsis thaliana]
  misc_feature (1)..(175): Homolog of NCBI NO: 18394656 NR Description: expressed protein
  misc_feature (1)..(175): Homolog of NCBI NO: 25354177 NR Description: hypothetical protein F6A14.10 [imported] -
  misc_feature (1)..(175): Homolog of NCBI NO: 15221298 NR Description: putative SET protein, phospatase 2A inhibitor
MTAFLSHPALGDLLTEEDQKIFKYLNSLEVEDAKDVKSGYSITFHFTSNPFFEDAKLTKTFTFLEEGTTKITATPIKWKEGKGLPNGVNHDDKKGNKRALPEESFFTWFTDAQHKEDAGDEIHDEVADIIKEDLWSNPLTYFNNDADEEDFDGDDDGDEEGEEDDDDEEEEDGEE

SEQ ID NO: 25855 - DNA, 2274 bp, Arabidopsis thaliana
  misc_feature (1)..(2274): Ceres Seq. ID no. 13591529
  misc_feature: MA Experiment ID: 20000327 Result: Up-regulated in Transcription
  misc_feature: MA Experiment 20000327 PARAMETER Experiment Name: At_42deg_Heat_Sub_P Parameter: Age (day) Value: 14
  misc_feature: MA Experiment 20000327 PARAMETER Experiment Name: At_42deg_Heat_Sub_P Parameter: Organism Value: A. thaliana
  misc_feature: MA Experiment 20000327 PARAMETER Experiment Name: At_42deg_Heat_Sub_P Parameter: Plant Line Value: WS
  misc_feature: MA Experiment 20000327 PARAMETER Experiment Name: At_42deg_Heat_Sub_P Parameter: Temperature (deg C) Value: 42 vs. 22
  misc_feature: MA Experiment 20000327 PARAMETER Experiment Name: At_42deg_Heat_Sub_P Parameter: Timepoint (hr) Value: 1
  misc_feature: MA Experiment 20000327 PARAMETER Experiment Name: At_42deg_Heat_Sub_P Parameter: Tissue Value: Aerial
  misc_feature: MA Experiment ID: 20000328 Result: Up-regulated in Transcription
  misc_feature: MA Experiment 20000328 PARAMETER Experiment Name: At_42deg_Heat_Sub_P Parameter: Age (day) Value: 14
  misc_feature: MA Experiment 20000328 PARAMETER Experiment Name: At_42deg_Heat_Sub_P Parameter: Organism Value: A. thaliana
  misc_feature: MA Experiment 20000328 PARAMETER Experiment Name: At_42deg_Heat_Sub_P Parameter: Plant Line Value: WS
  misc_feature: MA Experiment 20000328 PARAMETER Experiment Name: At_42deg_Heat_Sub_P Parameter: Temperature (deg C) Value: 42 vs. 22
  misc_feature: MA Experiment 20000328 PARAMETER Experiment Name: At_42deg_Heat_Sub_P Parameter: Timepoint (hr) Value: 6
  misc_feature: MA Experiment 20000328 PARAMETER Experiment Name: At_42deg_Heat_Sub_P Parameter: Tissue Value: Aerial
aaaacaagttcattcgatctatagagacgaaacaaaaagagagatcgtacgcaaaagtttccgatatggctcgctcgtttggagctaacagtaccgttgtgttggcgatcatcttcttcggatgtttatttgcgttgtcctctgcaatagaagaggctacgaagttaggatcagtgatagggatagatcttggtactacttactcttgtgttggtgtttacaagaatggtcatgtcgaaattattgccaatgaccaaggaaaccgtattacaccttcatgggttggttttactgactctgaaagactcattggtgaggctgctaagaatcaagcagctgttaatccagagaggactgtcttcgacgttaagagattgatcgggcgaaaatttgaggataaggaggttcaaaaggataggaaacttgtaccttaccagattgtgaacaaggatggtaagccatacattcaagtcaagatcaaggatggtgagactaaggttttcagtcctgaggagattagtgctatgattctgactaagatgaaggagacagctgaagcctaccttggaaagaaaatcaaggacgctgttgtcactgttccagcttacttcaatgatgctcaaaggcaagctactaaggatgctggtgttattgctgggctcaatgttgctagaatcattaatgaacctactgctgctgctattgcctatggtcttgataagaagggtggcgagaagaatatccttgtgtttgatcttggtggtggtacttttgatgtcagtgtcttgaccattgataacggagtgtttgaggttctctccacaaatggtgacactcacttgggaggtgaggactttgaccacagggtgatggagtacttcatcaagttgattaagaagaagcaccagaaggacatcagcaaggacaacaaggctcttggtaagctccgaagggaatgtgagagggcaaagagagctctaagtagtcagcaccaagtccgtgtagagattgagtcactctttgatggtgttgatttttctgagccactcaccagagctcgtttcgaggagcttaacaatgatttgttcaggaagaccatgggacctgtgaagaaggccatggatgatgccggtctacagaagagccagatcgatgagattgtccttgttggtggaagcaccaggatcccaaaggttcagcaactgttgaaggacttctttgaaggtaaagagccaaacaagggtgtgaaccccgacgaggctgttgcctatggtgctgctgttcagggtggtattttgagcggagaaggcggtgatgagaccaaagatatccttcttcttgatgttgcgccactcactttgggtatcgagactgtaggaggagtgatgacaaagttgatcccgagaaacacggttattccaaccaagaaatctcaggttttcacaacgtaccaagaccagcagactaccgtctccattcaggtctttgaaggtgaacgaagtctcaccaaggactgcaggctactcgggaaattcgacctcaatggaatcccaccggccccaagaggaacccctcaaatcgaggtcacattcgaagtggacgccaacggtattcttaatgtgaaagcagaggacaaggcgagtggtaaatcagagaagattactatcacaaacgagaagggtcgtctgagccaagaagagattgaccggatggtgaaggaggcagaggagtttgcagaggaagacaagaaggtaaaggagaagatcgacgccaggaatgccctggagacatacgtgtacaacatgaagaaccaagtgaacgacaaggacaagcttgccgacaaattggaaggagatgaaaaggagaagatcgaagcagcgacgaaagaggctttggagtggctcgacgaaaaccaaaactcagagaaagaagagtacgacgagaagctcaaggaggtagaggcagtgtgtaacccaatcatcacagcagtttaccagagatctggcggagcaccaggtggtgcaggaggagaatcatcgactgaggaggaagatgagtctcacgatgagctctagatgtcttttgttattgttaatttgttaaaccatagagacgagttttgaggatgaaacgtcgttttttttgtatttggtttcctttttatatggatttttaggaaaaggggagagattaagtaacgtcccttctttagtctccctggacgttctctttatgtctctatgcatcaaattacatcgataaagtttttaaaga

SEQ ID NO: 25856 - protein, 690 aa, Arabidopsis thaliana
  peptide (1)..(690): Ceres Seq. ID no. 13591530
  misc_feature (55)..(676): Homolog of NCBI NO: 14423732 NR Description: Heat shock 70 kDa protein
  misc_feature (56)..(677): Homolog of NCBI NO: 21263753 NR Description: Heat shock cognate 71 kDa protein (Hsc70.1)
  misc_feature (220)..(690): Homolog of NCBI NO: 168424 NR Description: polypeptide chain-binding protein
  misc_feature (36)..(690): Homolog of NCBI NO: 23480384 NR Description: heat shock protein [Plasmodium yoelii yoelii]
  misc_feature (2)..(690): Homolog of NCBI NO: 29539338 NR Description: Heat shock 70 kDa protein [Cyanidioschyzon
  misc_feature (58)..(690): Homolog of NCBI NO: 1037176 NR Description: immunoglobulin heavy chain binding protein
  misc_feature (14)..(685): Homolog of NCBI NO: 13897312 NR Description: luminal binding protein, BiP [Scherffelia dubia]
  misc_feature (55)..(676): Homolog of NCBI NO: 14423732 NR Description: Heat shock 70 kDa protein
  misc_feature (56)..(677): Homolog of NCBI NO: 21263753 NR Description: Heat shock cognate 71 kDa protein (Hsc70.1)
  misc_feature (220)..(690): Homolog of NCBI NO: 168424 NR Description: polypeptide chain-binding protein
  misc_feature (36)..(690): Homolog of NCBI NO: 23480384 NR Description: heat shock protein [Plasmodium yoelii yoelii]
  misc_feature (2)..(690): Homolog of NCBI NO: 29539338 NR Description: Heat shock 70 kDa protein [Cyanidioschyzon
  misc_feature (58)..(690): Homolog of NCBI NO: 1037176 NR Description: immunoglobulin heavy chain binding protein
  misc_feature (14)..(685): Homolog of NCBI NO: 13897312 NR Description: luminal binding protein, BiP [Scherffelia dubia]
NKFIRSIETKQKERSYAKVSDMARSFGANSTVVLAIIFFGCLFALSSAIEEATKLGSVIGIDLGTTYSCVGVYKNGHVEIIANDQGNRITPSWVGFTDSERLIGEAAKNQAAVNPERTVFDVKRLIGRKFEDKEVQKDRKLVPYQIVNKDGKPYIQVKIKDGETKVFSPEEISAMILTKMKETAEAYLGKKIKDAVVTVPAYFNDAQRQATKDAGVIAGLNVARIINEPTAAAIAYGLDKKGGEKNILVFDLGGGTFDVSVLTIDNGVFEVLSTNGDTHLGGEDFDHRVMEYFIKLIKKKHQKDISKDNKALGKLRRECERAKRALSSQHQVRVEIESLFDGVDFSEPLTRARFEELNNDLFRKTMGPVKKAMDDAGLQKSQIDEIVLVGGSTRIPKVQQLLKDFFEGKEPNKGVNPDEAVAYGAAVQGGILSGEGGDETKDILLLDVAPLTLGIETVGGVMTKLIPRNTVIPTKKSQVFTTYQDQQTTVSIQVFEGERSLTKDCRLLGKFDLNGIPPAPRGTPQIEVTFEVDANGILNVKAEDKASGKSEKITITNEKGRLSQEEIDRMVKEAEEFAEEDKKVKEKIDARNALETYVYNMKNQVNDKDKLADKLEGDEKEKIEAATKEALEWLDENQNSEKEEYDEKLKEVEAVCNPIITAVYQRSGGAPGGAGGESSTEEEDESHDEL

SEQ ID NO: 25857 - protein, 669 aa, Arabidopsis thaliana
  peptide (1)..(669): Ceres Seq. ID no. 13591531
  misc_feature (34)..(655): Homolog of NCBI NO: 14423732 NR Description: Heat shock 70 kDa protein
  misc_feature (35)..(656): Homolog of NCBI NO: 21263753 NR Description: Heat shock cognate 71 kDa protein (Hsc70.1)
  misc_feature (199)..(669): Homolog of NCBI NO: 168424 NR Description: polypeptide chain-binding protein
  misc_feature (15)..(669): Homolog of NCBI NO: 23480384 NR Description: heat shock protein [Plasmodium yoelii yoelii]
  misc_feature (1)..(669): Homolog of NCBI NO: 29539338 NR Description: Heat shock 70 kDa protein [Cyanidioschyzon
  misc_feature (37)..(669): Homolog of NCBI NO: 1037176 NR Description: immunoglobulin heavy chain binding protein
  misc_feature (1)..(664): Homolog of NCBI NO: 13897312 NR Description: luminal binding protein, BiP [Scherffelia dubia]
  misc_feature (34)..(655): Homolog of NCBI NO: 14423732 NR Description: Heat shock 70 kDa protein
  misc_feature (35)..(656): Homolog of NCBI NO: 21263753 NR Description: Heat shock cognate 71 kDa protein (Hsc70.1)
  misc_feature (199)..(669): Homolog of NCBI NO: 168424 NR Description: polypeptide chain-binding protein
  misc_feature (15)..(669): Homolog of NCBI NO: 23480384 NR Description: heat shock protein [Plasmodium yoelii yoelii]
  misc_feature (1)..(669): Homolog of NCBI NO: 29539338 NR Description: Heat shock 70 kDa protein [Cyanidioschyzon
  misc_feature (37)..(669): Homolog of NCBI NO: 1037176 NR Description: immunoglobulin heavy chain binding protein
  misc_feature (1)..(664): Homolog of NCBI NO: 13897312 NR Description: luminal binding protein, BiP [Scherffelia dubia]
MARSFGANSTVVLAIIFFGCLFALSSAIEEATKLGSVIGIDLGTTYSCVGVYKNGHVEIIANDQGNRITPSWVGFTDSERLIGEAAKNQAAVNPERTVFDVKRLIGRKFEDKEVQKDRKLVPYQIVNKDGKPYIQVKIKDGETKVFSPEEISAMILTKMKETAEAYLGKKIKDAVVTVPAYFNDAQRQATKDAGVIAGLNVARIINEPTAAAIAYGLDKKGGEKNILVFDLGGGTFDVSVLTIDNGVFEVLSTNGDTHLGGEDFDHRVMEYFIKLIKKKHQKDISKDNKALGKLRRECERAKRALSSQHQVRVEIESLFDGVDFSEPLTRARFEELNNDLFRKTMGPVKKAMDDAGLQKSQIDEIVLVGGSTRIPKVQQLLKDFFEGKEPNKGVNPDEAVAYGAAVQGGILSGEGGDETKDILLLDVAPLTLGIETVGGVMTKLIPRNTVIPTKKSQVFTTYQDQQTTVSIQVFEGERSLTKDCRLLGKFDLNGIPPAPRGTPQIEVTFEVDANGILNVKAEDKASGKSEKITITNEKGRLSQEEIDRMVKEAEEFAEEDKKVKEKIDARNALETYVYNMKNQVNDKDKLADKLEGDEKEKIEAATKEALEWLDENQNSEKEEYDEKLKEVEAVCNPIITAVYQRSGGAPGGAGGESSTEEEDESHDEL

SEQ ID NO: 25858 - protein, 516 aa, Arabidopsis thaliana
  peptide (1)..(516): Ceres Seq. ID no. 13591532
  misc_feature (1)..(502): Homolog of NCBI NO: 14423732 NR Description: Heat shock 70 kDa protein
  misc_feature (1)..(503): Homolog of NCBI NO: 21263753 NR Description: Heat shock cognate 71 kDa protein (Hsc70.1)
  misc_feature (46)..(516): Homolog of NCBI NO: 168424 NR Description: polypeptide chain-binding protein
  misc_feature (1)..(516): Homolog of NCBI NO: 23480384 NR Description: heat shock protein [Plasmodium yoelii yoelii]
  misc_feature (1)..(516): Homolog of NCBI NO: 29539338 NR Description: Heat shock 70 kDa protein [Cyanidioschyzon
  misc_feature (1)..(516): Homolog of NCBI NO: 1037176 NR Description: immunoglobulin heavy chain binding protein
  misc_feature (1)..(511): Homolog of NCBI NO: 13897312 NR Description: luminal binding protein, BiP [Scherffelia dubia]
  misc_feature (1)..(502): Homolog of NCBI NO: 14423732 NR Description: Heat shock 70 kDa protein
  misc_feature (1)..(503): Homolog of NCBI NO: 21263753 NR Description: Heat shock cognate 71 kDa protein (Hsc70.1)
  misc_feature (46)..(516): Homolog of NCBI NO: 168424 NR Description: polypeptide chain-binding protein
  misc_feature (1)..(516): Homolog of NCBI NO: 23480384 NR Description: heat shock protein [Plasmodium yoelii yoelii]
  misc_feature (1)..(516): Homolog of NCBI NO: 29539338 NR Description: Heat shock 70 kDa protein [Cyanidioschyzon
  misc_feature (1)..(516): Homolog of NCBI NO: 1037176 NR Description: immunoglobulin heavy chain binding protein
  misc_feature (1)..(511): Homolog of NCBI NO: 13897312 NR Description: luminal binding protein, BiP [Scherffelia dubia]
MILTKMKETAEAYLGKKIKDAVVTVPAYFNDAQRQATKDAGVIAGLNVARIINEPTAAAIAYGLDKKGGEKNILVFDLGGGTFDVSVLTIDNGVFEVLSTNGDTHLGGEDFDHRVMEYFIKLIKKKHQKDISKDNKALGKLRRECERAKRALSSQHQVRVEIESLFDGVDFSEPLTRARFEELNNDLFRKTMGPVKKAMDDAGLQKSQIDEIVLVGGSTRIPKVQQLLKDFFEGKEPNKGVNPDEAVAYGAAVQGGILSGEGGDETKDILLLDVAPLTLGIETVGGVMTKLIPRNTVIPTKKSQVFTTYQDQQTTVSIQVFEGERSLTKDCRLLGKFDLNGIPPAPRGTPQIEVTFEVDANGILNVKAEDKASGKSEKITITNEKGRLSQEEIDRMVKEAEEFAEEDKKVKEKIDARNALETYVYNMKNQVNDKDKLADKLEGDEKEKIEAATKEALEWLDENQNSEKEEYDEKLKEVEAVCNPIITAVYQRSGGAPGGAGGESSTEEEDESHDEL

SEQ ID NO: 25859 - DNA, 1433 bp, Arabidopsis thaliana
  misc_feature (1)..(1433): Ceres Seq. ID no. 12574518
  misc_feature: MA Experiment ID: 108434 Result: Down-regulated in Transcription
  misc_feature: MA Experiment 108434 PARAMETER Experiment Name: At_Root_Tips_cDNA_P Parameter: Tissue Value: Root Tips
  misc_feature: MA Experiment ID: 108435 Result: Down-regulated in Transcription
  misc_feature: MA Experiment 108435 PARAMETER Experiment Name: At_stm_Mutants_cDNA_P Parameter: Plant Line Value: wt Landsburg vs stm
  misc_feature: MA Experiment 108435 PARAMETER Experiment Name: At_stm_Mutants_cDNA_P Parameter: Tissue Value: Shoot Apical Meristem Region
  misc_feature: MA Experiment ID: 108462 Result: Up-regulated in Transcription
  misc_feature: MA Experiment 108462 PARAMETER Experiment Name: At_Germinating_Seeds_cDNA_P Parameter: Age (day) Value: 2 vs. 0
  misc_feature: MA Experiment 108462 PARAMETER Experiment Name: At_Germinating_Seeds_cDNA_P Parameter: Tissue Value: Germinating Seeds
  misc_feature: MA Experiment ID: 108464 Result: Up-regulated in Transcription
  misc_feature: MA Experiment 108464 PARAMETER Experiment Name: At_Germinating_Seeds_cDNA_P Parameter: Age (day) Value: 4 vs. 0
  misc_feature: MA Experiment 108464 PARAMETER Experiment Name: At_Germinating_Seeds_cDNA_P Parameter: Tissue Value: Germinating Seeds
  misc_feature: MA Experiment ID: 108488 Result: Up-regulated in Transcription
  misc_feature: MA Experiment ID: 108594 Result: Down-regulated in Transcription
  misc_feature: MA Experiment 108594 PARAMETER Experiment Name: At_Ler-rhl_Root_cDNA_P Parameter: Plant Line Value: null
  misc_feature: MA Experiment ID: 108595 Result: Down-regulated in Transcription
  misc_feature: MA Experiment 108595 PARAMETER Experiment Name: At_Ler-pi_Ovule_cDNA_P Parameter: Plant Line Value: null
  misc_feature: MA Experiment ID: 20000069 Result: Down-regulated in Transcription
  misc_feature: MA Experiment 20000069 PARAMETER Experiment Name: At_100uM_ABA_Mutants_cDNA_P Parameter: Plant Line Value: CS23
  misc_feature: MA Experiment 20000069 PARAMETER Experiment Name: At_100uM_ABA_Mutants_cDNA_P Parameter: Timepoint (hr) Value: 6
  misc_feature: MA Experiment 20000069 PARAMETER Experiment Name: At_100uM_ABA_Mutants_cDNA_P Parameter: Tissue Value: Aerial
  misc_feature: MA Experiment 20000069 PARAMETER Experiment Name: At_100uM_ABA_Mutants_cDNA_P Parameter: Treatment Value: 100uM ABA vs. No Treatment
  misc_feature: MA Experiment ID: 20000070 Result: Down-regulated in Transcription
  misc_feature: MA Experiment 20000070 PARAMETER Experiment Name: At_100uM_ABA_Mutants_cDNA_P Parameter: Plant Line Value: CS24
  misc_feature: MA Experiment 20000070 PARAMETER Experiment Name: At_100uM_ABA_Mutants_cDNA_P Parameter: Timepoint (hr) Value: 6
  misc_feature: MA Experiment 20000070 PARAMETER Experiment Name: At_100uM_ABA_Mutants_cDNA_P Parameter: Tissue Value: Aerial
  misc_feature: MA Experiment 20000070 PARAMETER Experiment Name: At_100uM_ABA_Mutants_cDNA_P Parameter: Treatment Value: 100uM ABA vs. No Treatment
  misc_feature: MA Experiment ID: 20000071 Result: Down-regulated in Transcription
  misc_feature: MA Experiment 20000071 PARAMETER Experiment Name: At_100uM_ABA_Mutants_cDNA_P Parameter: Plant Line Value: CS8104
  misc_feature: MA Experiment 20000071 PARAMETER Experiment Name: At_100uM_ABA_Mutants_cDNA_P Parameter: Timepoint (hr) Value: 6
  misc_feature: MA Experiment 20000071 PARAMETER Experiment Name: At_100uM_ABA_Mutants_cDNA_P Parameter: Tissue Value: Aerial
  misc_feature: MA Experiment 20000071 PARAMETER Experiment Name: At_100uM_ABA_Mutants_cDNA_P Parameter: Treatment Value: 100uM ABA vs. No Treatment
  misc_feature: MA Experiment ID: 20000072 Result: Down-regulated in Transcription
  misc_feature: MA Experiment 20000072 PARAMETER Experiment Name: At_100uM_ABA_Mutants_cDNA_P Parameter: Plant Line Value: CS8105
  misc_feature: MA Experiment 20000072 PARAMETER Experiment Name: At_100uM_ABA_Mutants_cDNA_P Parameter: Timepoint (hr) Value: 6
  misc_feature: MA Experiment 20000072 PARAMETER Experiment Name: At_100uM_ABA_Mutants_cDNA_P Parameter: Tissue Value: Aerial
  misc_feature: MA Experiment 20000072 PARAMETER Experiment Name: At_100uM_ABA_Mutants_cDNA_P Parameter: Treatment Value: 100uM ABA vs. No Treatment
  misc_feature: MA Experiment ID: 20000086 Result: Down-regulated in Transcription
  misc_feature: MA Experiment 20000086 PARAMETER Experiment Name: At_100uM_ABA_Mutants_cDNA_P Parameter: Plant Line Value: CS22
  misc_feature: MA Experiment 20000086 PARAMETER Experiment Name: At_100uM_ABA_Mutants_cDNA_P Parameter: Timepoint (hr) Value: 6
  misc_feature: MA Experiment 20000086 PARAMETER Experiment Name: At_100uM_ABA_Mutants_cDNA_P Parameter: Tissue Value: Aerial
  misc_feature: MA Experiment 20000086 PARAMETER Experiment Name: At_100uM_ABA_Mutants_cDNA_P Parameter: Treatment Value: 100uM ABA vs. No Treatment
  misc_feature: MA Experiment ID: 20000087 Result: Down-regulated in Transcription
  misc_feature: MA Experiment 20000087 PARAMETER Experiment Name: At_100uM_ABA_Mutants_cDNA_P Parameter: Plant Line Value: WS
  misc_feature: MA Experiment 20000087 PARAMETER Experiment Name: At_100uM_ABA_Mutants_cDNA_P Parameter: Timepoint (hr) Value: 6
  misc_feature: MA Experiment 20000087 PARAMETER Experiment Name: At_100uM_ABA_Mutants_cDNA_P Parameter: Tissue Value: Aerial
  misc_feature: MA Experiment 20000087 PARAMETER Experiment Name: At_100uM_ABA_Mutants_cDNA_P Parameter: Treatment Value: 100uM ABA vs. No Treatment
  misc_feature: MA Experiment ID: 20000088 Result: Down-regulated in Transcription
  misc_feature: MA Experiment 20000088 PARAMETER Experiment Name: At_100uM_ABA_Mutants_cDNA_P Parameter: Plant Line Value: Landsberg
  misc_feature: MA Experiment 20000088 PARAMETER Experiment Name: At_100uM_ABA_Mutants_cDNA_P Parameter: Timepoint (hr) Value: 6
  misc_feature: MA Experiment 20000088 PARAMETER Experiment Name: At_100uM_ABA_Mutants_cDNA_P Parameter: Tissue Value: Aerial
  misc_feature: MA Experiment 20000088 PARAMETER Experiment Name: At_100uM_ABA_Mutants_cDNA_P Parameter: Treatment Value: 100uM ABA vs. No Treatment
  misc_feature: MA Experiment ID: 20000089 Result: Down-regulated in Transcription
  misc_feature: MA Experiment ID: 20000090 Result: Down-regulated in Transcription
  misc_feature: MA Experiment ID: 20000117 Result: Down-regulated in Transcription
  misc_feature: MA Experiment 20000117 PARAMETER Experiment Name: At_100uM_ABA_Mutants_cDNA_P Parameter: Plant Line Value: Columbia
  misc_feature: MA Experiment 20000117 PARAMETER Experiment Name: At_100uM_ABA_Mutants_cDNA_P Parameter: Timepoint (hr) Value: 6
  misc_feature: MA Experiment 20000117 PARAMETER Experiment Name: At_100uM_ABA_Mutants_cDNA_P Parameter: Tissue Value: Aerial
  misc_feature: MA Experiment 20000117 PARAMETER Experiment Name: At_100uM_ABA_Mutants_cDNA_P Parameter: Treatment Value: 100uM ABA vs. No Treatment
  misc_feature: MA Experiment ID: 20000180 Result: Up-regulated in Transcription
  misc_feature: MA Experiment 20000180 PARAMETER Experiment Name: At_Germinating_Seeds_P Parameter: Age (hr) Value: 24 vs. 0
  misc_feature: MA Experiment 20000180 PARAMETER Experiment Name: At_Germinating_Seeds_P Parameter: Tissue Value: Germinating Seeds
  misc_feature: MA Experiment ID: 20000184 Result: Up-regulated in Transcription
  misc_feature: MA Experiment 20000184 PARAMETER Experiment Name: At_Shoots__P Parameter: Age (day) Value: 7
  misc_feature: MA Experiment 20000184 PARAMETER Experiment Name: At_Shoots__P Parameter: Tissue Value: Shoots vs. Whole Plant
  misc_feature: MA Experiment ID: 20000185 Result: Down-regulated in Transcription
  misc_feature: MA Experiment 20000185 PARAMETER Experiment Name: At_Roots__P Parameter: Age (day) Value: 7 vs. 21
  misc_feature: MA Experiment 20000185 PARAMETER Experiment Name: At_Roots__P Parameter: Organism Value: A. thaliana
  misc_feature: MA Experiment 20000185 PARAMETER Experiment Name: At_Roots__P Parameter: Tissue Value: Roots vs. Whole Plant
  misc_feature: MA Experiment ID: 20000437 Result: Down-regulated in Transcription
  misc_feature: MA Experiment 20000437 PARAMETER Experiment Name: At_Drought_P Parameter: Age (day) Value: 8
  misc_feature: MA Experiment 20000437 PARAMETER Experiment Name: At_Drought_P Parameter: Organism Value: A. thaliana
  misc_feature: MA Experiment 20000437 PARAMETER Experiment Name: At_Drought_P Parameter: Plant Line Value: WS
  misc_feature: MA Experiment 20000437 PARAMETER Experiment Name: At_Drought_P Parameter: Timepoint (hr) Value: 24
  misc_feature: MA Experiment 20000437 PARAMETER Experiment Name: At_Drought_P Parameter: Tissue Value: Whole Plant
  misc_feature: MA Experiment 20000437 PARAMETER Experiment Name: At_Drought_P Parameter: Treatment Value: Drought vs. No Drought
  misc_feature: MA Experiment ID: 20000438 Result: Up-regulated in Transcription
  misc_feature: MA Experiment 20000438 PARAMETER Experiment Name: At_Shoots__P Parameter: Age (day) Value: 14
  misc_feature: MA Experiment 20000438 PARAMETER Experiment Name: At_Shoots__P Parameter: Tissue Value: Shoots vs. Whole Plant
  misc_feature: MA Experiment ID: 20000439 Result: Down-regulated in Transcription
  misc_feature: MA Experiment 20000439 PARAMETER Experiment Name: At_Roots__P Parameter: Age (day) Value: 14 vs. 21
  misc_feature: MA Experiment 20000439 PARAMETER Experiment Name: At_Roots__P Parameter: Organism Value: A. thaliana
  misc_feature: MA Experiment 20000439 PARAMETER Experiment Name: At_Roots__P Parameter: Tissue Value: Roots vs. Whole Plant
  misc_feature: MA Experiment ID: 20000794 Result: Down-regulated in Transcription
  misc_feature: MA Experiment 20000794 PARAMETER Experiment Name: At_Petals_P Parameter: Age (day) Value: 23-25 days
  misc_feature: MA Experiment 20000794 PARAMETER Experiment Name: At_Petals_P Parameter: Plant Line Value: WS
  misc_feature: MA Experiment 20000794 PARAMETER Experiment Name: At_Petals_P Parameter: Tissue Value: Petals vs. Whole plant
  misc_feature: MA Experiment ID: 20001560 Result: Down-regulated in Transcription
  misc_feature: MA Experiment 20001560 PARAMETER Experiment Name: At_Drought_Soil_Dry_P Parameter: Age (day) Value: 28
  misc_feature: MA Experiment 20001560 PARAMETER Experiment Name: At_Drought_Soil_Dry_P Parameter: Organism Value: A. thaliana
  misc_feature: MA Experiment 20001560 PARAMETER Experiment Name: At_Drought_Soil_Dry_P Parameter: Plant Line Value: WS
  misc_feature: MA Experiment 20001560 PARAMETER Experiment Name: At_Drought_Soil_Dry_P Parameter: Post Timepoint (hr) Value: None
  misc_feature: MA Experiment 20001560 PARAMETER Experiment Name: At_Drought_Soil_Dry_P Parameter: Post-Treatment Value: None
  misc_feature: MA Experiment 20001560 PARAMETER Experiment Name: At_Drought_Soil_Dry_P Parameter: Timepoint (day) Value: 14
  misc_feature: MA Experiment 20001560 PARAMETER Experiment Name: At_Drought_Soil_Dry_P Parameter: Treatment Value: Drought vs. No Drought
  misc_feature: MA Experiment ID: 20001905 Result: Down-regulated in Transcription
  misc_feature: MA Experiment 20001905 PARAMETER Experiment Name: At_Drought_Reproduction_P Parameter: Age (day) Value: 40
  misc_feature: MA Experiment 20001905 PARAMETER Experiment Name: At_Drought_Reproduction_P Parameter: Organism Value: A. thaliana
  misc_feature: MA Experiment 20001905 PARAMETER Experiment Name: At_Drought_Reproduction_P Parameter: Plant Line Value: WS
  misc_feature: MA Experiment 20001905 PARAMETER Experiment Name: At_Drought_Reproduction_P Parameter: Timepoint (day) Value: 10
  misc_feature: MA Experiment 20001905 PARAMETER Experiment Name: At_Drought_Reproduction_P Parameter: Tissue Value: Rosettes
  misc_feature: MA Experiment 20001905 PARAMETER Experiment Name: At_Drought_Reproduction_P Parameter: Treatment Value: Drought vs. No Drought
acacacacttcatctctccccagagctctattcccatcaagaaacacacttcggaagatggagatcactaacgttaccgagtatgatgcaatcgcaaagcagaagctgcctaagatggtgtacgactactatgcatctggtgcagaagaccaatggactcttcaagagaacagaaacgcttttgcaaggatcctctttcggcctcggattctgattgatgtgagcaagattgacatgacaaccaccgtcttggggttcaagatctcgatgcccatcatggttgctccaactgccatgcaaaagatggctcaccctgatggggaatatgctactgctagagctgcatctgcagctggaactatcatgacactatcttcatgggctacttccagcgttgaagaagttgcgtctacagggccagggatccgattcttccagctctatgtatacaagaacaggaatgtggttgagcagctcgtgagaagagctgagagggctgggttcaaagccattgctctcactgtagacaccccaaggctaggccgcagagagtctgatatcaagaacagattcactttgcctccaaacctgacattgaagaactttgaaggacttgacctcggaaagatggacgaggccaatgactctggcttggcttcatatgttgctggtcaaattgaccgtaccttaagctggaaggatgtccagtggctccagacaatcaccaagttgcccattcttgtcaaaggtgttcttacaggagaggatgcaaggatagcgattcaagctggtgcagccggaatcattgtatcaaaccatggagctcgccagcttgactatgtcccagcaaccatctcggcccttgaagaggttgtcaaagcgacacaaggacgaattcctgtcttcttggatggtggtgttcgacgtggcactgatgtcttcaaagcacttgcacttggagcctccgggatatttattggaagaccagtggtattctcattggcagctgaaggagaggctggagttagaaaggtgcttcaaatgctacgtgatgagttcgagctgaccatggcactgagtgggtgtcggtccctaaaggaaatctcccgtaaccacattaccaccgaatgggacactccacgtccttcagccaggttatagagaggaaaataaccaacaagcagagaacagcagcaacacagaaccaaaatattggctaaacttattcatactctgattgtacttggcttctactctgctaaatatctcaagacttgtttctccctctatcagatcacaaaccaagcctagtgattctgtaatactatttggctacttctttcttaaggccattcttatttctaaattccatgtacttacattcccacagatcaatttcttgtgattcccagataatacgatgaacatatgct

SEQ ID NO: 25860 - protein, 386 aa, Arabidopsis thaliana
  peptide (1)..(386): Ceres Seq. ID no. 12574519
  misc_feature (32)..(375): Pfam Name: FMN-dependent dehydrogenase Pfam Description: FMN-dependent dehydrogenase
  misc_feature (20)..(386): Homolog of NCBI NO: 16226772 NR Description: AT3g14420/MOA2_2 [Arabidopsis thaliana]
  misc_feature (20)..(378): Homolog of NCBI NO: 2554675 NR Description: Three-Dimensional Structure Of Glycolate Oxidase
  misc_feature (20)..(386): Homolog of NCBI NO: 999542 NR Description: Chain A, Glycolate Oxidase (E.C.1.1.3.15) Mutant
  misc_feature (20)..(386): Homolog of NCBI NO: 27549566 NR Description: glycolate oxidase [Zantedeschia aethiopica]
  misc_feature (20)..(379): Homolog of NCBI NO: 1773330 NR Description: glycolate oxidase [Mesembryanthemum crystallinum]
  misc_feature (20)..(386): Homolog of NCBI NO: 15229497 NR Description: glycolate oxidase; protein id: At3g14415.1
  misc_feature (20)..(386): Homolog of NCBI NO: 7431428 NR Description: (S)-2-hydroxy-acid oxidase (EC 1.1.3.15) -
  misc_feature (20)..(386): Homolog of NCBI NO: 121530 NR Description: (S)-2-hydroxy-acid oxidase, peroxisomal
  misc_feature (20)..(385): Homolog of NCBI NO: 228403 NR Description: glycolate oxidase
  misc_feature (20)..(386): Homolog of NCBI NO: 15231850 NR Description: glycolate oxidase, putative
THTSSLPRALFPSRNTLRKMEITNVTEYDAIAKQKLPKMVYDYYASGAEDQWTLQENRNAFARILFRPRILIDVSKIDMTTTVLGFKISMPIMVAPTAMQKMAHPDGEYATARAASAAGTIMTLSSWATSSVEEVASTGPGIRFFQLYVYKNRNVVEQLVRRAERAGFKAIALTVDTPRLGRRESDIKNRFTLPPNLTLKNFEGLDLGKMDEANDSGLASYVAGQIDRTLSWKDVQWLQTITKLPILVKGVLTGEDARIAIQAGAAGIIVSNHGARQLDYVPATISALEEVVKATQGRIPVFLDGGVRRGTDVFKALALGASGIFIGRPVVFSLAAEGEAGVRKVLQMLRDEFELTMALSGCRSLKEISRNHITTEWDTPRPSARL

SEQ ID NO: 25861 - protein, 367 aa, Arabidopsis thaliana
  peptide (1)..(367): Ceres Seq. ID no. 12574520
  misc_feature (13)..(356): Pfam Name: FMN-dependent dehydrogenase Pfam Description: FMN-dependent dehydrogenase
  misc_feature (1)..(359): Homolog of NCBI NO: 2554675 NR Description: Three-Dimensional Structure Of Glycolate Oxidase
  misc_feature (1)..(366): Homolog of NCBI NO: 228403 NR Description: glycolate oxidase
  misc_feature (1)..(367): Homolog of NCBI NO: 999542 NR Description: Chain A, Glycolate Oxidase (E.C.1.1.3.15) Mutant
  misc_feature (1)..(367): Homolog of NCBI NO: 121530 NR Description: (S)-2-hydroxy-acid oxidase, peroxisomal
  misc_feature (1)..(367): Homolog of NCBI NO: 27549566 NR Description: glycolate oxidase [Zantedeschia aethiopica]
  misc_feature (1)..(367): Homolog of NCBI NO: 7431428 NR Description: (S)-2-hydroxy-acid oxidase (EC 1.1.3.15) -
  misc_feature (1)..(360): Homolog of NCBI NO: 1773330 NR Description: glycolate oxidase [Mesembryanthemum crystallinum]
  misc_feature (1)..(367): Homolog of NCBI NO: 15229497 NR Description: glycolate oxidase; protein id: At3g14415.1
  misc_feature (1)..(367): Homolog of NCBI NO: 16226772 NR Description: AT3g14420/MOA2_2 [Arabidopsis thaliana]
  misc_feature (1)..(367): Homolog of NCBI NO: 15231850 NR Description: glycolate oxidase, putative
MEITNVTEYDAIAKQKLPKMVYDYYASGAEDQWTLQENRNAFARILFRPRILIDVSKIDMTTTVLGFKISMPIMVAPTAMQKMAHPDGEYATARAASAAGTIMTLSSWATSSVEEVASTGPGIRFFQLYVYKNRNVVEQLVRRAERAGFKAIALTVDTPRLGRRESDIKNRFTLPPNLTLKNFEGLDLGKMDEANDSGLASYVAGQIDRTLSWKDVQWLQTITKLPILVKGVLTGEDARIAIQAGAAGIIVSNHGARQLDYVPATISALEEVVKATQGRIPVFLDGGVRRGTDVFKALALGASGIFIGRPVVFSLAAEGEAGVRKVLQMLRDEFELTMALSGCRSLKEISRNHITTEWDTPRPSARL

SEQ ID NO: 25862 - protein, 348 aa, Arabidopsis thaliana
  peptide (1)..(348): Ceres Seq. ID no. 12574521
  misc_feature (1)..(337): Pfam Name: FMN-dependent dehydrogenase Pfam Description: FMN-dependent dehydrogenase
  misc_feature (1)..(340): Homolog of NCBI NO: 2554675 NR Description: Three-Dimensional Structure Of Glycolate Oxidase
  misc_feature (1)..(347): Homolog of NCBI NO: 228403 NR Description: glycolate oxidase
  misc_feature (1)..(348): Homolog of NCBI NO: 999542 NR Description: Chain A, Glycolate Oxidase (E.C.1.1.3.15) Mutant
  misc_feature (1)..(348): Homolog of NCBI NO: 121530 NR Description: (S)-2-hydroxy-acid oxidase, peroxisomal
  misc_feature (1)..(348): Homolog of NCBI NO: 27549566 NR Description: glycolate oxidase [Zantedeschia aethiopica]
  misc_feature (1)..(348): Homolog of NCBI NO: 7431428 NR Description: (S)-2-hydroxy-acid oxidase (EC 1.1.3.15) -
  misc_feature (1)..(341): Homolog of NCBI NO: 1773330 NR Description: glycolate oxidase [Mesembryanthemum crystallinum]
  misc_feature (1)..(348): Homolog of NCBI NO: 15229497 NR Description: glycolate oxidase; protein id: At3g14415.1
  misc_feature (1)..(348): Homolog of NCBI NO: 16226772 NR Description: AT3g14420/MOA2_2 [Arabidopsis thaliana]
  misc_feature (1)..(348): Homolog of NCBI NO: 15231850 NR Description: glycolate oxidase, putative
MVYDYYASGAEDQWTLQENRNAFARILFRPRILIDVSKIDMTTTVLGFKISMPIMVAPTAMQKMAHPDGEYATARAASAAGTIMTLSSWATSSVEEVASTGPGIRFFQLYVYKNRNVVEQLVRRAERAGFKAIALTVDTPRLGRRESDIKNRFTLPPNLTLKNFEGLDLGKMDEANDSGLASYVAGQIDRTLSWKDVQWLQTITKLPILVKGVLTGEDARIAIQAGAAGIIVSNHGARQLDYVPATISALEEVVKATQGRIPVFLDGGVRRGTDVFKALALGASGIFIGRPVVFSLAAEGEAGVRKVLQMLRDEFELTMALSGCRSLKEISRNHITTEWDTPRPSARL

SEQ ID NO: 25863 - DNA, 1569 bp, Arabidopsis thaliana
  misc_feature (1)..(1569): Ceres Seq. ID no. 12422651
  misc_feature: MA Experiment ID: 108434 Result: Up-regulated in Transcription
  misc_feature: MA Experiment 108434 PARAMETER Experiment Name: At_Root_Tips_cDNA_P Parameter: Tissue Value: Root Tips
  misc_feature: MA Experiment ID: 108461 Result: Down-regulated in Transcription
  misc_feature: MA Experiment 108461 PARAMETER Experiment Name: At_Germinating_Seeds_cDNA_P Parameter: Age (day) Value: 1 vs. 0
  misc_feature: MA Experiment 108461 PARAMETER Experiment Name: At_Germinating_Seeds_cDNA_P Parameter: Tissue Value: Germinating Seeds
  misc_feature: MA Experiment ID: 108462 Result: Down-regulated in Transcription
  misc_feature: MA Experiment 108462 PARAMETER Experiment Name: At_Germinating_Seeds_cDNA_P Parameter: Age (day) Value: 2 vs. 0
  misc_feature: MA Experiment 108462 PARAMETER Experiment Name: At_Germinating_Seeds_cDNA_P Parameter: Tissue Value: Germinating Seeds
  misc_feature: MA Experiment ID: 108463 Result: Down-regulated in Transcription
  misc_feature: MA Experiment 108463 PARAMETER Experiment Name: At_Germinating_Seeds_cDNA_P Parameter: Age (day) Value: 3 vs. 0
  misc_feature: MA Experiment 108463 PARAMETER Experiment Name: At_Germinating_Seeds_cDNA_P Parameter: Tissue Value: Germinating Seeds
  misc_feature: MA Experiment ID: 108464 Result: Down-regulated in Transcription
  misc_feature: MA Experiment 108464 PARAMETER Experiment Name: At_Germinating_Seeds_cDNA_P Parameter: Age (day) Value: 4 vs. 0
  misc_feature: MA Experiment 108464 PARAMETER Experiment Name: At_Germinating_Seeds_cDNA_P Parameter: Tissue Value: Germinating Seeds
  misc_feature: MA Experiment ID: 108572 Result: Down-regulated in Transcription
  misc_feature: MA Experiment 108572 PARAMETER Experiment Name: At_Drought_cDNA_P Parameter: Timepoint (hr) Value: 1
  misc_feature: MA Experiment 108572 PARAMETER Experiment Name: At_Drought_cDNA_P Parameter: Tissue Value: Aerial
  misc_feature: MA Experiment 108572 PARAMETER Experiment Name: At_Drought_cDNA_P Parameter: Treatment Value: Drought vs. No Drought
  misc_feature: MA Experiment ID: 108595 Result: Down-regulated in Transcription
  misc_feature: MA Experiment 108595 PARAMETER Experiment Name: At_Ler-pi_Ovule_cDNA_P Parameter: Plant Line Value: null
  misc_feature: MA Experiment ID: 20000180 Result: Down-regulated in Transcription
  misc_feature: MA Experiment 20000180 PARAMETER Experiment Name: At_Germinating_Seeds_P Parameter: Age (hr) Value: 24 vs. 0
  misc_feature: MA Experiment 20000180 PARAMETER Experiment Name: At_Germinating_Seeds_P Parameter: Tissue Value: Germinating Seeds
  misc_feature: MA Experiment ID: 20001247 Result: Down-regulated in Transcription
  misc_feature: MA Experiment 20001247 PARAMETER Experiment Name: At_Far-red-induction_P Parameter: Age (day) Value: 7
  misc_feature: MA Experiment 20001247 PARAMETER Experiment Name: At_Far-red-induction_P Parameter: Light Value: Far-red vs. White
  misc_feature: MA Experiment 20001247 PARAMETER Experiment Name: At_Far-red-induction_P Parameter: Organism Value: A. thaliana
  misc_feature: MA Experiment 20001247 PARAMETER Experiment Name: At_Far-red-induction_P Parameter: Plant Line Value: Columbia
  misc_feature: MA Experiment 20001247 PARAMETER Experiment Name: At_Far-red-induction_P Parameter: Timepoint (hr) Value: 1
  misc_feature: MA Experiment 20001247 PARAMETER Experiment Name: At_Far-red-induction_P Parameter: Tissue Value: Whole Plant
  misc_feature: MA Experiment ID: 20001458 Result: Up-regulated in Transcription
  misc_feature: MA Experiment 20001458 PARAMETER Experiment Name: At_50mM_NH4NO3_L-to-H_P Parameter: Age (day) Value: Undefined
  misc_feature: MA Experiment 20001458 PARAMETER Experiment Name: At_50mM_NH4NO3_L-to-H_P Parameter: Organism Value: Undefined
  misc_feature: MA Experiment 20001458 PARAMETER Experiment Name: At_50mM_NH4NO3_L-to-H_P Parameter: Plant Line Value: Undefined
  misc_feature: MA Experiment 20001458 PARAMETER Experiment Name: At_50mM_NH4NO3_L-to-H_P Parameter: Timepoint (hr) Value: 2
  misc_feature: MA Experiment 20001458 PARAMETER Experiment Name: At_50mM_NH4NO3_L-to-H_P Parameter: Tissue Value: Siliques
  misc_feature: MA Experiment 20001458 PARAMETER Experiment Name: At_50mM_NH4NO3_L-to-H_P Parameter: Treatment Value: 50mM NH4NO3 vs. 100mM Manitol
  misc_feature: MA Experiment ID: 20001556 Result: Up-regulated in Transcription
  misc_feature: MA Experiment 20001556 PARAMETER Experiment Name: At_Drought_Soil_Dry_P Parameter: Age (day) Value: 26
  misc_feature: MA Experiment 20001556 PARAMETER Experiment Name: At_Drought_Soil_Dry_P Parameter: Organism Value: A. thaliana
  misc_feature: MA Experiment 20001556 PARAMETER Experiment Name: At_Drought_Soil_Dry_P Parameter: Plant Line Value: WS
  misc_feature: MA Experiment 20001556 PARAMETER Experiment Name: At_Drought_Soil_Dry_P Parameter: Post Timepoint (hr) Value: None
  misc_feature: MA Experiment 20001556 PARAMETER Experiment Name: At_Drought_Soil_Dry_P Parameter: Post-Treatment Value: None
  misc_feature: MA Experiment 20001556 PARAMETER Experiment Name: At_Drought_Soil_Dry_P Parameter: Timepoint (day) Value: 12
  misc_feature: MA Experiment 20001556 PARAMETER Experiment Name: At_Drought_Soil_Dry_P Parameter: Treatment Value: Drought vs. No Drought
  misc_feature: MA Experiment ID: 20001557 Result: Up-regulated in Transcription
  misc_feature: MA Experiment 20001557 PARAMETER Experiment Name: At_Drought_Soil_Dry_P Parameter: Age (day) Value: 27
  misc_feature: MA Experiment 20001557 PARAMETER Experiment Name: At_Drought_Soil_Dry_P Parameter: Organism Value: A. thaliana
  misc_feature: MA Experiment 20001557 PARAMETER Experiment Name: At_Drought_Soil_Dry_P Parameter: Plant Line Value: WS
  misc_feature: MA Experiment 20001557 PARAMETER Experiment Name: At_Drought_Soil_Dry_P Parameter: Post Timepoint (hr) Value: 3
  misc_feature: MA Experiment 20001557 PARAMETER Experiment Name: At_Drought_Soil_Dry_P Parameter: Post-Treatment Value: Re-Water vs. No Drought
  misc_feature: MA Experiment 20001557 PARAMETER Experiment Name: At_Drought_Soil_Dry_P Parameter: Timepoint (day) Value: 13
  misc_feature: MA Experiment 20001557 PARAMETER Experiment Name: At_Drought_Soil_Dry_P Parameter: Treatment Value: Drought vs. No Drought
  misc_feature: MA Experiment ID: 20001558 Result: Up-regulated in Transcription
  misc_feature: MA Experiment 20001558 PARAMETER Experiment Name: At_Drought_Soil_Dry_P Parameter: Age (day) Value: 27
  misc_feature: MA Experiment 20001558 PARAMETER Experiment Name: At_Drought_Soil_Dry_P Parameter: Organism Value: A. thaliana
  misc_feature: MA Experiment 20001558 PARAMETER Experiment Name: At_Drought_Soil_Dry_P Parameter: Plant Line Value: WS
  misc_feature: MA Experiment 20001558 PARAMETER Experiment Name: At_Drought_Soil_Dry_P Parameter: Post Timepoint (hr) Value: 6
  misc_feature: MA Experiment 20001558 PARAMETER Experiment Name: At_Drought_Soil_Dry_P Parameter: Post-Treatment Value: Re-Water vs. No Drought
  misc_feature: MA Experiment 20001558 PARAMETER Experiment Name: At_Drought_Soil_Dry_P Parameter: Timepoint (day) Value: 13
  misc_feature: MA Experiment 20001558 PARAMETER Experiment Name: At_Drought_Soil_Dry_P Parameter: Treatment Value: Drought vs. No Drought
  misc_feature: MA Experiment ID: 20001757 Result: Up-regulated in Transcription
  misc_feature: MA Experiment 20001757 PARAMETER Experiment Name: At_50mM_NH4NO3_L-to-H_P Parameter: Timepoint (hr) Value: 6
  misc_feature: MA Experiment 20001757 PARAMETER Experiment Name: At_50mM_NH4NO3_L-to-H_P Parameter: Tissue Value: Leaf
  misc_feature: MA Experiment 20001757 PARAMETER Experiment Name: At_50mM_NH4NO3_L-to-H_P Parameter: Treatment Value: 50mM NH4NO3 vs 100mM Mannitol
acttttgactctgtatctctctgtgtctctcttccccgttagtcttcgtcgtgacctttttgtagtattaagcaatgaagattaagacgttatcaagatcggttgatgaatacactcgagaaagaagtcaggatcttcagagggtctttcacaacttcgacccaagtcttcgacctatggagaaggccgtggaataccagagagctcttacagctgccaaattagaaaagatatttgcaaggccgtttgttggagcaatggatggtcatcgtgatggagtctcatgtatggcgaagaacccaaattacctcaaaggaatcttctctgcttctatggatggagatattcgcctttgggatatctcttcaaggcgtacagtttgccaattccctggtcatcaaggtgctgtgcgtggtcttactgcatcaaccgatggaaatatattggtttcatgcggaactgattgcactgttcgtttgtggaatgttcctcgtccttcacttgaagattctagcatttcatctgagaatttcattgagccatctgcaacctatgtctggaagaatgctttctgggctgttgatcatcagtttgaaggtgacctttttgctacggccggagctcaacttgatatatggaatcataataggtctcagccagttcagagtttccagtggggaactgactctgtaatatctgttcggtttaatcctggagagcctaatttattggctacatcagctagtgaccggagcataaccatatatgatctccgcttgtcttctgcggcaaggaaaattatcatgatgacaaaaacaaattcaattgcatggaaccccatggagcctatgaacctgacagctgctaatgaagatggaagttgctatagctttgatggtagaaagttggacgaagccaagtgcgtgcataaagatcatgtttctgcagtgatggatattgacttttcaccgactggtcgtgagtttgttacgggttcttatgatcgatctgtgagaatcttcccatacaatggaggacacagcagggaaatctaccatacaaagaggatgcagagagtattctgcgtcaaatatagctgtgatgctacatatgtaatatcgggcagtgatgacaccaatctcaggctatggaaggcaaaggcatcagagcaattgggagttattcttccaagggaacaaaagaagcatgagtacaacgaggctgtgaagaaccggtacaagcatctttctgaggttaagcgcattgtgagacacaggcacttgccaaaaccaatatacaaagcgatgggtatcattcgaactgtgaacgattcgaagagaagaaaagaagcacgaaagaaagctcacagtggtcacagcacctctgcgcaaaagaaagatcatcaaagaagtggagtgactctactctttctccgtttgttcctttcaaggatgatgatacgtggagaggattgtattggtatagtgagggtaagattaggaacatgaacatttttgctgtgttgtaagcctttctttatgccattaagttattacccatttcgttttc

SEQ ID NO: 25864 - protein, 477 aa, Arabidopsis thaliana
  peptide (1)..(477): Ceres Seq. ID no. 12422652
  misc_feature (1)..(443): Homolog of NCBI NO: 22760354 NR Description: unnamed protein product [Homo sapiens]
  misc_feature (1)..(443): Homolog of NCBI NO: 19913460 NR Description: DKFZP564O0463 protein [Homo sapiens]
  misc_feature (1)..(432): Homolog of NCBI NO: 38348458 NR Description: Unknown (protein for MGC:65348) [Mus musculus]
  misc_feature (175)..(223): Homolog of NCBI NO: 7488344 NR Description: SOF1 protein homolog F20O9.130 - Arabidopsis
  misc_feature (35)..(91): Homolog of NCBI NO: 7488344 NR Description: SOF1 protein homolog F20O9.130 - Arabidopsis
  misc_feature (290)..(436): Homolog of NCBI NO: 7488344 NR Description: SOF1 protein homolog F20O9.130 - Arabidopsis
  misc_feature (1)..(432): Homolog of NCBI NO: 34904476 NR Description: putative DKFZP564O0463 protein
  misc_feature (14)..(436): Homolog of NCBI NO: 30687972 NR Description: transducin / WD-40 repeat protein family
  misc_feature (1)..(436): Homolog of NCBI NO: 17065094 NR Description: SOF1 protein-like protein [Arabidopsis thaliana]
  misc_feature (1)..(436): Homolog of NCBI NO: 13937179 NR Description: AT4g28450/F20O9_130 [Arabidopsis thaliana]
MKIKTLSRSVDEYTRERSQDLQRVFHNFDPSLRPMEKAVEYQRALTAAKLEKIFARPFVGAMDGHRDGVSCMAKNPNYLKGIFSASMDGDIRLWDISSRRTVCQFPGHQGAVRGLTASTDGNILVSCGTDCTVRLWNVPRPSLEDSSISSENFIEPSATYVWKNAFWAVDHQFEGDLFATAGAQLDIWNHNRSQPVQSFQWGTDSVISVRFNPGEPNLLATSASDRSITIYDLRLSSAARKIIMMTKTNSIAWNPMEPMNLTAANEDGSCYSFDGRKLDEAKCVHKDHVSAVMDIDFSPTGREFVTGSYDRSVRIFPYNGGHSREIYHTKRMQRVFCVKYSCDATYVISGSDDTNLRLWKAKASEQLGVILPREQKKHEYNEAVKNRYKHLSEVKRIVRHRHLPKPIYKAMGIIRTVNDSKRRKEARKKAHSGHSTSAQKKDHQRSGVTLLFLRLFLSRMMIRGEDCIGIVRVRLGT

SEQ ID NO: 25865 - protein, 443 aa, Arabidopsis thaliana
  peptide (1)..(443): Ceres Seq. ID no. 12422653
  misc_feature (1)..(409): Homolog of NCBI NO: 22760354 NR Description: unnamed protein product [Homo sapiens]
  misc_feature (1)..(409): Homolog of NCBI NO: 19913460 NR Description: DKFZP564O0463 protein [Homo sapiens]
  misc_feature (1)..(398): Homolog of NCBI NO: 38348458 NR Description: Unknown (protein for MGC:65348) [Mus musculus]
  misc_feature (141)..(189): Homolog of NCBI NO: 7488344 NR Description: SOF1 protein homolog F20O9.130 - Arabidopsis
  misc_feature (1)..(57): Homolog of NCBI NO: 7488344 NR Description: SOF1 protein homolog F20O9.130 - Arabidopsis
  misc_feature (256)..(402): Homolog of NCBI NO: 7488344 NR Description: SOF1 protein homolog F20O9.130 - Arabidopsis
  misc_feature (1)..(398): Homolog of NCBI NO: 34904476 NR Description: putative DKFZP564O0463 protein
  misc_feature (1)..(402): Homolog of NCBI NO: 30687972 NR Description: transducin / WD-40 repeat protein family
  misc_feature (1)..(402): Homolog of NCBI NO: 17065094 NR Description: SOF1 protein-like protein [Arabidopsis thaliana]
  misc_feature (1)..(402): Homolog of NCBI NO: 13937179 NR Description: AT4g28450/F20O9_130 [Arabidopsis thaliana]
MEKAVEYQRALTAAKLEKIFARPFVGAMDGHRDGVSCMAKNPNYLKGIFSASMDGDIRLWDISSRRTVCQFPGHQGAVRGLTASTDGNILVSCGTDCTVRLWNVPRPSLEDSSISSENFIEPSATYVWKNAFWAVDHQFEGDLFATAGAQLDIWNHNRSQPVQSFQWGTDSVISVRFNPGEPNLLATSASDRSITIYDLRLSSAARKIIMMTKTNSIAWNPMEPMNLTAANEDGSCYSFDGRKLDEAKCVHKDHVSAVMDIDFSPTGREFVTGSYDRSVRIFPYNGGHSREIYHTKRMQRVFCVKYSCDATYVISGSDDTNLRLWKAKASEQLGVILPREQKKHEYNEAVKNRYKHLSEVKRIVRHRHLPKPIYKAMGIIRTVNDSKRRKEARKKAHSGHSTSAQKKDHQRSGVTLLFLRLFLSRMMIRGEDCIGIVRVRLGT

SEQ ID NO: 25866 - protein, 416 aa, Arabidopsis thaliana
  peptide (1)..(416): Ceres Seq. ID no. 12422654
  misc_feature (1)..(382): Homolog of NCBI NO: 22760354 NR Description: unnamed protein product [Homo sapiens]
  misc_feature (1)..(382): Homolog of NCBI NO: 19913460 NR Description: DKFZP564O0463 protein [Homo sapiens]
  misc_feature (1)..(371): Homolog of NCBI NO: 38348458 NR Description: Unknown (protein for MGC:65348) [Mus musculus]
  misc_feature (114)..(162): Homolog of NCBI NO: 7488344 NR Description: SOF1 protein homolog F20O9.130 - Arabidopsis
  misc_feature (1)..(30): Homolog of NCBI NO: 7488344 NR Description: SOF1 protein homolog F20O9.130 - Arabidopsis
  misc_feature (229)..(375): Homolog of NCBI NO: 7488344 NR Description: SOF1 protein homolog F20O9.130 - Arabidopsis
  misc_feature (1)..(371): Homolog of NCBI NO: 34904476 NR Description: putative DKFZP564O0463 protein
  misc_feature (1)..(375): Homolog of NCBI NO: 30687972 NR Description: transducin / WD-40 repeat protein family
  misc_feature (1)..(375): Homolog of NCBI NO: 17065094 NR Description: SOF1 protein-like protein [Arabidopsis thaliana]
  misc_feature (1)..(375): Homolog of NCBI NO: 13937179 NR Description: AT4g28450/F20O9_130 [Arabidopsis thaliana]
MDGHRDGVSCMAKNPNYLKGIFSASMDGDIRLWDISSRRTVCQFPGHQGAVRGLTASTDGNILVSCGTDCTVRLWNVPRPSLEDSSISSENFIEPSATYVWKNAFWAVDHQFEGDLFATAGAQLDIWNHNRSQPVQSFQWGTDSVISVRFNPGEPNLLATSASDRSITIYDLRLSSAARKIIMMTKTNSIAWNPMEPMNLTAANEDGSCYSFDGRKLDEAKCVHKDHVSAVMDIDFSPTGREFVTGSYDRSVRIFPYNGGHSREIYHTKRMQRVFCVKYSCDATYVISGSDDTNLRLWKAKASEQLGVILPREQKKHEYNEAVKNRYKHLSEVKRIVRHRHLPKPIYKAMGIIRTVNDSKRRKEARKKAHSGHSTSAQKKDHQRSGVTLLFLRLFLSRMMIRGEDCIGIVRVRLGT

SEQ ID NO: 25867 - DNA, 1357 bp, Arabidopsis thaliana
  misc_feature (1)..(1357): Ceres Seq. ID no. 12421244
  misc_feature: MA Experiment ID: 108462 Result: Down-regulated in Transcription
  misc_feature: MA Experiment 108462 PARAMETER Experiment Name: At_Germinating_Seeds_cDNA_P Parameter: Age (day) Value: 2 vs. 0
  misc_feature: MA Experiment 108462 PARAMETER Experiment Name: At_Germinating_Seeds_cDNA_P Parameter: Tissue Value: Germinating Seeds
  misc_feature: MA Experiment ID: 108463 Result: Down-regulated in Transcription
  misc_feature: MA Experiment 108463 PARAMETER Experiment Name: At_Germinating_Seeds_cDNA_P Parameter: Age (day) Value: 3 vs. 0
  misc_feature: MA Experiment 108463 PARAMETER Experiment Name: At_Germinating_Seeds_cDNA_P Parameter: Tissue Value: Germinating Seeds
  misc_feature: MA Experiment ID: 108464 Result: Down-regulated in Transcription
  misc_feature: MA Experiment 108464 PARAMETER Experiment Name: At_Germinating_Seeds_cDNA_P Parameter: Age (day) Value: 4 vs. 0
  misc_feature: MA Experiment 108464 PARAMETER Experiment Name: At_Germinating_Seeds_cDNA_P Parameter: Tissue Value: Germinating Seeds
  misc_feature: MA Experiment ID: 108561 Result: Down-regulated in Transcription
  misc_feature: MA Experiment 108561 PARAMETER Experiment Name: At_100uM_ABA_cDNA_P Parameter: Timepoint (hr) Value: 6
  misc_feature: MA Experiment 108561 PARAMETER Experiment Name: At_100uM_ABA_cDNA_P Parameter: Tissue Value: Aerial
  misc_feature: MA Experiment 108561 PARAMETER Experiment Name: At_100uM_ABA_cDNA_P Parameter: Treatment Value: 100uM ABA vs. No Treatment
  misc_feature: MA Experiment ID: 108576 Result: Down-regulated in Transcription
  misc_feature: MA Experiment 108576 PARAMETER Experiment Name: At_42deg_Heat_cDNA_P Parameter: Temperature (deg C) Value: 42 vs. 22
  misc_feature: MA Experiment 108576 PARAMETER Experiment Name: At_42deg_Heat_cDNA_P Parameter: Timepoint (hr) Value: 1
  misc_feature: MA Experiment 108576 PARAMETER Experiment Name: At_42deg_Heat_cDNA_P Parameter: Tissue Value: Aerial
  misc_feature: MA Experiment ID: 108595 Result: Down-regulated in Transcription
  misc_feature: MA Experiment 108595 PARAMETER Experiment Name: At_Ler-pi_Ovule_cDNA_P Parameter: Plant Line Value: null
  misc_feature: MA Experiment ID: 108605 Result: Down-regulated in Transcription
  misc_feature: MA Experiment 108605 PARAMETER Experiment Name: At_100uM_ABA_cDNA_P Parameter: Timepoint (hr) Value: 6
  misc_feature: MA Experiment 108605 PARAMETER Experiment Name: At_100uM_ABA_cDNA_P Parameter: Tissue Value: Aerial
  misc_feature: MA Experiment 108605 PARAMETER Experiment Name: At_100uM_ABA_cDNA_P Parameter: Treatment Value: 100uM ABA vs. No Treatment
  misc_feature: MA Experiment ID: 20000089 Result: Up-regulated in Transcription
  misc_feature: MA Experiment ID: 20000111 Result: Down-regulated in Transcription
  misc_feature: MA Experiment 20000111 PARAMETER Experiment Name: At_42deg_Heat_cDNA_P Parameter: Temperature (deg C) Value: 42 vs. 22
  misc_feature: MA Experiment 20000111 PARAMETER Experiment Name: At_42deg_Heat_cDNA_P Parameter: Timepoint (hr) Value: 6
  misc_feature: MA Experiment 20000111 PARAMETER Experiment Name: At_42deg_Heat_cDNA_P Parameter: Tissue Value: Aerial
  misc_feature: MA Experiment ID: 20000112 Result: Down-regulated in Transcription
  misc_feature: MA Experiment 20000112 PARAMETER Experiment Name: At_42deg_Heat_cDNA_P Parameter: Temperature (deg C) Value: 42 vs. 22
  misc_feature: MA Experiment 20000112 PARAMETER Experiment Name: At_42deg_Heat_cDNA_P Parameter: Timepoint (hr) Value: 2
  misc_feature: MA Experiment 20000112 PARAMETER Experiment Name: At_42deg_Heat_cDNA_P Parameter: Tissue Value: Aerial
  misc_feature: MA Experiment ID: 20000144 Result: Down-regulated in Transcription
  misc_feature: MA Experiment 20000144 PARAMETER Experiment Name: At_42deg_Heat_cDNA_P Parameter: Temperature (deg C) Value: 42 vs. 22
  misc_feature: MA Experiment 20000144 PARAMETER Experiment Name: At_42deg_Heat_cDNA_P Parameter: Timepoint (hr) Value: 1
  misc_feature: MA Experiment 20000144 PARAMETER Experiment Name: At_42deg_Heat_cDNA_P Parameter: Tissue Value: Aerial
  misc_feature: MA Experiment ID: 20000182 Result: Down-regulated in Transcription
  misc_feature: MA Experiment 20000182 PARAMETER Experiment Name: At_2mM_SA_P Parameter: Age (day) Value: 14
  misc_feature: MA Experiment 20000182 PARAMETER Experiment Name: At_2mM_SA_P Parameter: Organism Value: A. thaliana
  misc_feature: MA Experiment 20000182 PARAMETER Experiment Name: At_2mM_SA_P Parameter: Plant Line Value: WS
  misc_feature: MA Experiment 20000182 PARAMETER Experiment Name: At_2mM_SA_P Parameter: Timepoint (hr) Value: 6
  misc_feature: MA Experiment 20000182 PARAMETER Experiment Name: At_2mM_SA_P Parameter: Tissue Value: Aerial
  misc_feature: MA Experiment 20000182 PARAMETER Experiment Name: At_2mM_SA_P Parameter: Treatment Value: 2mM SA vs. No Treatment
  misc_feature: MA Experiment ID: 20000185 Result: Down-regulated in Transcription
  misc_feature: MA Experiment 20000185 PARAMETER Experiment Name: At_Roots__P Parameter: Age (day) Value: 7 vs. 21
  misc_feature: MA Experiment 20000185 PARAMETER Experiment Name: At_Roots__P Parameter: Organism Value: A. thaliana
  misc_feature: MA Experiment 20000185 PARAMETER Experiment Name: At_Roots__P Parameter: Tissue Value: Roots vs. Whole Plant
  misc_feature: MA Experiment ID: 20000439 Result: Down-regulated in Transcription
  misc_feature: MA Experiment 20000439 PARAMETER Experiment Name: At_Roots__P Parameter: Age (day) Value: 14 vs. 21
  misc_feature: MA Experiment 20000439 PARAMETER Experiment Name: At_Roots__P Parameter: Organism Value: A. thaliana
  misc_feature: MA Experiment 20000439 PARAMETER Experiment Name: At_Roots__P Parameter: Tissue Value: Roots vs. Whole Plant
  misc_feature: MA Experiment ID: 20000527 Result: Up-regulated in Transcription
  misc_feature: MA Experiment 20000527 PARAMETER Experiment Name: At_10percent_PEG_P Parameter: Age (day) Value: 20
  misc_feature: MA Experiment 20000527 PARAMETER Experiment Name: At_10percent_PEG_P Parameter: Organism Value: A. thaliana
  misc_feature: MA Experiment 20000527 PARAMETER Experiment Name: At_10percent_PEG_P Parameter: Plant Line Value: WS
  misc_feature: MA Experiment 20000527 PARAMETER Experiment Name: At_10percent_PEG_P Parameter: Timepoint (day) Value: 20
  misc_feature: MA Experiment 20000527 PARAMETER Experiment Name: At_10percent_PEG_P Parameter: Tissue Value: Whole Plant
  misc_feature: MA Experiment 20000527 PARAMETER Experiment Name: At_10percent_PEG_P Parameter: Treatment Value: 10percent PEG vs. No Treatment
  misc_feature: MA Experiment ID: 20001451 Result: Down-regulated in Transcription
  misc_feature: MA Experiment 20001451 PARAMETER Experiment Name: At_Far-red-induction_P Parameter: Age (day) Value: 7
  misc_feature: MA Experiment 20001451 PARAMETER Experiment Name: At_Far-red-induction_P Parameter: Light Value: Far-red vs. White
  misc_feature: MA Experiment 20001451 PARAMETER Experiment Name: At_Far-red-induction_P Parameter: Organism Value: A. thaliana
  misc_feature: MA Experiment 20001451 PARAMETER Experiment Name: At_Far-red-induction_P Parameter: Plant Line Value: Columbia
  misc_feature: MA Experiment 20001451 PARAMETER Experiment Name: At_Far-red-induction_P Parameter: Timepoint (hr) Value: 24
  misc_feature: MA Experiment 20001451 PARAMETER Experiment Name: At_Far-red-induction_P Parameter: Tissue Value: Whole Plant
tttttttcaattttacggatatcgttatctgcttctcacactaacacggcgaagcagaaaaagagctcgaaacaaaaatggagggaaccttctcgccgctttgcttacgttcttcttcgaacctctgttacttctccagtaatgtttcaccagattctcaccgttctataggatttacattggttgattcgctccggccaacgaacttggtttccctgcgaacgggaaataaacgttcgtcatcgtcttcactacggctatttctctctccgactagaagcgctctccgtacgccgactatttccgcggaggaggtgaaagatgtcccgatgccgaagattgataagagcggccgattaagcagtcctcgagccgcacgcgagctcgctcttgtaatactttatgccgcatgcttagaaggctctgacccaattcgtctctttgagaagagaataaacgcaagaagagagcctggatacgagtttgacaagagttctttgttggaatacaaccacatgagctttggaggacccccagttaaaacagaaacaaaagaagaagaagatgagcttgtgcgccatgatgaaaaagaatcgaaaatcgaagccgaagtgctttcagctcccccaaagctggtgtacagcaaacttgttttacggtttgcaaagaaactcttggctgcggtagttgataaatgggatagtcatgtcgttatcatcgagaaaatttccccgccagattggaagagtgcaccagctggaagaatattggagttttcgattcttcacttggcaatgtctgaagtggcagtccttgaaacccgacacccgattgtcattaacgaggctgttgatcttgcaaaacggttctgcgatggatcagcaccacgcataatcaacggatgcctaaggacatttgtcaaggatagagcaacaacatcaacacctcaagctttagaattgaagcaagaagtgtcggtttaaattagaacaaaacccgcatcttcgttaggaggcaggcaacctcaagatgttggtcgtcggaagtcgctagtaggcaaagtgttgatccgatgatcttatatattcgacaaagtcgctctctgtcttgacagaccgcttctggtccgaagcttttgatacctgagactgaatctatccattgcaggtcaacatgattattgctaagaacacagcatactcatgtctgtattaatatattgcccataagatagtattaatttatgtagtagttttcatgtttctgtctttgtatcctcctacttcacttgtgtcccatatttgagaacaaacaaagctgtataatcaggtttttcgtatagatgtttttttccgcc

SEQ ID NO: 25868 - protein, 301 aa, Arabidopsis thaliana
  peptide (1)..(301): Ceres Seq. ID no. 12421245
  misc_feature (26)..(156): Pfam Name: NusB family Pfam Description: NusB family
  misc_feature (63)..(275): Homolog of NCBI NO: 18483231 NR Description: hypothetical protein M3E9.200 [Sorghum bicolor]
  misc_feature (46)..(296): Homolog of NCBI NO: 31415975 NR Description: unknown protein [Oryza sativa (japonica
  misc_feature (1)..(301): Homolog of NCBI NO: 7486786 NR Description: hypothetical protein M3E9.200 - Arabidopsis
  misc_feature (1)..(301): Homolog of NCBI NO: 18416739 NR Description: putative protein
MEGTFSPLCLRSSSNLCYFSSNVSPDSHRSIGFTLVDSLRPTNLVSLRTGNKRSSSSSLRLFLSPTRSALRTPTISAEEVKDVPMPKIDKSGRLSSPRAARELALVILYAACLEGSDPIRLFEKRINARREPGYEFDKSSLLEYNHMSFGGPPVKTETKEEEDELVRHDEKESKIEAEVLSAPPKLVYSKLVLRFAKKLLAAVVDKWDSHVVIIEKISPPDWKSAPAGRILEFSILHLAMSEVAVLETRHPIVINEAVDLAKRFCDGSAPRIINGCLRTFVKDRATTSTPQALELKQEVSV

SEQ ID NO: 25869 - protein, 217 aa, Arabidopsis thaliana
  peptide (1)..(217): Ceres Seq. ID no. 12421246
  misc_feature (1)..(72): Pfam Name: NusB family Pfam Description: NusB family
  misc_feature (1)..(191): Homolog of NCBI NO: 18483231 NR Description: hypothetical protein M3E9.200 [Sorghum bicolor]
  misc_feature (1)..(212): Homolog of NCBI NO: 31415975 NR Description: unknown protein [Oryza sativa (japonica
  misc_feature (1)..(217): Homolog of NCBI NO: 7486786 NR Description: hypothetical protein M3E9.200 - Arabidopsis
  misc_feature (1)..(217): Homolog of NCBI NO: 18416739 NR Description: putative protein
MPKIDKSGRLSSPRAARELALVILYAACLEGSDPIRLFEKRINARREPGYEFDKSSLLEYNHMSFGGPPVKTETKEEEDELVRHDEKESKIEAEVLSAPPKLVYSKLVLRFAKKLLAAVVDKWDSHVVIIEKISPPDWKSAPAGRILEFSILHLAMSEVAVLETRHPIVINEAVDLAKRFCDGSAPRIINGCLRTFVKDRATTSTPQALELKQEVSV

SEQ ID NO: 25870 - protein, 155 aa, Arabidopsis thaliana
  peptide (1)..(155): Ceres Seq. ID no. 12421247
  misc_feature (1)..(129): Homolog of NCBI NO: 18483231 NR Description: hypothetical protein M3E9.200 [Sorghum bicolor]
  misc_feature (1)..(150): Homolog of NCBI NO: 31415975 NR Description: unknown protein [Oryza sativa (japonica
  misc_feature (1)..(155): Homolog of NCBI NO: 7486786 NR Description: hypothetical protein M3E9.200 - Arabidopsis
  misc_feature (1)..(155): Homolog of NCBI NO: 18416739 NR Description: putative protein
MSFGGPPVKTETKEEEDELVRHDEKESKIEAEVLSAPPKLVYSKLVLRFAKKLLAAVVDKWDSHVVIIEKISPPDWKSAPAGRILEFSILHLAMSEVAVLETRHPIVINEAVDLAKRFCDGSAPRIINGCLRTFVKDRATTSTPQALELKQEVSV

SEQ ID NO: 25871 - DNA, 1309 bp, Arabidopsis thaliana
  misc_feature (1)..(1309): Ceres Seq. ID no. 12324135
  misc_feature: MA Experiment ID: 108435 Result: Up-regulated in Transcription
  misc_feature: MA Experiment 108435 PARAMETER Experiment Name: At_stm_Mutants_cDNA_P Parameter: Plant Line Value: wt Landsburg vs stm
  misc_feature: MA Experiment 108435 PARAMETER Experiment Name: At_stm_Mutants_cDNA_P Parameter: Tissue Value: Shoot Apical Meristem Region
  misc_feature: MA Experiment ID: 108462 Result: Up-regulated in Transcription
  misc_feature: MA Experiment 108462 PARAMETER Experiment Name: At_Germinating_Seeds_cDNA_P Parameter: Age (day) Value: 2 vs. 0
  misc_feature: MA Experiment 108462 PARAMETER Experiment Name: At_Germinating_Seeds_cDNA_P Parameter: Tissue Value: Germinating Seeds
  misc_feature: MA Experiment ID: 108463 Result: Up-regulated in Transcription
  misc_feature: MA Experiment 108463 PARAMETER Experiment Name: At_Germinating_Seeds_cDNA_P Parameter: Age (day) Value: 3 vs. 0
  misc_feature: MA Experiment 108463 PARAMETER Experiment Name: At_Germinating_Seeds_cDNA_P Parameter: Tissue Value: Germinating Seeds
  misc_feature: MA Experiment ID: 108464 Result: Up-regulated in Transcription
  misc_feature: MA Experiment 108464 PARAMETER Experiment Name: At_Germinating_Seeds_cDNA_P Parameter: Age (day) Value: 4 vs. 0
  misc_feature: MA Experiment 108464 PARAMETER Experiment Name: At_Germinating_Seeds_cDNA_P Parameter: Tissue Value: Germinating Seeds
  misc_feature: MA Experiment ID: 108576 Result: Down-regulated in Transcription
  misc_feature: MA Experiment 108576 PARAMETER Experiment Name: At_42deg_Heat_cDNA_P Parameter: Temperature (deg C) Value: 42 vs. 22
  misc_feature: MA Experiment 108576 PARAMETER Experiment Name: At_42deg_Heat_cDNA_P Parameter: Timepoint (hr) Value: 1
  misc_feature: MA Experiment 108576 PARAMETER Experiment Name: At_42deg_Heat_cDNA_P Parameter: Tissue Value: Aerial
  misc_feature: MA Experiment ID: 108577 Result: Up-regulated in Transcription
  misc_feature: MA Experiment 108577 PARAMETER Experiment Name: At_42deg_Heat_cDNA_P Parameter: Temperature (deg C) Value: 42 vs. 22
  misc_feature: MA Experiment 108577 PARAMETER Experiment Name: At_42deg_Heat_cDNA_P Parameter: Timepoint (hr) Value: 6
  misc_feature: MA Experiment 108577 PARAMETER Experiment Name: At_42deg_Heat_cDNA_P Parameter: Tissue Value: Aerial
  misc_feature: MA Experiment ID: 108595 Result: Down-regulated in Transcription
  misc_feature: MA Experiment 108595 PARAMETER Experiment Name: At_Ler-pi_Ovule_cDNA_P Parameter: Plant Line Value: null
  misc_feature: MA Experiment ID: 108667 Result: Down-regulated in Transcription
  misc_feature: MA Experiment 108667 PARAMETER Experiment Name: At_2mM_SA_cDNA_P Parameter: Plant Line Value: WS
  misc_feature: MA Experiment 108667 PARAMETER Experiment Name: At_2mM_SA_cDNA_P Parameter: Timepoint (hr) Value: 1
  misc_feature: MA Experiment 108667 PARAMETER Experiment Name: At_2mM_SA_cDNA_P Parameter: Treatment Value: 2mM SA vs. No Treatment
  misc_feature: MA Experiment ID: 20000069 Result: Down-regulated in Transcription
  misc_feature: MA Experiment 20000069 PARAMETER Experiment Name: At_100uM_ABA_Mutants_cDNA_P Parameter: Plant Line Value: CS23
  misc_feature: MA Experiment 20000069 PARAMETER Experiment Name: At_100uM_ABA_Mutants_cDNA_P Parameter: Timepoint (hr) Value: 6
  misc_feature: MA Experiment 20000069 PARAMETER Experiment Name: At_100uM_ABA_Mutants_cDNA_P Parameter: Tissue Value: Aerial
  misc_feature: MA Experiment 20000069 PARAMETER Experiment Name: At_100uM_ABA_Mutants_cDNA_P Parameter: Treatment Value: 100uM ABA vs. No Treatment
  misc_feature: MA Experiment ID: 20000070 Result: Down-regulated in Transcription
  misc_feature: MA Experiment 20000070 PARAMETER Experiment Name: At_100uM_ABA_Mutants_cDNA_P Parameter: Plant Line Value: CS24
  misc_feature: MA Experiment 20000070 PARAMETER Experiment Name: At_100uM_ABA_Mutants_cDNA_P Parameter: Timepoint (hr) Value: 6
  misc_feature: MA Experiment 20000070 PARAMETER Experiment Name: At_100uM_ABA_Mutants_cDNA_P Parameter: Tissue Value: Aerial
  misc_feature: MA Experiment 20000070 PARAMETER Experiment Name: At_100uM_ABA_Mutants_cDNA_P Parameter: Treatment Value: 100uM ABA vs. No Treatment
  misc_feature: MA Experiment ID: 20000071 Result: Down-regulated in Transcription
  misc_feature: MA Experiment 20000071 PARAMETER Experiment Name: At_100uM_ABA_Mutants_cDNA_P Parameter: Plant Line Value: CS8104
  misc_feature: MA Experiment 20000071 PARAMETER Experiment Name: At_100uM_ABA_Mutants_cDNA_P Parameter: Timepoint (hr) Value: 6
  misc_feature: MA Experiment 20000071 PARAMETER Experiment Name: At_100uM_ABA_Mutants_cDNA_P Parameter: Tissue Value: Aerial
  misc_feature: MA Experiment 20000071 PARAMETER Experiment Name: At_100uM_ABA_Mutants_cDNA_P Parameter: Treatment Value: 100uM ABA vs. No Treatment
  misc_feature: MA Experiment ID: 20000072 Result: Down-regulated in Transcription
  misc_feature: MA Experiment 20000072 PARAMETER Experiment Name: At_100uM_ABA_Mutants_cDNA_P Parameter: Plant Line Value: CS8105
  misc_feature: MA Experiment 20000072 PARAMETER Experiment Name: At_100uM_ABA_Mutants_cDNA_P Parameter: Timepoint (hr) Value: 6
  misc_feature: MA Experiment 20000072 PARAMETER Experiment Name: At_100uM_ABA_Mutants_cDNA_P Parameter: Tissue Value: Aerial
  misc_feature: MA Experiment 20000072 PARAMETER Experiment Name: At_100uM_ABA_Mutants_cDNA_P Parameter: Treatment Value: 100uM ABA vs. No Treatment
  misc_feature: MA Experiment ID: 20000086 Result: Down-regulated in Transcription
  misc_feature: MA Experiment 20000086 PARAMETER Experiment Name: At_100uM_ABA_Mutants_cDNA_P Parameter: Plant Line Value: CS22
  misc_feature: MA Experiment 20000086 PARAMETER Experiment Name: At_100uM_ABA_Mutants_cDNA_P Parameter: Timepoint (hr) Value: 6
  misc_feature: MA Experiment 20000086 PARAMETER Experiment Name: At_100uM_ABA_Mutants_cDNA_P Parameter: Tissue Value: Aerial
  misc_feature: MA Experiment 20000086 PARAMETER Experiment Name: At_100uM_ABA_Mutants_cDNA_P Parameter: Treatment Value: 100uM ABA vs. No Treatment
  misc_feature: MA Experiment ID: 20000087 Result: Down-regulated in Transcription
  misc_feature: MA Experiment 20000087 PARAMETER Experiment Name: At_100uM_ABA_Mutants_cDNA_P Parameter: Plant Line Value: WS
  misc_feature: MA Experiment 20000087 PARAMETER Experiment Name: At_100uM_ABA_Mutants_cDNA_P Parameter: Timepoint (hr) Value: 6
  misc_feature: MA Experiment 20000087 PARAMETER Experiment Name: At_100uM_ABA_Mutants_cDNA_P Parameter: Tissue Value: Aerial
  misc_feature: MA Experiment 20000087 PARAMETER Experiment Name: At_100uM_ABA_Mutants_cDNA_P Parameter: Treatment Value: 100uM ABA vs. No Treatment
  misc_feature: MA Experiment ID: 20000088 Result: Down-regulated in Transcription
  misc_feature: MA Experiment 20000088 PARAMETER Experiment Name: At_100uM_ABA_Mutants_cDNA_P Parameter: Plant Line Value: Landsberg
  misc_feature: MA Experiment 20000088 PARAMETER Experiment Name: At_100uM_ABA_Mutants_cDNA_P Parameter: Timepoint (hr) Value: 6
  misc_feature: MA Experiment 20000088 PARAMETER Experiment Name: At_100uM_ABA_Mutants_cDNA_P Parameter: Tissue Value: Aerial
  misc_feature: MA Experiment 20000088 PARAMETER Experiment Name: At_100uM_ABA_Mutants_cDNA_P Parameter: Treatment Value: 100uM ABA vs. No Treatment
  misc_feature: MA Experiment ID: 20000089 Result: Down-regulated in Transcription
  misc_feature: MA Experiment ID: 20000111 Result: Up-regulated in Transcription
  misc_feature: MA Experiment 20000111 PARAMETER Experiment Name: At_42deg_Heat_cDNA_P Parameter: Temperature (deg C) Value: 42 vs. 22
  misc_feature: MA Experiment 20000111 PARAMETER Experiment Name: At_42deg_Heat_cDNA_P Parameter: Timepoint (hr) Value: 6
  misc_feature: MA Experiment 20000111 PARAMETER Experiment Name: At_42deg_Heat_cDNA_P Parameter: Tissue Value: Aerial
  misc_feature: MA Experiment ID: 20000184 Result: Up-regulated in Transcription
  misc_feature: MA Experiment 20000184 PARAMETER Experiment Name: At_Shoots__P Parameter: Age (day) Value: 7
  misc_feature: MA Experiment 20000184 PARAMETER Experiment Name: At_Shoots__P Parameter: Tissue Value: Shoots vs. Whole Plant
  misc_feature: MA Experiment ID: 20000213 Result: Up-regulated in Transcription
  misc_feature: MA Experiment 20000213 PARAMETER Experiment Name: At_4deg_Cold_P Parameter: Timepoint (hr) Value: 2
  misc_feature: MA Experiment ID: 20000224 Result: Up-regulated in Transcription
  misc_feature: MA Experiment ID: 20000234 Result: Up-regulated in Transcription
  misc_feature: MA Experiment 20000234 PARAMETER Experiment Name: At_Siliques_P Parameter: Age (day) Value: 21
  misc_feature: MA Experiment 20000234 PARAMETER Experiment Name: At_Siliques_P Parameter: Organism Value: A. thaliana
  misc_feature: MA Experiment 20000234 PARAMETER Experiment Name: At_Siliques_P Parameter: Plant Line Value: WS
  misc_feature: MA Experiment 20000234 PARAMETER Experiment Name: At_Siliques_P Parameter: Tissue Value: Less Than 5mm Siliques vs. Whole Plant
  misc_feature: MA Experiment ID: 20000235 Result: Up-regulated in Transcription
  misc_feature: MA Experiment 20000235 PARAMETER Experiment Name: At_Siliques_P Parameter: Age (day) Value: 21
  misc_feature: MA Experiment 20000235 PARAMETER Experiment Name: At_Siliques_P Parameter: Organism Value: A. thaliana
  misc_feature: MA Experiment 20000235 PARAMETER Experiment Name: At_Siliques_P Parameter: Plant Line Value: WS
  misc_feature: MA Experiment 20000235 PARAMETER Experiment Name: At_Siliques_P Parameter: Tissue Value: 5-10mm Siliques vs. Whole Plant
  misc_feature: MA Experiment ID: 20000265 Result: Up-regulated in Transcription
  misc_feature: MA Experiment 20000265 PARAMETER Experiment Name: At_Open_Flower_P Parameter: Age (day) Value: 21
  misc_feature: MA Experiment 20000265 PARAMETER Experiment Name: At_Open_Flower_P Parameter: Plant Line Value: WS
  misc_feature: MA Experiment 20000265 PARAMETER Experiment Name: At_Open_Flower_P Parameter: Tissue Value: Closed Flower vs. Whole Plant
  misc_feature: MA Experiment ID: 20000437 Result: Down-regulated in Transcription
  misc_feature: MA Experiment 20000437 PARAMETER Experiment Name: At_Drought_P Parameter: Age (day) Value: 8
  misc_feature: MA Experiment 20000437 PARAMETER Experiment Name: At_Drought_P Parameter: Organism Value: A. thaliana
  misc_feature: MA Experiment 20000437 PARAMETER Experiment Name: At_Drought_P Parameter: Plant Line Value: WS
  misc_feature: MA Experiment 20000437 PARAMETER Experiment Name: At_Drought_P Parameter: Timepoint (hr) Value: 24
  misc_feature: MA Experiment 20000437 PARAMETER Experiment Name: At_Drought_P Parameter: Tissue Value: Whole Plant
  misc_feature: MA Experiment 20000437 PARAMETER Experiment Name: At_Drought_P Parameter: Treatment Value: Drought vs. No Drought
  misc_feature: MA Experiment ID: 20000438 Result: Up-regulated in Transcription
  misc_feature: MA Experiment 20000438 PARAMETER Experiment Name: At_Shoots__P Parameter: Age (day) Value: 14
  misc_feature: MA Experiment 20000438 PARAMETER Experiment Name: At_Shoots__P Parameter: Tissue Value: Shoots vs. Whole Plant
  misc_feature: MA Experiment ID: 20000443 Result: Up-regulated in Transcription
  misc_feature: MA Experiment 20000443 PARAMETER Experiment Name: At_1uM_BR-BRZ__P Parameter: Tissue Value: Shoot Apices
  misc_feature: MA Experiment 20000443 PARAMETER Experiment Name: At_1uM_BR-BRZ__P Parameter: Treatment Value: 1uM BRZ vs. No Treatment
  misc_feature: MA Experiment ID: 20000460 Result: Down-regulated in Transcription
  misc_feature: MA Experiment 20000460 PARAMETER Experiment Name: At_10percent_PEG_P Parameter: Age (day) Value: 12
  misc_feature: MA Experiment 20000460 PARAMETER Experiment Name: At_10percent_PEG_P Parameter: Organism Value: A. thaliana
  misc_feature: MA Experiment 20000460 PARAMETER Experiment Name: At_10percent_PEG_P Parameter: Plant Line Value: WS
  misc_feature: MA Experiment 20000460 PARAMETER Experiment Name: At_10percent_PEG_P Parameter: Timepoint (day) Value: 12
  misc_feature: MA Experiment 20000460 PARAMETER Experiment Name: At_10percent_PEG_P Parameter: Tissue Value: Whole Plant
  misc_feature: MA Experiment 20000460 PARAMETER Experiment Name: At_10percent_PEG_P Parameter: Treatment Value: 10percent PEG vs. No Treatment
  misc_feature: MA Experiment ID: 20000573 Result: Down-regulated in Transcription
  misc_feature: MA Experiment 20000573 PARAMETER Experiment Name: At_100uM_ABA_Mutants__P Parameter: Organism Value: A. thaliana
  misc_feature: MA Experiment 20000573 PARAMETER Experiment Name: At_100uM_ABA_Mutants__P Parameter: Plant Line Value: CS22 vs. Ler wt
  misc_feature: MA Experiment 20000573 PARAMETER Experiment Name: At_100uM_ABA_Mutants__P Parameter: Timepoint (hr) Value: N/A
  misc_feature: MA Experiment 20000573 PARAMETER Experiment Name: At_100uM_ABA_Mutants__P Parameter: Tissue Value: Whole Plant
  misc_feature: MA Experiment 20000573 PARAMETER Experiment Name: At_100uM_ABA_Mutants__P Parameter: Treatment Value: None
  misc_feature: MA Experiment ID: 20000574 Result: Down-regulated in Transcription
  misc_feature: MA Experiment 20000574 PARAMETER Experiment Name: At_100uM_ABA_Mutants__P Parameter: Organism Value: A. thaliana
  misc_feature: MA Experiment 20000574 PARAMETER Experiment Name: At_100uM_ABA_Mutants__P Parameter: Plant Line Value: CS23 vs. Ler wt
  misc_feature: MA Experiment 20000574 PARAMETER Experiment Name: At_100uM_ABA_Mutants__P Parameter: Timepoint (hr) Value: N/A
  misc_feature: MA Experiment 20000574 PARAMETER Experiment Name: At_100uM_ABA_Mutants__P Parameter: Tissue Value: Whole Plant
  misc_feature: MA Experiment 20000574 PARAMETER Experiment Name: At_100uM_ABA_Mutants__P Parameter: Treatment Value: None
  misc_feature: MA Experiment ID: 20000578 Result: Down-regulated in Transcription
  misc_feature: MA Experiment 20000578 PARAMETER Experiment Name: At_CS3726__P Parameter: Organism Value: A. thaliana
  misc_feature: MA Experiment 20000578 PARAMETER Experiment Name: At_CS3726__P Parameter: Plant Line Value: CS3726
  misc_feature: MA Experiment 20000578 PARAMETER Experiment Name: At_CS3726__P Parameter: Tissue Value: Whole Plant
  misc_feature: MA Experiment ID: 20001247 Result: Up-regulated in Transcription
  misc_feature: MA Experiment 20001247 PARAMETER Experiment Name: At_Far-red-induction_P Parameter: Age (day) Value: 7
  misc_feature: MA Experiment 20001247 PARAMETER Experiment Name: At_Far-red-induction_P Parameter: Light Value: Far-red vs. White
  misc_feature: MA Experiment 20001247 PARAMETER Experiment Name: At_Far-red-induction_P Parameter: Organism Value: A. thaliana
  misc_feature: MA Experiment 20001247 PARAMETER Experiment Name: At_Far-red-induction_P Parameter: Plant Line Value: Columbia
  misc_feature: MA Experiment 20001247 PARAMETER Experiment Name: At_Far-red-induction_P Parameter: Timepoint (hr) Value: 1
  misc_feature: MA Experiment 20001247 PARAMETER Experiment Name: At_Far-red-induction_P Parameter: Tissue Value: Whole Plant
  misc_feature: MA Experiment ID: 20001248 Result: Down-regulated in Transcription
  misc_feature: MA Experiment 20001248 PARAMETER Experiment Name: At_Far-red-induction_P Parameter: Age (day) Value: 7
  misc_feature: MA Experiment 20001248 PARAMETER Experiment Name: At_Far-red-induction_P Parameter: Light Value: Far-red vs. White
  misc_feature: MA Experiment 20001248 PARAMETER Experiment Name: At_Far-red-induction_P Parameter: Organism Value: A. thaliana
  misc_feature: MA Experiment 20001248 PARAMETER Experiment Name: At_Far-red-induction_P Parameter: Plant Line Value: Columbia
  misc_feature: MA Experiment 20001248 PARAMETER Experiment Name: At_Far-red-induction_P Parameter: Timepoint (hr) Value: 4
  misc_feature: MA Experiment 20001248 PARAMETER Experiment Name: At_Far-red-induction_P Parameter: Tissue Value: Whole Plant
  misc_feature: MA Experiment ID: 20001451 Result: Up-regulated in Transcription
  misc_feature: MA Experiment 20001451 PARAMETER Experiment Name: At_Far-red-induction_P Parameter: Age (day) Value: 7
  misc_feature: MA Experiment 20001451 PARAMETER Experiment Name: At_Far-red-induction_P Parameter: Light Value: Far-red vs. White
  misc_feature: MA Experiment 20001451 PARAMETER Experiment Name: At_Far-red-induction_P Parameter: Organism Value: A. thaliana
  misc_feature: MA Experiment 20001451 PARAMETER Experiment Name: At_Far-red-induction_P Parameter: Plant Line Value: Columbia
  misc_feature: MA Experiment 20001451 PARAMETER Experiment Name: At_Far-red-induction_P Parameter: Timepoint (hr) Value: 24
  misc_feature: MA Experiment 20001451 PARAMETER Experiment Name: At_Far-red-induction_P Parameter: Tissue Value: Whole Plant
  misc_feature: MA Experiment ID: 20001458 Result: Down-regulated in Transcription
  misc_feature: MA Experiment 20001458 PARAMETER Experiment Name: At_50mM_NH4NO3_L-to-H_P Parameter: Age (day) Value: Undefined
  misc_feature: MA Experiment 20001458 PARAMETER Experiment Name: At_50mM_NH4NO3_L-to-H_P Parameter: Organism Value: Undefined
  misc_feature: MA Experiment 20001458 PARAMETER Experiment Name: At_50mM_NH4NO3_L-to-H_P Parameter: Plant Line Value: Undefined
  misc_feature: MA Experiment 20001458 PARAMETER Experiment Name: At_50mM_NH4NO3_L-to-H_P Parameter: Timepoint (hr) Value: 2
  misc_feature: MA Experiment 20001458 PARAMETER Experiment Name: At_50mM_NH4NO3_L-to-H_P Parameter: Tissue Value: Siliques
  misc_feature: MA Experiment 20001458 PARAMETER Experiment Name: At_50mM_NH4NO3_L-to-H_P Parameter: Treatment Value: 50mM NH4NO3 vs. 100mM Manitol
  misc_feature: MA Experiment ID: 20001459 Result: Up-regulated in Transcription
  misc_feature: MA Experiment 20001459 PARAMETER Experiment Name: At_50mM_NH4NO3_L-to-H_P Parameter: Age (day) Value: Undefined
  misc_feature: MA Experiment 20001459 PARAMETER Experiment Name: At_50mM_NH4NO3_L-to-H_P Parameter: Organism Value: Undefined
  misc_feature: MA Experiment 20001459 PARAMETER Experiment Name: At_50mM_NH4NO3_L-to-H_P Parameter: Plant Line Value: Undefined
  misc_feature: MA Experiment 20001459 PARAMETER Experiment Name: At_50mM_NH4NO3_L-to-H_P Parameter: Timepoint (hr) Value: 4
  misc_feature: MA Experiment 20001459 PARAMETER Experiment Name: At_50mM_NH4NO3_L-to-H_P Parameter: Tissue Value: Siliques
  misc_feature: MA Experiment 20001459 PARAMETER Experiment Name: At_50mM_NH4NO3_L-to-H_P Parameter: Treatment Value: 50mM NH4NO3 vs. 100mM Manitol
  misc_feature: MA Experiment ID: 20001558 Result: Up-regulated in Transcription
  misc_feature: MA Experiment 20001558 PARAMETER Experiment Name: At_Drought_Soil_Dry_P Parameter: Age (day) Value: 27
  misc_feature: MA Experiment 20001558 PARAMETER Experiment Name: At_Drought_Soil_Dry_P Parameter: Organism Value: A. thaliana
  misc_feature: MA Experiment 20001558 PARAMETER Experiment Name: At_Drought_Soil_Dry_P Parameter: Plant Line Value: WS
  misc_feature: MA Experiment 20001558 PARAMETER Experiment Name: At_Drought_Soil_Dry_P Parameter: Post Timepoint (hr) Value: 6
  misc_feature: MA Experiment 20001558 PARAMETER Experiment Name: At_Drought_Soil_Dry_P Parameter: Post-Treatment Value: Re-Water vs. No Drought
  misc_feature: MA Experiment 20001558 PARAMETER Experiment Name: At_Drought_Soil_Dry_P Parameter: Timepoint (day) Value: 13
  misc_feature: MA Experiment 20001558 PARAMETER Experiment Name: At_Drought_Soil_Dry_P Parameter: Treatment Value: Drought vs. No Drought
  misc_feature: MA Experiment ID: 20001757 Result: Up-regulated in Transcription
  misc_feature: MA Experiment 20001757 PARAMETER Experiment Name: At_50mM_NH4NO3_L-to-H_P Parameter: Timepoint (hr) Value: 6
  misc_feature: MA Experiment 20001757 PARAMETER Experiment Name: At_50mM_NH4NO3_L-to-H_P Parameter: Tissue Value: Leaf
  misc_feature: MA Experiment 20001757 PARAMETER Experiment Name: At_50mM_NH4NO3_L-to-H_P Parameter: Treatment Value: 50mM NH4NO3 vs 100mM Mannitol
  misc_feature: MA Experiment ID: 20001904 Result: Down-regulated in Transcription
  misc_feature: MA Experiment 20001904 PARAMETER Experiment Name: At_Drought_Reproduction_P Parameter: Age (day) Value: 37
  misc_feature: MA Experiment 20001904 PARAMETER Experiment Name: At_Drought_Reproduction_P Parameter: Organism Value: A. thaliana
  misc_feature: MA Experiment 20001904 PARAMETER Experiment Name: At_Drought_Reproduction_P Parameter: Plant Line Value: WS
  misc_feature: MA Experiment 20001904 PARAMETER Experiment Name: At_Drought_Reproduction_P Parameter: Timepoint (day) Value: 7
  misc_feature: MA Experiment 20001904 PARAMETER Experiment Name: At_Drought_Reproduction_P Parameter: Tissue Value: Rosettes
  misc_feature: MA Experiment 20001904 PARAMETER Experiment Name: At_Drought_Reproduction_P Parameter: Treatment Value: Drought vs. No Drought
  misc_feature: Phenotype: WHOLE PLANT Size-Large
  misc_feature: Phenotype: WHOLE PLANT Size-Large
  misc_feature: Phenotype: WHOLE PLANT Size-Large
  misc_feature: Phenotype: WHOLE PLANT Size-Large
aaattacaatctctccttttgccaacaatcattgcttaaaaaacacataccttcttctttagttataaaaatgttgaaagaagagagtaatgagagtggtacttgggcacgagcatgtgacacttgtcgttcagccgcctgcactgtctactgtgaagccgactctgcctacttgtgcaccacctgtgatgctcgagttcacgcagccaaccgtgttgcttctcgccatgaacgtgttcgtgtctgtcagtcatgtgagtctgccccagctgcgtttttgtgtaaagcagacgctgcgtctctttgtacagcttgtgatgcagagattcattccgcaaacccactagctagacgtcatcagcgagttccgattcttccattatctgcaaactcttgcagctccatggccccaagtgagactgatgctgataacgatgaggatgatcgagaggttgcttcgtggttactccctaatccagggaaaaacatcggtaatcagaataatgggttcttgtttggtgttgagtaccttgatcttgtggattacagctccagcatggacaaccaattcgaagataatcagtacactcactaccagaggagctttggaggagatggagttgtgccgcttcaagttgaagaatcaacaagtcacctgcaacaaagccaacaaaactttcagttgggtatcaactatggattctcctcaggagctcactacaacaacaactccttaaaggacctaaaccatagcgcatccgtttcatcaatggacatcagtgttgtgccagagtcaactgcaagtgacataacagtccaacacccaagaactactaaagagacgatagaccaactatctggtcctcctactcaggtggtgcaacagcttactccaatggagagggaggctagggtcctgagatacagagagaagaagaagacaaggaaatttgacaagacaataagatatgcttcaagaaaggcatatgcagagataagaccacggatcaagggcagattcgcaaagaggatagaaactgaagctgaggctgaagaaatcttctcaacatcgctaatgtctgagactggatatggaattgtcccttccttctaaactcctatggcgaagatagactagattgcatgctgtaaattacttctagtttggatttctacaagttattactgcatatgggtccttagttttgtgacttttgtctaactagtacgagtttaatcagatatgttcctatagctgcagttgtttaagcaacatctcgctacataattgaattggtgaaatcttatc

SEQ ID NO: 25872 - protein, 370 aa, Arabidopsis thaliana
  peptide (1)..(370): Ceres Seq. ID no. 12324136
  misc_feature (34)..(81): Pfam Name: B-box zinc finger Pfam Description: B-box zinc finger
  misc_feature (24)..(370): Homolog of NCBI NO: 22854950 NR Description: COL1 protein [Brassica nigra]
  misc_feature (24)..(370): Homolog of NCBI NO: 22854920 NR Description: COL1 protein [Brassica nigra]
  misc_feature (24)..(370): Homolog of NCBI NO: 2895186 NR Description: CONSTANS homolog [Brassica napus]
  misc_feature (24)..(370): Homolog of NCBI NO: 22854966 NR Description: COL1 protein [Brassica nigra]
  misc_feature (24)..(370): Homolog of NCBI NO: 7488448 NR Description: CONSTANS homolog 1 - rape
  misc_feature (24)..(370): Homolog of NCBI NO: 30984027 NR Description: constans-like protein [Brassica napus]
  misc_feature (24)..(370): Homolog of NCBI NO: 15242403 NR Description: Zinc finger protein CONSTANS-LIKE 1 (COL1)
  misc_feature (24)..(150): Homolog of NCBI NO: 15242402 NR Description: Zinc finger protein CONSTANS
  misc_feature (139)..(370): Homolog of NCBI NO: 15242402 NR Description: Zinc finger protein CONSTANS
  misc_feature (24)..(370): Homolog of NCBI NO: 15232898 NR Description: Zinc finger protein CONSTANS-LIKE 2 (COL2)
NYNLSFCQQSLLKKHIPSSLVIKMLKEESNESGTWARACDTCRSAACTVYCEADSAYLCTTCDARVHAANRVASRHERVRVCQSCESAPAAFLCKADAASLCTACDAEIHSANPLARRHQRVPILPLSANSCSSMAPSETDADNDEDDREVASWLLPNPGKNIGNQNNGFLFGVEYLDLVDYSSSMDNQFEDNQYTHYQRSFGGDGVVPLQVEESTSHLQQSQQNFQLGINYGFSSGAHYNNNSLKDLNHSASVSSMDISVVPESTASDITVQHPRTTKETIDQLSGPPTQVVQQLTPMEREARVLRYREKKKTRKFDKTIRYASRKAYAEIRPRIKGRFAKRIETEAEAEEIFSTSLMSETGYGIVPSF

SEQ ID NO: 25873 - protein, 347 aa, Arabidopsis thaliana
  peptide (1)..(347): Ceres Seq. ID no. 12324137
  misc_feature (11)..(58): Pfam Name: B-box zinc finger Pfam Description: B-box zinc finger
  misc_feature (1)..(127): Homolog of NCBI NO: 15242402 NR Description: Zinc finger protein CONSTANS
  misc_feature (116)..(347): Homolog of NCBI NO: 15242402 NR Description: Zinc finger protein CONSTANS
  misc_feature (1)..(347): Homolog of NCBI NO: 22854920 NR Description: COL1 protein [Brassica nigra]
  misc_feature (1)..(347): Homolog of NCBI NO: 22854966 NR Description: COL1 protein [Brassica nigra]
  misc_feature (1)..(347): Homolog of NCBI NO: 30984027 NR Description: constans-like protein [Brassica napus]
  misc_feature (1)..(347): Homolog of NCBI NO: 15242403 NR Description: Zinc finger protein CONSTANS-LIKE 1 (COL1)
  misc_feature (1)..(347): Homolog of NCBI NO: 7488448 NR Description: CONSTANS homolog 1 - rape
  misc_feature (1)..(347): Homolog of NCBI NO: 2895186 NR Description: CONSTANS homolog [Brassica napus]
  misc_feature (1)..(347): Homolog of NCBI NO: 22854950 NR Description: COL1 protein [Brassica nigra]
  misc_feature (1)..(347): Homolog of NCBI NO: 15232898 NR Description: Zinc finger protein CONSTANS-LIKE 2 (COL2)
MLKEESNESGTWARACDTCRSAACTVYCEADSAYLCTTCDARVHAANRVASRHERVRVCQSCESAPAAFLCKADAASLCTACDAEIHSANPLARRHQRVPILPLSANSCSSMAPSETDADNDEDDREVASWLLPNPGKNIGNQNNGFLFGVEYLDLVDYSSSMDNQFEDNQYTHYQRSFGGDGVVPLQVEESTSHLQQSQQNFQLGINYGFSSGAHYNNNSLKDLNHSASVSSMDISVVPESTASDITVQHPRTTKETIDQLSGPPTQVVQQLTPMEREARVLRYREKKKTRKFDKTIRYASRKAYAEIRPRIKGRFAKRIETEAEAEEIFSTSLMSETGYGIVPSF

SEQ ID NO: 25874 - protein, 236 aa, Arabidopsis thaliana
  peptide (1)..(236): Ceres Seq. ID no. 12324138
  misc_feature (172)..(211): Pfam Name: CCT motif Pfam Description: CCT motif
  misc_feature (1)..(236): Homolog of NCBI NO: 22854950 NR Description: COL1 protein [Brassica nigra]
  misc_feature (1)..(236): Homolog of NCBI NO: 22854920 NR Description: COL1 protein [Brassica nigra]
  misc_feature (1)..(236): Homolog of NCBI NO: 2895186 NR Description: CONSTANS homolog [Brassica napus]
  misc_feature (1)..(236): Homolog of NCBI NO: 22854966 NR Description: COL1 protein [Brassica nigra]
  misc_feature (1)..(236): Homolog of NCBI NO: 7488448 NR Description: CONSTANS homolog 1 - rape
  misc_feature (1)..(236): Homolog of NCBI NO: 30984027 NR Description: constans-like protein [Brassica napus]
  misc_feature (1)..(236): Homolog of NCBI NO: 15242403 NR Description: Zinc finger protein CONSTANS-LIKE 1 (COL1)
  misc_feature (1)..(16): Homolog of NCBI NO: 15242402 NR Description: Zinc finger protein CONSTANS
  misc_feature (5)..(236): Homolog of NCBI NO: 15242402 NR Description: Zinc finger protein CONSTANS
  misc_feature (1)..(236): Homolog of NCBI NO: 15232898 NR Description: Zinc finger protein CONSTANS-LIKE 2 (COL2)
MAPSETDADNDEDDREVASWLLPNPGKNIGNQNNGFLFGVEYLDLVDYSSSMDNQFEDNQYTHYQRSFGGDGVVPLQVEESTSHLQQSQQNFQLGINYGFSSGAHYNNNSLKDLNHSASVSSMDISVVPESTASDITVQHPRTTKETIDQLSGPPTQVVQQLTPMEREARVLRYREKKKTRKFDKTIRYASRKAYAEIRPRIKGRFAKRIETEAEAEEIFSTSLMSETGYGIVPSF

SEQ ID NO: 25875 - DNA, 1611 bp, Arabidopsis thaliana
  misc_feature (1)..(1611): Ceres Seq. ID no. 12422239
  misc_feature: MA Experiment ID: 20000182 Result: Up-regulated in Transcription
  misc_feature: MA Experiment 20000182 PARAMETER Experiment Name: At_2mM_SA_P Parameter: Age (day) Value: 14
  misc_feature: MA Experiment 20000182 PARAMETER Experiment Name: At_2mM_SA_P Parameter: Organism Value: A. thaliana
  misc_feature: MA Experiment 20000182 PARAMETER Experiment Name: At_2mM_SA_P Parameter: Plant Line Value: WS
  misc_feature: MA Experiment 20000182 PARAMETER Experiment Name: At_2mM_SA_P Parameter: Timepoint (hr) Value: 6
  misc_feature: MA Experiment 20000182 PARAMETER Experiment Name: At_2mM_SA_P Parameter: Tissue Value: Aerial
  misc_feature: MA Experiment 20000182 PARAMETER Experiment Name: At_2mM_SA_P Parameter: Treatment Value: 2mM SA vs. No Treatment
  misc_feature: MA Experiment ID: 20000265 Result: Down-regulated in Transcription
  misc_feature: MA Experiment 20000265 PARAMETER Experiment Name: At_Open_Flower_P Parameter: Age (day) Value: 21
  misc_feature: MA Experiment 20000265 PARAMETER Experiment Name: At_Open_Flower_P Parameter: Plant Line Value: WS
  misc_feature: MA Experiment 20000265 PARAMETER Experiment Name: At_Open_Flower_P Parameter: Tissue Value: Closed Flower vs. Whole Plant
  misc_feature: MA Experiment ID: 20001248 Result: Up-regulated in Transcription
  misc_feature: MA Experiment 20001248 PARAMETER Experiment Name: At_Far-red-induction_P Parameter: Age (day) Value: 7
  misc_feature: MA Experiment 20001248 PARAMETER Experiment Name: At_Far-red-induction_P Parameter: Light Value: Far-red vs. White
  misc_feature: MA Experiment 20001248 PARAMETER Experiment Name: At_Far-red-induction_P Parameter: Organism Value: A. thaliana
  misc_feature: MA Experiment 20001248 PARAMETER Experiment Name: At_Far-red-induction_P Parameter: Plant Line Value: Columbia
  misc_feature: MA Experiment 20001248 PARAMETER Experiment Name: At_Far-red-induction_P Parameter: Timepoint (hr) Value: 4
  misc_feature: MA Experiment 20001248 PARAMETER Experiment Name: At_Far-red-induction_P Parameter: Tissue Value: Whole Plant
  misc_feature: MA Experiment ID: 20001451 Result: Up-regulated in Transcription
  misc_feature: MA Experiment 20001451 PARAMETER Experiment Name: At_Far-red-induction_P Parameter: Age (day) Value: 7
  misc_feature: MA Experiment 20001451 PARAMETER Experiment Name: At_Far-red-induction_P Parameter: Light Value: Far-red vs. White
  misc_feature: MA Experiment 20001451 PARAMETER Experiment Name: At_Far-red-induction_P Parameter: Organism Value: A. thaliana
  misc_feature: MA Experiment 20001451 PARAMETER Experiment Name: At_Far-red-induction_P Parameter: Plant Line Value: Columbia
  misc_feature: MA Experiment 20001451 PARAMETER Experiment Name: At_Far-red-induction_P Parameter: Timepoint (hr) Value: 24
  misc_feature: MA Experiment 20001451 PARAMETER Experiment Name: At_Far-red-induction_P Parameter: Tissue Value: Whole Plant
aacaaaatcaattctccaaattaaaatctcgtcttccccaattggtttagcgcgacaagagcatcaacgcaatggtgggaacatcaagctcctccgccggcgaccacacccacaccgtcgtgataaatgccctaactagtcggggctggtgcttcagagacgtcgaatacttgaaatccctggtcactgaaatctcttccttgatcggcggcggcaataaaacaggcgccatcgtggagtcagtggaggcggagctgcttaacatggatattaagttaatcggaggtaaatccctcccggacccgaccgagttacgcaggtgttctcatcttcaaggccccaaagttctccagataagttatgttagggatgttacaagaagtagcgcagaggaatttgtgggaagttccactggtaaacgagtgctaaaattcgctctgactgacgggaagaccgaaatatccgcgcttgagtactctcatataccaacgattaacaatgatgtcactcctggtactaaggtacgtctagaaaataaggctgtgatacgtgatggtctagtatgtttgactccaaaagaggtgactgtcttgggcggttatgtgcaatcactcactgaagaatggcagatgaagaaaaaatacgctagtttggctcgatctcaggaaagcaaagctggtgatggccctcctccatttgaggagttgaagattcgaacaggttcccatcaccgcgattacaacaagacgacttctagaaacaatgtacctattgctgcagaaagctctgtaaaacatgccggtggagaaaaaggtgaaagtagtgaagttgatgggaacaaaagaggcacaaataagaatatacagaggaatcctgcagattctgatccgaaaatatctgtcgaagttgaaaatcaggaaaagcgaagcagttccgatacacgacctaaacaagtggtggaagctgttcctttacagaaccaagcggctgcgcagatacttcttgagaagatgaaacattctagttcaaatgataggcaataccaaggaagaagaggtaggggtagaggtagaggtagagggagggggagagaagaagaagactctgcagtatttacactagatgagtgggaaaagaggaatactggtgggggggctcttccaacagctaaccatccaagcgacactacccgcgatgaagatcttgcatggcagcttcagaatcagtttgatctggaagactcttatgggcaggagatgcctggagccggggcagcggatatcagaatgaatatgtttgattacggaagaacagaagataacttcggccatggaaggggaagaggaggaggaagaggaaggggtagagggcgaggacatagacggggaagaggacgtgtgtagattgtaatgaaatcatccaggcttgtggtaattaaacaaaacttcatcatttacatctgtatatctttatgtatgttttagagtaaacatgtatcttattacatattttagagcattattactcatgtatgctttggttctcacaggtgtggcagctctgaatctgtacatgtttgttttagggtgattcagaatttcagattttcgc

SEQ ID NO: 25876 - protein, 443 aa, Arabidopsis thaliana
  peptide (1)..(443): Ceres Seq. ID no. 12422240
  misc_feature (118)..(323): Homolog of NCBI NO: 38174568 NR Description: Tudor domain containing 3 [Homo sapiens]
  misc_feature (62)..(293): Homolog of NCBI NO: 39581706 NR Description: Hypothetical protein CBG17880 [Caenorhabditis
  misc_feature (69)..(267): Homolog of NCBI NO: 6066427 NR Description: hypothetical protein L2581.08 [Leishmania major]
  misc_feature (55)..(209): Homolog of NCBI NO: 21358245 NR Description: CG13472-PA [Drosophila melanogaster]
  misc_feature (56)..(209): Homolog of NCBI NO: 29841332 NR Description: similar to NM_070957 Y50D4C [Schistosoma
  misc_feature (63)..(239): Homolog of NCBI NO: 33416597 NR Description: Unknown (protein for IMAGE:5604109) [Danio rerio]
  misc_feature (54)..(209): Homolog of NCBI NO: 34875440 NR Description: similar to RIKEN cDNA 4732418C03 [Rattus
  misc_feature (233)..(392): Homolog of NCBI NO: 34906132 NR Description: P0509B06.3 [Oryza sativa (japonica
  misc_feature (57)..(334): Homolog of NCBI NO: 34906132 NR Description: P0509B06.3 [Oryza sativa (japonica
  misc_feature (1)..(443): Homolog of NCBI NO: 18420083 NR Description: putative protein
MVGTSSSSAGDHTHTVVINALTSRGWCFRDVEYLKSLVTEISSLIGGGNKTGAIVESVEAELLNMDIKLIGGKSLPDPTELRRCSHLQGPKVLQISYVRDVTRSSAEEFVGSSTGKRVLKFALTDGKTEISALEYSHIPTINNDVTPGTKVRLENKAVIRDGLVCLTPKEVTVLGGYVQSLTEEWQMKKKYASLARSQESKAGDGPPPFEELKIRTGSHHRDYNKTTSRNNVPIAAESSVKHAGGEKGESSEVDGNKRGTNKNIQRNPADSDPKISVEVENQEKRSSSDTRPKQVVEAVPLQNQAAAQILLEKMKHSSSNDRQYQGRRGRGRGRGRGRGREEEDSAVFTLDEWEKRNTGGGALPTANHPSDTTRDEDLAWQLQNQFDLEDSYGQEMPGAGAADIRMNMFDYGRTEDNFGHGRGRGGGRGRGRGRGHRRGRGRV

SEQ ID NO: 25877 - protein, 379 aa, Arabidopsis thaliana
  peptide (1)..(379): Ceres Seq. ID no. 12422241
  misc_feature (54)..(259): Homolog of NCBI NO: 38174568 NR Description: Tudor domain containing 3 [Homo sapiens]
  misc_feature (1)..(229): Homolog of NCBI NO: 39581706 NR Description: Hypothetical protein CBG17880 [Caenorhabditis
  misc_feature (5)..(203): Homolog of NCBI NO: 6066427 NR Description: hypothetical protein L2581.08 [Leishmania major]
  misc_feature (1)..(145): Homolog of NCBI NO: 21358245 NR Description: CG13472-PA [Drosophila melanogaster]
  misc_feature (1)..(145): Homolog of NCBI NO: 29841332 NR Description: similar to NM_070957 Y50D4C [Schistosoma
  misc_feature (1)..(175): Homolog of NCBI NO: 33416597 NR Description: Unknown (protein for IMAGE:5604109) [Danio rerio]
  misc_feature (1)..(145): Homolog of NCBI NO: 34875440 NR Description: similar to RIKEN cDNA 4732418C03 [Rattus
  misc_feature (169)..(328): Homolog of NCBI NO: 34906132 NR Description: P0509B06.3 [Oryza sativa (japonica
  misc_feature (1)..(270): Homolog of NCBI NO: 34906132 NR Description: P0509B06.3 [Oryza sativa (japonica
  misc_feature (1)..(379): Homolog of NCBI NO: 18420083 NR Description: putative protein
MDIKLIGGKSLPDPTELRRCSHLQGPKVLQISYVRDVTRSSAEEFVGSSTGKRVLKFALTDGKTEISALEYSHIPTINNDVTPGTKVRLENKAVIRDGLVCLTPKEVTVLGGYVQSLTEEWQMKKKYASLARSQESKAGDGPPPFEELKIRTGSHHRDYNKTTSRNNVPIAAESSVKHAGGEKGESSEVDGNKRGTNKNIQRNPADSDPKISVEVENQEKRSSSDTRPKQVVEAVPLQNQAAAQILLEKMKHSSSNDRQYQGRRGRGRGRGRGRGREEEDSAVFTLDEWEKRNTGGGALPTANHPSDTTRDEDLAWQLQNQFDLEDSYGQEMPGAGAADIRMNMFDYGRTEDNFGHGRGRGGGRGRGRGRGHRRGRGRV

SEQ ID NO: 25878 - protein, 257 aa, Arabidopsis thaliana
  peptide (1)..(257): Ceres Seq. ID no. 12422242
  misc_feature (1)..(137): Homolog of NCBI NO: 38174568 NR Description: Tudor domain containing 3 [Homo sapiens]
  misc_feature (1)..(107): Homolog of NCBI NO: 39581706 NR Description: Hypothetical protein CBG17880 [Caenorhabditis
  misc_feature (1)..(81): Homolog of NCBI NO: 6066427 NR Description: hypothetical protein L2581.08 [Leishmania major]
  misc_feature (1)..(23): Homolog of NCBI NO: 21358245 NR Description: CG13472-PA [Drosophila melanogaster]
  misc_feature (1)..(23): Homolog of NCBI NO: 29841332 NR Description: similar to NM_070957 Y50D4C [Schistosoma
  misc_feature (1)..(53): Homolog of NCBI NO: 33416597 NR Description: Unknown (protein for IMAGE:5604109) [Danio rerio]
  misc_feature (1)..(23): Homolog of NCBI NO: 34875440 NR Description: similar to RIKEN cDNA 4732418C03 [Rattus
  misc_feature (47)..(206): Homolog of NCBI NO: 34906132 NR Description: P0509B06.3 [Oryza sativa (japonica
  misc_feature (1)..(148): Homolog of NCBI NO: 34906132 NR Description: P0509B06.3 [Oryza sativa (japonica
  misc_feature (1)..(257): Homolog of NCBI NO: 18420083 NR Description: putative protein
MKKKYASLARSQESKAGDGPPPFEELKIRTGSHHRDYNKTTSRNNVPIAAESSVKHAGGEKGESSEVDGNKRGTNKNIQRNPADSDPKISVEVENQEKRSSSDTRPKQVVEAVPLQNQAAAQILLEKMKHSSSNDRQYQGRRGRGRGRGRGRGREEEDSAVFTLDEWEKRNTGGGALPTANHPSDTTRDEDLAWQLQNQFDLEDSYGQEMPGAGAADIRMNMFDYGRTEDNFGHGRGRGGGRGRGRGRGHRRGRGRV

SEQ ID NO: 25879 - DNA, 652 bp, Arabidopsis thaliana
  misc_feature (1)..(652): Ceres Seq. ID no. 12739011
  misc_feature: MA Experiment ID: 108595 Result: Down-regulated in Transcription
  misc_feature: MA Experiment 108595 PARAMETER Experiment Name: At_Ler-pi_Ovule_cDNA_P Parameter: Plant Line Value: null
atttttcttttcatttcatttctgattgtctttctcagaatccctagaacacactctgattaacgaatcaaagatcgatttgggattgtgatcgatcgaggaagaagatgacggaggcgatgataaggaagaagccaggaatggcgagtgtgaaggatatgccgttgcttcaggatggtccaccaccgggtggattcgcaccggtccgatatgctcgccggatctctaacacgggtccaagcgccatggctattttccttaccgtttcaggtgcttttgcttgggggatgtaccaagtcggtcagggcaacaaaatccgcagggcgttgaaggaagagaaatacgctgctcgtagagcgattctaccaattcttcaagctgaagaagatgaaaggtttgtgtctgagtggaagaagtatctagaatacgaggcggatgtgatgaaggatgttcctggatggaaagtcggtgaaaacgtgtacaattctggtcgttggatgcctccagctactggagagcttcgtcctgatgtctggtaaattatcaatggctccttttgatgatgatgaatgaatgtttgtttaagcattttagaaccttgatgtttcttgtctctctttttccatcgtataataagagaattgatacatac

SEQ ID NO: 25880 - protein, 143 aa, Arabidopsis thaliana
  peptide (1)..(143): Ceres Seq. ID no. 12739012
  misc_feature (16)..(141): Pfam Name: GRIM-19 protein Pfam Description: GRIM-19 protein
  misc_feature (13)..(138): Homolog of NCBI NO: 34809544 NR Description: GRIM19 protein [Homo sapiens]
  misc_feature (22)..(138): Homolog of NCBI NO: 28603804 NR Description: cell death-regulatory protein GRIM19 [Bos taurus]
  misc_feature (13)..(138): Homolog of NCBI NO: 21361822 NR Description: cell death-regulatory protein GRIM19; CGI-39
  misc_feature (1)..(140): Homolog of NCBI NO: 34334020 NR Description: NADH:ubiquinone oxidoreductase B16.6 subunit
  misc_feature (1)..(72): Homolog of NCBI NO: 26451954 NR Description: unknown protein [Arabidopsis thaliana]
  misc_feature (1)..(141): Homolog of NCBI NO: 25406799 NR Description: hypothetical protein [imported] - Arabidopsis
  misc_feature (1)..(139): Homolog of NCBI NO: 16973316 NR Description: F6 [Gossypium hirsutum]
  misc_feature (1)..(142): Homolog of NCBI NO: 15219769 NR Description: unknown protein; protein id: At1g04630.1
  misc_feature (1)..(143): Homolog of NCBI NO: 20260652 NR Description: unknown protein [Arabidopsis thaliana]
  misc_feature (1)..(143): Homolog of NCBI NO: 18403216 NR Description: expressed protein
MTEAMIRKKPGMASVKDMPLLQDGPPPGGFAPVRYARRISNTGPSAMAIFLTVSGAFAWGMYQVGQGNKIRRALKEEKYAARRAILPILQAEEDERFVSEWKKYLEYEADVMKDVPGWKVGENVYNSGRWMPPATGELRPDVW

SEQ ID NO: 25881 - protein, 139 aa, Arabidopsis thaliana
  peptide (1)..(139): Ceres Seq. ID no. 12739013
  misc_feature (12)..(137): Pfam Name: GRIM-19 protein Pfam Description: GRIM-19 protein
  misc_feature (9)..(134): Homolog of NCBI NO: 34809544 NR Description: GRIM19 protein [Homo sapiens]
  misc_feature (18)..(134): Homolog of NCBI NO: 28603804 NR Description: cell death-regulatory protein GRIM19 [Bos taurus]
  misc_feature (9)..(134): Homolog of NCBI NO: 21361822 NR Description: cell death-regulatory protein GRIM19; CGI-39
  misc_feature (1)..(136): Homolog of NCBI NO: 34334020 NR Description: NADH:ubiquinone oxidoreductase B16.6 subunit
  misc_feature (1)..(68): Homolog of NCBI NO: 26451954 NR Description: unknown protein [Arabidopsis thaliana]
  misc_feature (1)..(137): Homolog of NCBI NO: 25406799 NR Description: hypothetical protein [imported] - Arabidopsis
  misc_feature (1)..(135): Homolog of NCBI NO: 16973316 NR Description: F6 [Gossypium hirsutum]
  misc_feature (1)..(138): Homolog of NCBI NO: 15219769 NR Description: unknown protein; protein id: At1g04630.1
  misc_feature (1)..(139): Homolog of NCBI NO: 20260652 NR Description: unknown protein [Arabidopsis thaliana]
  misc_feature (1)..(139): Homolog of NCBI NO: 18403216 NR Description: expressed protein
MIRKKPGMASVKDMPLLQDGPPPGGFAPVRYARRISNTGPSAMAIFLTVSGAFAWGMYQVGQGNKIRRALKEEKYAARRAILPILQAEEDERFVSEWKKYLEYEADVMKDVPGWKVGENVYNSGRWMPPATGELRPDVW

SEQ ID NO: 25882 - protein, 132 aa, Arabidopsis thaliana
  peptide (1)..(132): Ceres Seq. ID no. 12739014
  misc_feature (5)..(130): Pfam Name: GRIM-19 protein Pfam Description: GRIM-19 protein
  misc_feature (2)..(127): Homolog of NCBI NO: 34809544 NR Description: GRIM19 protein [Homo sapiens]
  misc_feature (11)..(127): Homolog of NCBI NO: 28603804 NR Description: cell death-regulatory protein GRIM19 [Bos taurus]
  misc_feature (2)..(127): Homolog of NCBI NO: 21361822 NR Description: cell death-regulatory protein GRIM19; CGI-39
  misc_feature (1)..(129): Homolog of NCBI NO: 34334020 NR Description: NADH:ubiquinone oxidoreductase B16.6 subunit
  misc_feature (1)..(61): Homolog of NCBI NO: 26451954 NR Description: unknown protein [Arabidopsis thaliana]
  misc_feature (1)..(130): Homolog of NCBI NO: 25406799 NR Description: hypothetical protein [imported] - Arabidopsis
  misc_feature (1)..(128): Homolog of NCBI NO: 16973316 NR Description: F6 [Gossypium hirsutum]
  misc_feature (1)..(131): Homolog of NCBI NO: 15219769 NR Description: unknown protein; protein id: At1g04630.1
  misc_feature (1)..(132): Homolog of NCBI NO: 20260652 NR Description: unknown protein [Arabidopsis thaliana]
  misc_feature (1)..(132): Homolog of NCBI NO: 18403216 NR Description: expressed protein
MASVKDMPLLQDGPPPGGFAPVRYARRISNTGPSAMAIFLTVSGAFAWGMYQVGQGNKIRRALKEEKYAARRAILPILQAEEDERFVSEWKKYLEYEADVMKDVPGWKVGENVYNSGRWMPPATGELRPDVW

SEQ ID NO: 25883 - DNA, 513 bp, Arabidopsis thaliana
  misc_feature (1)..(513): Ceres Seq. ID no. 12338142
  misc_feature: MA Experiment ID: 108434 Result: Down-regulated in Transcription
  misc_feature: MA Experiment 108434 PARAMETER Experiment Name: At_Root_Tips_cDNA_P Parameter: Tissue Value: Root Tips
  misc_feature: MA Experiment ID: 108579 Result: Up-regulated in Transcription
  misc_feature: MA Experiment 108579 PARAMETER Experiment Name: At_4deg_Cold_cDNA_P Parameter: Temperature (deg C) Value: 4 vs. 22
  misc_feature: MA Experiment 108579 PARAMETER Experiment Name: At_4deg_Cold_cDNA_P Parameter: Timepoint (hr) Value: 6
  misc_feature: MA Experiment 108579 PARAMETER Experiment Name: At_4deg_Cold_cDNA_P Parameter: Tissue Value: Aerial
  misc_feature: MA Experiment ID: 108595 Result: Down-regulated in Transcription
  misc_feature: MA Experiment 108595 PARAMETER Experiment Name: At_Ler-pi_Ovule_cDNA_P Parameter: Plant Line Value: null
  misc_feature: MA Experiment ID: 20000185 Result: Up-regulated in Transcription
  misc_feature: MA Experiment 20000185 PARAMETER Experiment Name: At_Roots__P Parameter: Age (day) Value: 7 vs. 21
  misc_feature: MA Experiment 20000185 PARAMETER Experiment Name: At_Roots__P Parameter: Organism Value: A. thaliana
  misc_feature: MA Experiment 20000185 PARAMETER Experiment Name: At_Roots__P Parameter: Tissue Value: Roots vs. Whole Plant
  misc_feature: MA Experiment ID: 20000224 Result: Up-regulated in Transcription
  misc_feature: MA Experiment ID: 20000439 Result: Up-regulated in Transcription
  misc_feature: MA Experiment 20000439 PARAMETER Experiment Name: At_Roots__P Parameter: Age (day) Value: 14 vs. 21
  misc_feature: MA Experiment 20000439 PARAMETER Experiment Name: At_Roots__P Parameter: Organism Value: A. thaliana
  misc_feature: MA Experiment 20000439 PARAMETER Experiment Name: At_Roots__P Parameter: Tissue Value: Roots vs. Whole Plant
  misc_feature: MA Experiment ID: 20000451 Result: Up-regulated in Transcription
  misc_feature: MA Experiment 20000451 PARAMETER Experiment Name: At_CS6879_Shoots-Roots_P Parameter: Age (day) Value: 14
  misc_feature: MA Experiment 20000451 PARAMETER Experiment Name: At_CS6879_Shoots-Roots_P Parameter: Organism Value: A. thaliana
  misc_feature: MA Experiment 20000451 PARAMETER Experiment Name: At_CS6879_Shoots-Roots_P Parameter: Plant Line Value: CS6879 vs. WS
  misc_feature: MA Experiment 20000451 PARAMETER Experiment Name: At_CS6879_Shoots-Roots_P Parameter: Tissue Value: Roots
  misc_feature: MA Experiment ID: 20001451 Result: Down-regulated in Transcription
  misc_feature: MA Experiment 20001451 PARAMETER Experiment Name: At_Far-red-induction_P Parameter: Age (day) Value: 7
  misc_feature: MA Experiment 20001451 PARAMETER Experiment Name: At_Far-red-induction_P Parameter: Light Value: Far-red vs. White
  misc_feature: MA Experiment 20001451 PARAMETER Experiment Name: At_Far-red-induction_P Parameter: Organism Value: A. thaliana
  misc_feature: MA Experiment 20001451 PARAMETER Experiment Name: At_Far-red-induction_P Parameter: Plant Line Value: Columbia
  misc_feature: MA Experiment 20001451 PARAMETER Experiment Name: At_Far-red-induction_P Parameter: Timepoint (hr) Value: 24
  misc_feature: MA Experiment 20001451 PARAMETER Experiment Name: At_Far-red-induction_P Parameter: Tissue Value: Whole Plant
ttctataccgatgaaaatggaagaatacgtaccagaacaaaccgatctggtggaattcagggagggatctcaaatggtgaaataataaacatgagagtagccttcaagccaacatcaacaattggaaggaagcagaatacggtaaccagagacaaggtagaaaccgaaatgattgcgcgtggtcgtcatgatccttgtgttgttcctcgagctgtgccaatggtggaagcaatggtggctttagttcttgtggatcaattgatggcgcaatacgcacaatgccatttgtttccaataaatccagagttgcaggaacctctccagatagagcagccccaaaatgctactgctttgtaagcaaaactcgagaagataagagtcagagacagtaaggcttcgcttttgttgtgtgattattattatgaataaaaaaaatgttaattttgtacccaccagagaaacaaaaaacatgatttttttgtaagaggatttgcttctatatcattattcagc

SEQ ID NO: 25884 - protein, 118 aa, Arabidopsis thaliana
  peptide (1)..(118): Ceres Seq. ID no. 12338143
  misc_feature (1)..(91): Pfam Name: Chorismate synthase Pfam Description: Chorismate synthase
  misc_feature (1)..(94): Homolog of NCBI NO: 16330007 NR Description: chorismate synthase [Synechocystis sp. PCC 6803]
  misc_feature (2)..(95): Homolog of NCBI NO: 23039390 NR Description: hypothetical protein [Trichodesmium erythraeum
  misc_feature (1)..(94): Homolog of NCBI NO: 23126882 NR Description: hypothetical protein [Nostoc punctiforme]
  misc_feature (1)..(94): Homolog of NCBI NO: 17228292 NR Description: chorismate synthase [Nostoc sp. PCC 7120]
  misc_feature (1)..(96): Homolog of NCBI NO: 22298006 NR Description: chorismate synthase [Thermosynechococcus
  misc_feature (1)..(115): Homolog of NCBI NO: 2492953 NR Description: Chorismate synthase 2, chloroplast precursor
  misc_feature (1)..(117): Homolog of NCBI NO: 114182 NR Description: Chorismate synthase, chloroplast precursor
  misc_feature (1)..(115): Homolog of NCBI NO: 2492952 NR Description: Chorismate synthase 1, chloroplast precursor
  misc_feature (1)..(118): Homolog of NCBI NO: 18402389 NR Description: chorismate synthase, putative
  misc_feature (1)..(118): Homolog of NCBI NO: 12229700 NR Description: Chorismate synthase, chloroplast precursor
FYTDENGRIRTRTNRSGGIQGGISNGEIINMRVAFKPTSTIGRKQNTVTRDKVETEMIARGRHDPCVVPRAVPMVEAMVALVLVDQLMAQYAQCHLFPINPELQEPLQIEQPQNATAL

SEQ ID NO: 25885 - protein, 88 aa, Arabidopsis thaliana
  peptide (1)..(88): Ceres Seq. ID no. 12338144
  misc_feature (1)..(61): Pfam Name: Chorismate synthase Pfam Description: Chorismate synthase
  misc_feature (1)..(85): Homolog of NCBI NO: 2492952 NR Description: Chorismate synthase 1, chloroplast precursor
  misc_feature (1)..(88): Homolog of NCBI NO: 18402389 NR Description: chorismate synthase, putative
  misc_feature (1)..(65): Homolog of NCBI NO: 23039390 NR Description: hypothetical protein [Trichodesmium erythraeum
  misc_feature (1)..(64): Homolog of NCBI NO: 17228292 NR Description: chorismate synthase [Nostoc sp. PCC 7120]
  misc_feature (1)..(85): Homolog of NCBI NO: 2492953 NR Description: Chorismate synthase 2, chloroplast precursor
  misc_feature (1)..(87): Homolog of NCBI NO: 114182 NR Description: Chorismate synthase, chloroplast precursor
  misc_feature (1)..(66): Homolog of NCBI NO: 22298006 NR Description: chorismate synthase [Thermosynechococcus
  misc_feature (1)..(64): Homolog of NCBI NO: 23126882 NR Description: hypothetical protein [Nostoc punctiforme]
  misc_feature (1)..(64): Homolog of NCBI NO: 16330007 NR Description: chorismate synthase [Synechocystis sp. PCC 6803]
  misc_feature (1)..(88): Homolog of NCBI NO: 12229700 NR Description: Chorismate synthase, chloroplast precursor
MRVAFKPTSTIGRKQNTVTRDKVETEMIARGRHDPCVVPRAVPMVEAMVALVLVDQLMAQYAQCHLFPINPELQEPLQIEQPQNATAL

SEQ ID NO: 25886 - protein, 62 aa, Arabidopsis thaliana
  peptide (1)..(62): Ceres Seq. ID no. 12338145
  misc_feature (1)..(38): Homolog of NCBI NO: 16330007 NR Description: chorismate synthase [Synechocystis sp. PCC 6803]
  misc_feature (1)..(39): Homolog of NCBI NO: 23039390 NR Description: hypothetical protein [Trichodesmium erythraeum
  misc_feature (1)..(38): Homolog of NCBI NO: 23126882 NR Description: hypothetical protein [Nostoc punctiforme]
  misc_feature (1)..(38): Homolog of NCBI NO: 17228292 NR Description: chorismate synthase [Nostoc sp. PCC 7120]
  misc_feature (1)..(40): Homolog of NCBI NO: 22298006 NR Description: chorismate synthase [Thermosynechococcus
  misc_feature (1)..(59): Homolog of NCBI NO: 2492953 NR Description: Chorismate synthase 2, chloroplast precursor
  misc_feature (1)..(61): Homolog of NCBI NO: 114182 NR Description: Chorismate synthase, chloroplast precursor
  misc_feature (1)..(59): Homolog of NCBI NO: 2492952 NR Description: Chorismate synthase 1, chloroplast precursor
  misc_feature (1)..(62): Homolog of NCBI NO: 18402389 NR Description: chorismate synthase, putative
  misc_feature (1)..(62): Homolog of NCBI NO: 12229700 NR Description: Chorismate synthase, chloroplast precursor
MIARGRHDPCVVPRAVPMVEAMVALVLVDQLMAQYAQCHLFPINPELQEPLQIEQPQNATAL

SEQ ID NO: 25887 - DNA, 880 bp, Arabidopsis thaliana
  misc_feature (1)..(880): Ceres Seq. ID no. 12323735
  misc_feature: MA Experiment ID: 108595 Result: Up-regulated in Transcription
  misc_feature: MA Experiment 108595 PARAMETER Experiment Name: At_Ler-pi_Ovule_cDNA_P Parameter: Plant Line Value: null
  misc_feature: MA Experiment ID: 20000265 Result: Down-regulated in Transcription
  misc_feature: MA Experiment 20000265 PARAMETER Experiment Name: At_Open_Flower_P Parameter: Age (day) Value: 21
  misc_feature: MA Experiment 20000265 PARAMETER Experiment Name: At_Open_Flower_P Parameter: Plant Line Value: WS
  misc_feature: MA Experiment 20000265 PARAMETER Experiment Name: At_Open_Flower_P Parameter: Tissue Value: Closed Flower vs. Whole Plant
  misc_feature: MA Experiment ID: 20000438 Result: Down-regulated in Transcription
  misc_feature: MA Experiment 20000438 PARAMETER Experiment Name: At_Shoots__P Parameter: Age (day) Value: 14
  misc_feature: MA Experiment 20000438 PARAMETER Experiment Name: At_Shoots__P Parameter: Tissue Value: Shoots vs. Whole Plant
  misc_feature: MA Experiment ID: 20000794 Result: Up-regulated in Transcription
  misc_feature: MA Experiment 20000794 PARAMETER Experiment Name: At_Petals_P Parameter: Age (day) Value: 23-25 days
  misc_feature: MA Experiment 20000794 PARAMETER Experiment Name: At_Petals_P Parameter: Plant Line Value: WS
  misc_feature: MA Experiment 20000794 PARAMETER Experiment Name: At_Petals_P Parameter: Tissue Value: Petals vs. Whole plant
  misc_feature: MA Experiment ID: 20001555 Result: Down-regulated in Transcription
  misc_feature: MA Experiment 20001555 PARAMETER Experiment Name: At_Drought_Soil_Dry_P Parameter: Age (day) Value: 24
  misc_feature: MA Experiment 20001555 PARAMETER Experiment Name: At_Drought_Soil_Dry_P Parameter: Organism Value: A. thaliana
  misc_feature: MA Experiment 20001555 PARAMETER Experiment Name: At_Drought_Soil_Dry_P Parameter: Plant Line Value: WS
  misc_feature: MA Experiment 20001555 PARAMETER Experiment Name: At_Drought_Soil_Dry_P Parameter: Post Timepoint (hr) Value: None
  misc_feature: MA Experiment 20001555 PARAMETER Experiment Name: At_Drought_Soil_Dry_P Parameter: Post-Treatment Value: None
  misc_feature: MA Experiment 20001555 PARAMETER Experiment Name: At_Drought_Soil_Dry_P Parameter: Timepoint (day) Value: 10
  misc_feature: MA Experiment 20001555 PARAMETER Experiment Name: At_Drought_Soil_Dry_P Parameter: Treatment Value: Drought vs. No Drought
  misc_feature: MA Experiment ID: 20001556 Result: Down-regulated in Transcription
  misc_feature: MA Experiment 20001556 PARAMETER Experiment Name: At_Drought_Soil_Dry_P Parameter: Age (day) Value: 26
  misc_feature: MA Experiment 20001556 PARAMETER Experiment Name: At_Drought_Soil_Dry_P Parameter: Organism Value: A. thaliana
  misc_feature: MA Experiment 20001556 PARAMETER Experiment Name: At_Drought_Soil_Dry_P Parameter: Plant Line Value: WS
  misc_feature: MA Experiment 20001556 PARAMETER Experiment Name: At_Drought_Soil_Dry_P Parameter: Post Timepoint (hr) Value: None
  misc_feature: MA Experiment 20001556 PARAMETER Experiment Name: At_Drought_Soil_Dry_P Parameter: Post-Treatment Value: None
  misc_feature: MA Experiment 20001556 PARAMETER Experiment Name: At_Drought_Soil_Dry_P Parameter: Timepoint (day) Value: 12
  misc_feature: MA Experiment 20001556 PARAMETER Experiment Name: At_Drought_Soil_Dry_P Parameter: Treatment Value: Drought vs. No Drought
  misc_feature: MA Experiment ID: 20001558 Result: Down-regulated in Transcription
  misc_feature: MA Experiment 20001558 PARAMETER Experiment Name: At_Drought_Soil_Dry_P Parameter: Age (day) Value: 27
  misc_feature: MA Experiment 20001558 PARAMETER Experiment Name: At_Drought_Soil_Dry_P Parameter: Organism Value: A. thaliana
  misc_feature: MA Experiment 20001558 PARAMETER Experiment Name: At_Drought_Soil_Dry_P Parameter: Plant Line Value: WS
  misc_feature: MA Experiment 20001558 PARAMETER Experiment Name: At_Drought_Soil_Dry_P Parameter: Post Timepoint (hr) Value: 6
  misc_feature: MA Experiment 20001558 PARAMETER Experiment Name: At_Drought_Soil_Dry_P Parameter: Post-Treatment Value: Re-Water vs. No Drought
  misc_feature: MA Experiment 20001558 PARAMETER Experiment Name: At_Drought_Soil_Dry_P Parameter: Timepoint (day) Value: 13
  misc_feature: MA Experiment 20001558 PARAMETER Experiment Name: At_Drought_Soil_Dry_P Parameter: Treatment Value: Drought vs. No Drought
  misc_feature: MA Experiment ID: 20001559 Result: Down-regulated in Transcription
  misc_feature: MA Experiment 20001559 PARAMETER Experiment Name: At_Drought_Soil_Dry_P Parameter: Age (day) Value: 28
  misc_feature: MA Experiment 20001559 PARAMETER Experiment Name: At_Drought_Soil_Dry_P Parameter: Organism Value: A. thaliana
  misc_feature: MA Experiment 20001559 PARAMETER Experiment Name: At_Drought_Soil_Dry_P Parameter: Plant Line Value: WS
  misc_feature: MA Experiment 20001559 PARAMETER Experiment Name: At_Drought_Soil_Dry_P Parameter: Post Timepoint (hr) Value: 29
  misc_feature: MA Experiment 20001559 PARAMETER Experiment Name: At_Drought_Soil_Dry_P Parameter: Post-Treatment Value: Re-Water vs. No Drought
  misc_feature: MA Experiment 20001559 PARAMETER Experiment Name: At_Drought_Soil_Dry_P Parameter: Timepoint (day) Value: 14
  misc_feature: MA Experiment 20001559 PARAMETER Experiment Name: At_Drought_Soil_Dry_P Parameter: Treatment Value: Drought vs. No Drought
  misc_feature: MA Experiment ID: 20001757 Result: Down-regulated in Transcription
  misc_feature: MA Experiment 20001757 PARAMETER Experiment Name: At_50mM_NH4NO3_L-to-H_P Parameter: Timepoint (hr) Value: 6
  misc_feature: MA Experiment 20001757 PARAMETER Experiment Name: At_50mM_NH4NO3_L-to-H_P Parameter: Tissue Value: Leaf
  misc_feature: MA Experiment 20001757 PARAMETER Experiment Name: At_50mM_NH4NO3_L-to-H_P Parameter: Treatment Value: 50mM NH4NO3 vs 100mM Mannitol
  misc_feature: MA Experiment ID: 20001773 Result: Up-regulated in Transcription
  misc_feature: MA Experiment 20001773 PARAMETER Experiment Name: At_Far-red-enriched-adult_P Parameter: Age (day) Value: 30
  misc_feature: MA Experiment 20001773 PARAMETER Experiment Name: At_Far-red-enriched-adult_P Parameter: Light Value: Far-red enriched vs. White
  misc_feature: MA Experiment 20001773 PARAMETER Experiment Name: At_Far-red-enriched-adult_P Parameter: Organism Value: A. thaliana
  misc_feature: MA Experiment 20001773 PARAMETER Experiment Name: At_Far-red-enriched-adult_P Parameter: Plant Line Value: Columbia
  misc_feature: MA Experiment 20001773 PARAMETER Experiment Name: At_Far-red-enriched-adult_P Parameter: Timepoint (hr) Value: 48
  misc_feature: MA Experiment 20001773 PARAMETER Experiment Name: At_Far-red-enriched-adult_P Parameter: Tissue Value: Aerial
  misc_feature: MA Experiment ID: 20001905 Result: Down-regulated in Transcription
  misc_feature: MA Experiment 20001905 PARAMETER Experiment Name: At_Drought_Reproduction_P Parameter: Age (day) Value: 40
  misc_feature: MA Experiment 20001905 PARAMETER Experiment Name: At_Drought_Reproduction_P Parameter: Organism Value: A. thaliana
  misc_feature: MA Experiment 20001905 PARAMETER Experiment Name: At_Drought_Reproduction_P Parameter: Plant Line Value: WS
  misc_feature: MA Experiment 20001905 PARAMETER Experiment Name: At_Drought_Reproduction_P Parameter: Timepoint (day) Value: 10
  misc_feature: MA Experiment 20001905 PARAMETER Experiment Name: At_Drought_Reproduction_P Parameter: Tissue Value: Rosettes
  misc_feature: MA Experiment 20001905 PARAMETER Experiment Name: At_Drought_Reproduction_P Parameter: Treatment Value: Drought vs. No Drought
agttacatctacttgtctacttgtcgtttcttgtatagttggagtttatagtttgtcttaacgtacaagataatttgaaaggtagacgtagacgttggatacttctttggtaggctcttaagaatcttaggtgtatctctttagtttgaaggttagattcagaatctctgtagattcattagtagctttttctgtgtgatctttgtgttgtatatatatagatcgaattgattttagctggtgaaaggtgaagttgtggtatgaatatgaagaaacagattatggatgagtctgtaaagtcattgatgctgcctcctcctccaccgcttcttcctccatctcagggatatggatcaagaaagatcgatggagacagcataaccaataaacagatcaagaagttctggagacagaagcagatcattgaagaggatcatctctattctgctattaaggctgcagctcgtgtcagagctcgtaatctctctgatgaggactacaaacgctttgaagaaagcttggacatggaggacctggaaaccgaagatcatcagggattgaaagactggtggacaaagagcaaatacgcgtacttgaaccagccggctcttggatctgcagattcactgaagagaaagaggttttcgacttatacaccaaactgtttctcgttcaagccttgcaatcctctctacgcaacttcgctcaatgtcttttgaaccatgagcagcaaactctgcaagatcaatcgtcttgcatatatgtatatatttgttcgtgtgtgtctctgtacatgtcatgtgttattgcttctatattaatggatctggactttggtgtggttgttgatttgtaactgttgaataaaatctttctatgg

SEQ ID NO: 25888 - protein, 152 aa, Arabidopsis thaliana
  peptide (1)..(152): Ceres Seq. ID no. 12323736
  misc_feature (94)..(138): Homolog of NCBI NO: 38345846 NR Description: OSJNBa0084K11.10 [Oryza sativa (japonica
  misc_feature (39)..(93): Homolog of NCBI NO: 38345846 NR Description: OSJNBa0084K11.10 [Oryza sativa (japonica
  misc_feature (8)..(152): Homolog of NCBI NO: 25371275 NR Description: hypothetical protein At2g17710 [imported] -
  misc_feature (3)..(152): Homolog of NCBI NO: 21618216 NR Description: unknown [Arabidopsis thaliana]
  misc_feature (1)..(152): Homolog of NCBI NO: 18398508 NR Description: expressed protein
MNMKKQIMDESVKSLMLPPPPPLLPPSQGYGSRKIDGDSITNKQIKKFWRQKQIIEEDHLYSAIKAAARVRARNLSDEDYKRFEESLDMEDLETEDHQGLKDWWTKSKYAYLNQPALGSADSLKRKRFSTYTPNCFSFKPCNPLYATSLNVF

SEQ ID NO: 25889 - protein, 150 aa, Arabidopsis thaliana
  peptide (1)..(150): Ceres Seq. ID no. 12323737
  misc_feature (92)..(136): Homolog of NCBI NO: 38345846 NR Description: OSJNBa0084K11.10 [Oryza sativa (japonica
  misc_feature (37)..(91): Homolog of NCBI NO: 38345846 NR Description: OSJNBa0084K11.10 [Oryza sativa (japonica
  misc_feature (6)..(150): Homolog of NCBI NO: 25371275 NR Description: hypothetical protein At2g17710 [imported] -
  misc_feature (1)..(150): Homolog of NCBI NO: 21618216 NR Description: unknown [Arabidopsis thaliana]
  misc_feature (1)..(150): Homolog of NCBI NO: 18398508 NR Description: expressed protein
MKKQIMDESVKSLMLPPPPPLLPPSQGYGSRKIDGDSITNKQIKKFWRQKQIIEEDHLYSAIKAAARVRARNLSDEDYKRFEESLDMEDLETEDHQGLKDWWTKSKYAYLNQPALGSADSLKRKRFSTYTPNCFSFKPCNPLYATSLNVF

SEQ ID NO: 25890 - protein, 145 aa, Arabidopsis thaliana
  peptide (1)..(145): Ceres Seq. ID no. 12323738
  misc_feature (87)..(131): Homolog of NCBI NO: 38345846 NR Description: OSJNBa0084K11.10 [Oryza sativa (japonica
  misc_feature (32)..(86): Homolog of NCBI NO: 38345846 NR Description: OSJNBa0084K11.10 [Oryza sativa (japonica
  misc_feature (1)..(145): Homolog of NCBI NO: 25371275 NR Description: hypothetical protein At2g17710 [imported] -
  misc_feature (1)..(145): Homolog of NCBI NO: 21618216 NR Description: unknown [Arabidopsis thaliana]
  misc_feature (1)..(145): Homolog of NCBI NO: 18398508 NR Description: expressed protein
MDESVKSLMLPPPPPLLPPSQGYGSRKIDGDSITNKQIKKFWRQKQIIEEDHLYSAIKAAARVRARNLSDEDYKRFEESLDMEDLETEDHQGLKDWWTKSKYAYLNQPALGSADSLKRKRFSTYTPNCFSFKPCNPLYATSLNVF

SEQ ID NO: 25891 - DNA, 949 bp, Arabidopsis thaliana
  misc_feature (1)..(949): Ceres Seq. ID no. 13487367
  misc_feature: MA Experiment ID: 108462 Result: Down-regulated in Transcription
  misc_feature: MA Experiment 108462 PARAMETER Experiment Name: At_Germinating_Seeds_cDNA_P Parameter: Age (day) Value: 2 vs. 0
  misc_feature: MA Experiment 108462 PARAMETER Experiment Name: At_Germinating_Seeds_cDNA_P Parameter: Tissue Value: Germinating Seeds
  misc_feature: MA Experiment ID: 108463 Result: Down-regulated in Transcription
  misc_feature: MA Experiment 108463 PARAMETER Experiment Name: At_Germinating_Seeds_cDNA_P Parameter: Age (day) Value: 3 vs. 0
  misc_feature: MA Experiment 108463 PARAMETER Experiment Name: At_Germinating_Seeds_cDNA_P Parameter: Tissue Value: Germinating Seeds
  misc_feature: MA Experiment ID: 108464 Result: Down-regulated in Transcription
  misc_feature: MA Experiment 108464 PARAMETER Experiment Name: At_Germinating_Seeds_cDNA_P Parameter: Age (day) Value: 4 vs. 0
  misc_feature: MA Experiment 108464 PARAMETER Experiment Name: At_Germinating_Seeds_cDNA_P Parameter: Tissue Value: Germinating Seeds
  misc_feature: MA Experiment ID: 108573 Result: Down-regulated in Transcription
  misc_feature: MA Experiment 108573 PARAMETER Experiment Name: At_Drought_cDNA_P Parameter: Timepoint (hr) Value: 6
  misc_feature: MA Experiment 108573 PARAMETER Experiment Name: At_Drought_cDNA_P Parameter: Tissue Value: Aerial
  misc_feature: MA Experiment 108573 PARAMETER Experiment Name: At_Drought_cDNA_P Parameter: Treatment Value: Drought vs. No Drought
  misc_feature: MA Experiment ID: 20000224 Result: Up-regulated in Transcription
  misc_feature: MA Experiment ID: 20000227 Result: Up-regulated in Transcription
  misc_feature: MA Experiment 20000227 PARAMETER Experiment Name: At_Root-Tips-vs-Tops_P Parameter: Tissue Value: Root Tips vs. Root Tops
  misc_feature: MA Experiment ID: 20000234 Result: Up-regulated in Transcription
  misc_feature: MA Experiment 20000234 PARAMETER Experiment Name: At_Siliques_P Parameter: Age (day) Value: 21
  misc_feature: MA Experiment 20000234 PARAMETER Experiment Name: At_Siliques_P Parameter: Organism Value: A. thaliana
  misc_feature: MA Experiment 20000234 PARAMETER Experiment Name: At_Siliques_P Parameter: Plant Line Value: WS
  misc_feature: MA Experiment 20000234 PARAMETER Experiment Name: At_Siliques_P Parameter: Tissue Value: Less Than 5mm Siliques vs. Whole Plant
  misc_feature: MA Experiment ID: 20001560 Result: Up-regulated in Transcription
  misc_feature: MA Experiment 20001560 PARAMETER Experiment Name: At_Drought_Soil_Dry_P Parameter: Age (day) Value: 28
  misc_feature: MA Experiment 20001560 PARAMETER Experiment Name: At_Drought_Soil_Dry_P Parameter: Organism Value: A. thaliana
  misc_feature: MA Experiment 20001560 PARAMETER Experiment Name: At_Drought_Soil_Dry_P Parameter: Plant Line Value: WS
  misc_feature: MA Experiment 20001560 PARAMETER Experiment Name: At_Drought_Soil_Dry_P Parameter: Post Timepoint (hr) Value: None
  misc_feature: MA Experiment 20001560 PARAMETER Experiment Name: At_Drought_Soil_Dry_P Parameter: Post-Treatment Value: None
  misc_feature: MA Experiment 20001560 PARAMETER Experiment Name: At_Drought_Soil_Dry_P Parameter: Timepoint (day) Value: 14
  misc_feature: MA Experiment 20001560 PARAMETER Experiment Name: At_Drought_Soil_Dry_P Parameter: Treatment Value: Drought vs. No Drought
aggggtgactctcgaacacgatgctctgaagactgaaaaaggcgtaaacttttttcacctggctagggttcttggtcgtcgttaactggcatctagtatggctttctgcactaaacttggcggtcactggaaacaaggggtaaatgttccagtgtcatcaatgctcggttctcttcgctacatgtccacaaaactttatattggtggcctgtcccctggaactgacgagcactccttgaaggacgctttctctagcttcaatggagtgacagaggcaagagtcatgacaaacaaagtgaccgggaggtctagaggttatggatttgttaacttcataagcgaggattctgccaactctgctatttcagcaatgaatggacaggagctgaatgggtttaacataagtgtgaacgttgcaaaagattggccaagtttgccattgtctttggatgagagtatagaagaagctgagaagaaagaaaataagatgatgagccgatctgtatggaaagatccattcgttgatgcgttcctgatgaagaagaagaatgcagctctgaacaggaaaatatggtcaaggagatcgacgattcttcccgagtatgttgattcggcggtgagaatctacaacggcaaaactcatgtgcgttgtaagatcacagaggggaaagttgggcataaattcggagagtttgcgtttacaagaaaagtgaagaagcatgctaaagcaaagtagcatctttgagaatgaattggtcagctgcttgaaaggattgtgttgaaaagccaaaaacgaatcaaatcaataaattctcaataggtaaaactcattagctcacatgatcatgtagacgaatattgagctttagaaagtctttagttttcttgtcgatttcgtatttttggaccacaaaagtgccaatgttattttggaattcgattaacaaat

SEQ ID NO: 25892 - protein, 212 aa, Arabidopsis thaliana
  peptide (1)..(212): Ceres Seq. ID no. 13487368
  misc_feature (134)..(208): Pfam Name: Ribosomal protein S19 Pfam Description: Ribosomal protein S19
  misc_feature (16)..(114): Homolog of NCBI NO: 322514 NR Description: glycine-rich RNA-binding protein (clone A81) -
  misc_feature (1)..(114): Homolog of NCBI NO: 7439994 NR Description: glycine-rich RNA-binding protein - garden pea
  misc_feature (1)..(114): Homolog of NCBI NO: 30682622 NR Description: glycine-rich RNA-binding protein (AtGRP2)
  misc_feature (1)..(114): Homolog of NCBI NO: 15236359 NR Description: glycine-rich RNA-binding protein (AtGRP2)
  misc_feature (1)..(114): Homolog of NCBI NO: 2826811 NR Description: AtGRP2 [Arabidopsis thaliana]
  misc_feature (1)..(116): Homolog of NCBI NO: 21553972 NR Description: glycine-rich RNA binding protein, putative
  misc_feature (1)..(116): Homolog of NCBI NO: 15229525 NR Description: RNA-binding protein, putative [Arabidopsis
  misc_feature (1)..(212): Homolog of NCBI NO: 2129722 NR Description: ribosomal protein S19 precursor, mitochondrial -
  misc_feature (1)..(212): Homolog of NCBI NO: 18422781 NR Description: 40S ribosomal protein S19, mitochondrial
  misc_feature (1)..(212): Homolog of NCBI NO: 8809615 NR Description: 40S ribosomal protein S19 [Arabidopsis thaliana]
MAFCTKLGGHWKQGVNVPVSSMLGSLRYMSTKLYIGGLSPGTDEHSLKDAFSSFNGVTEARVMTNKVTGRSRGYGFVNFISEDSANSAISAMNGQELNGFNISVNVAKDWPSLPLSLDESIEEAEKKENKMMSRSVWKDPFVDAFLMKKKNAALNRKIWSRRSTILPEYVDSAVRIYNGKTHVRCKITEGKVGHKFGEFAFTRKVKKHAKAK

SEQ ID NO: 25893 - protein, 191 aa, Arabidopsis thaliana
  peptide (1)..(191): Ceres Seq. ID no. 13487369
  misc_feature (113)..(187): Pfam Name: Ribosomal protein S19 Pfam Description: Ribosomal protein S19
  misc_feature (1)..(93): Homolog of NCBI NO: 322514 NR Description: glycine-rich RNA-binding protein (clone A81) -
  misc_feature (1)..(93): Homolog of NCBI NO: 7439994 NR Description: glycine-rich RNA-binding protein - garden pea
  misc_feature (1)..(93): Homolog of NCBI NO: 15236359 NR Description: glycine-rich RNA-binding protein (AtGRP2)
  misc_feature (1)..(93): Homolog of NCBI NO: 30682622 NR Description: glycine-rich RNA-binding protein (AtGRP2)
  misc_feature (1)..(93): Homolog of NCBI NO: 2826811 NR Description: AtGRP2 [Arabidopsis thaliana]
  misc_feature (1)..(95): Homolog of NCBI NO: 21553972 NR Description: glycine-rich RNA binding protein, putative
  misc_feature (1)..(95): Homolog of NCBI NO: 15229525 NR Description: RNA-binding protein, putative [Arabidopsis
  misc_feature (1)..(191): Homolog of NCBI NO: 2129722 NR Description: ribosomal protein S19 precursor, mitochondrial -
  misc_feature (1)..(191): Homolog of NCBI NO: 18422781 NR Description: 40S ribosomal protein S19, mitochondrial
  misc_feature (1)..(191): Homolog of NCBI NO: 8809615 NR Description: 40S ribosomal protein S19 [Arabidopsis thaliana]
MLGSLRYMSTKLYIGGLSPGTDEHSLKDAFSSFNGVTEARVMTNKVTGRSRGYGFVNFISEDSANSAISAMNGQELNGFNISVNVAKDWPSLPLSLDESIEEAEKKENKMMSRSVWKDPFVDAFLMKKKNAALNRKIWSRRSTILPEYVDSAVRIYNGKTHVRCKITEGKVGHKFGEFAFTRKVKKHAKAK

SEQ ID NO: 25894 - protein, 184 aa, Arabidopsis thaliana
  peptide (1)..(184): Ceres Seq. ID no. 13487370
  misc_feature (106)..(180): Pfam Name: Ribosomal protein S19 Pfam Description: Ribosomal protein S19
  misc_feature (1)..(86): Homolog of NCBI NO: 322514 NR Description: glycine-rich RNA-binding protein (clone A81) -
  misc_feature (1)..(86): Homolog of NCBI NO: 7439994 NR Description: glycine-rich RNA-binding protein - garden pea
  misc_feature (1)..(86): Homolog of NCBI NO: 15236359 NR Description: glycine-rich RNA-binding protein (AtGRP2)
  misc_feature (1)..(86): Homolog of NCBI NO: 30682622 NR Description: glycine-rich RNA-binding protein (AtGRP2)
  misc_feature (1)..(86): Homolog of NCBI NO: 2826811 NR Description: AtGRP2 [Arabidopsis thaliana]
  misc_feature (1)..(88): Homolog of NCBI NO: 21553972 NR Description: glycine-rich RNA binding protein, putative
  misc_feature (1)..(88): Homolog of NCBI NO: 15229525 NR Description: RNA-binding protein, putative [Arabidopsis
  misc_feature (1)..(184): Homolog of NCBI NO: 2129722 NR Description: ribosomal protein S19 precursor, mitochondrial -
  misc_feature (1)..(184): Homolog of NCBI NO: 18422781 NR Description: 40S ribosomal protein S19, mitochondrial
  misc_feature (1)..(184): Homolog of NCBI NO: 8809615 NR Description: 40S ribosomal protein S19 [Arabidopsis thaliana]
MSTKLYIGGLSPGTDEHSLKDAFSSFNGVTEARVMTNKVTGRSRGYGFVNFISEDSANSAISAMNGQELNGFNISVNVAKDWPSLPLSLDESIEEAEKKENKMMSRSVWKDPFVDAFLMKKKNAALNRKIWSRRSTILPEYVDSAVRIYNGKTHVRCKITEGKVGHKFGEFAFTRKVKKHAKAK

SEQ ID NO: 25895 - DNA, 1584 bp, Arabidopsis thaliana
  misc_feature (1)..(1584): Ceres Seq. ID no. 13492397
  misc_feature: MA Experiment ID: 108433 Result: Down-regulated in Transcription
  misc_feature: MA Experiment 108433 PARAMETER Experiment Name: At_rhl_Mutant2_cDNA_P Parameter: Age (day) Value: 7
  misc_feature: MA Experiment 108433 PARAMETER Experiment Name: At_rhl_Mutant2_cDNA_P Parameter: Organism Value: A. thaliana
  misc_feature: MA Experiment 108433 PARAMETER Experiment Name: At_rhl_Mutant2_cDNA_P Parameter: Plant Line Value: rhl Mutant vs. wt landsburg
  misc_feature: MA Experiment 108433 PARAMETER Experiment Name: At_rhl_Mutant2_cDNA_P Parameter: Tissue Value: Roots
  misc_feature: MA Experiment ID: 108434 Result: Down-regulated in Transcription
  misc_feature: MA Experiment 108434 PARAMETER Experiment Name: At_Root_Tips_cDNA_P Parameter: Tissue Value: Root Tips
  misc_feature: MA Experiment ID: 108435 Result: Up-regulated in Transcription
  misc_feature: MA Experiment 108435 PARAMETER Experiment Name: At_stm_Mutants_cDNA_P Parameter: Plant Line Value: wt Landsburg vs stm
  misc_feature: MA Experiment 108435 PARAMETER Experiment Name: At_stm_Mutants_cDNA_P Parameter: Tissue Value: Shoot Apical Meristem Region
  misc_feature: MA Experiment ID: 108461 Result: Up-regulated in Transcription
  misc_feature: MA Experiment 108461 PARAMETER Experiment Name: At_Germinating_Seeds_cDNA_P Parameter: Age (day) Value: 1 vs. 0
  misc_feature: MA Experiment 108461 PARAMETER Experiment Name: At_Germinating_Seeds_cDNA_P Parameter: Tissue Value: Germinating Seeds
  misc_feature: MA Experiment ID: 108462 Result: Up-regulated in Transcription
  misc_feature: MA Experiment 108462 PARAMETER Experiment Name: At_Germinating_Seeds_cDNA_P Parameter: Age (day) Value: 2 vs. 0
  misc_feature: MA Experiment 108462 PARAMETER Experiment Name: At_Germinating_Seeds_cDNA_P Parameter: Tissue Value: Germinating Seeds
  misc_feature: MA Experiment ID: 108463 Result: Up-regulated in Transcription
  misc_feature: MA Experiment 108463 PARAMETER Experiment Name: At_Germinating_Seeds_cDNA_P Parameter: Age (day) Value: 3 vs. 0
  misc_feature: MA Experiment 108463 PARAMETER Experiment Name: At_Germinating_Seeds_cDNA_P Parameter: Tissue Value: Germinating Seeds
  misc_feature: MA Experiment ID: 108464 Result: Up-regulated in Transcription
  misc_feature: MA Experiment 108464 PARAMETER Experiment Name: At_Germinating_Seeds_cDNA_P Parameter: Age (day) Value: 4 vs. 0
  misc_feature: MA Experiment 108464 PARAMETER Experiment Name: At_Germinating_Seeds_cDNA_P Parameter: Tissue Value: Germinating Seeds
  misc_feature: MA Experiment ID: 108473 Result: Down-regulated in Transcription
  misc_feature: MA Experiment 108473 PARAMETER Experiment Name: At_Drought_Flowers_cDNA_P Parameter: Timepoint (hr) Value: 7 d
  misc_feature: MA Experiment 108473 PARAMETER Experiment Name: At_Drought_Flowers_cDNA_P Parameter: Tissue Value: Flower
  misc_feature: MA Experiment 108473 PARAMETER Experiment Name: At_Drought_Flowers_cDNA_P Parameter: Treatment Value: Drought vs. No Drought
  misc_feature: MA Experiment ID: 108501 Result: Up-regulated in Transcription
  misc_feature: MA Experiment 108501 PARAMETER Experiment Name: At_ap2_floral_buds_cDNA_P Parameter: Plant Line Value: ap2 (Ler.)
  misc_feature: MA Experiment 108501 PARAMETER Experiment Name: At_ap2_floral_buds_cDNA_P Parameter: Tissue Value: Closed Flower
  misc_feature: MA Experiment ID: 108561 Result: Down-regulated in Transcription
  misc_feature: MA Experiment 108561 PARAMETER Experiment Name: At_100uM_ABA_cDNA_P Parameter: Timepoint (hr) Value: 6
  misc_feature: MA Experiment 108561 PARAMETER Experiment Name: At_100uM_ABA_cDNA_P Parameter: Tissue Value: Aerial
  misc_feature: MA Experiment 108561 PARAMETER Experiment Name: At_100uM_ABA_cDNA_P Parameter: Treatment Value: 100uM ABA vs. No Treatment
  misc_feature: MA Experiment ID: 108573 Result: Down-regulated in Transcription
  misc_feature: MA Experiment 108573 PARAMETER Experiment Name: At_Drought_cDNA_P Parameter: Timepoint (hr) Value: 6
  misc_feature: MA Experiment 108573 PARAMETER Experiment Name: At_Drought_cDNA_P Parameter: Tissue Value: Aerial
  misc_feature: MA Experiment 108573 PARAMETER Experiment Name: At_Drought_cDNA_P Parameter: Treatment Value: Drought vs. No Drought
  misc_feature: MA Experiment ID: 108574 Result: Up-regulated in Transcription
  misc_feature: MA Experiment 108574 PARAMETER Experiment Name: At_Wounding__cDNA_P Parameter: Timepoint (hr) Value: 1
  misc_feature: MA Experiment 108574 PARAMETER Experiment Name: At_Wounding__cDNA_P Parameter: Tissue Value: Aerial
  misc_feature: MA Experiment 108574 PARAMETER Experiment Name: At_Wounding__cDNA_P Parameter: Treatment Value: Wounding vs. No Wounding
  misc_feature: MA Experiment ID: 108576 Result: Down-regulated in Transcription
  misc_feature: MA Experiment 108576 PARAMETER Experiment Name: At_42deg_Heat_cDNA_P Parameter: Temperature (deg C) Value: 42 vs. 22
  misc_feature: MA Experiment 108576 PARAMETER Experiment Name: At_42deg_Heat_cDNA_P Parameter: Timepoint (hr) Value: 1
  misc_feature: MA Experiment 108576 PARAMETER Experiment Name: At_42deg_Heat_cDNA_P Parameter: Tissue Value: Aerial
  misc_feature: MA Experiment ID: 108577 Result: Down-regulated in Transcription
  misc_feature: MA Experiment 108577 PARAMETER Experiment Name: At_42deg_Heat_cDNA_P Parameter: Temperature (deg C) Value: 42 vs. 22
  misc_feature: MA Experiment 108577 PARAMETER Experiment Name: At_42deg_Heat_cDNA_P Parameter: Timepoint (hr) Value: 6
  misc_feature: MA Experiment 108577 PARAMETER Experiment Name: At_42deg_Heat_cDNA_P Parameter: Tissue Value: Aerial
  misc_feature: MA Experiment ID: 108579 Result: Up-regulated in Transcription
  misc_feature: MA Experiment 108579 PARAMETER Experiment Name: At_4deg_Cold_cDNA_P Parameter: Temperature (deg C) Value: 4 vs. 22
  misc_feature: MA Experiment 108579 PARAMETER Experiment Name: At_4deg_Cold_cDNA_P Parameter: Timepoint (hr) Value: 6
  misc_feature: MA Experiment 108579 PARAMETER Experiment Name: At_4deg_Cold_cDNA_P Parameter: Tissue Value: Aerial
  misc_feature: MA Experiment ID: 20000069 Result: Down-regulated in Transcription
  misc_feature: MA Experiment 20000069 PARAMETER Experiment Name: At_100uM_ABA_Mutants_cDNA_P Parameter: Plant Line Value: CS23
  misc_feature: MA Experiment 20000069 PARAMETER Experiment Name: At_100uM_ABA_Mutants_cDNA_P Parameter: Timepoint (hr) Value: 6
  misc_feature: MA Experiment 20000069 PARAMETER Experiment Name: At_100uM_ABA_Mutants_cDNA_P Parameter: Tissue Value: Aerial
  misc_feature: MA Experiment 20000069 PARAMETER Experiment Name: At_100uM_ABA_Mutants_cDNA_P Parameter: Treatment Value: 100uM ABA vs. No Treatment
  misc_feature: MA Experiment ID: 20000070 Result: Down-regulated in Transcription
  misc_feature: MA Experiment 20000070 PARAMETER Experiment Name: At_100uM_ABA_Mutants_cDNA_P Parameter: Plant Line Value: CS24
  misc_feature: MA Experiment 20000070 PARAMETER Experiment Name: At_100uM_ABA_Mutants_cDNA_P Parameter: Timepoint (hr) Value: 6
  misc_feature: MA Experiment 20000070 PARAMETER Experiment Name: At_100uM_ABA_Mutants_cDNA_P Parameter: Tissue Value: Aerial
  misc_feature: MA Experiment 20000070 PARAMETER Experiment Name: At_100uM_ABA_Mutants_cDNA_P Parameter: Treatment Value: 100uM ABA vs. No Treatment
  misc_feature: MA Experiment ID: 20000071 Result: Down-regulated in Transcription
  misc_feature: MA Experiment 20000071 PARAMETER Experiment Name: At_100uM_ABA_Mutants_cDNA_P Parameter: Plant Line Value: CS8104
  misc_feature: MA Experiment 20000071 PARAMETER Experiment Name: At_100uM_ABA_Mutants_cDNA_P Parameter: Timepoint (hr) Value: 6
  misc_feature: MA Experiment 20000071 PARAMETER Experiment Name: At_100uM_ABA_Mutants_cDNA_P Parameter: Tissue Value: Aerial
  misc_feature: MA Experiment 20000071 PARAMETER Experiment Name: At_100uM_ABA_Mutants_cDNA_P Parameter: Treatment Value: 100uM ABA vs. No Treatment
  misc_feature: MA Experiment ID: 20000088 Result: Down-regulated in Transcription
  misc_feature: MA Experiment 20000088 PARAMETER Experiment Name: At_100uM_ABA_Mutants_cDNA_P Parameter: Plant Line Value: Landsberg
  misc_feature: MA Experiment 20000088 PARAMETER Experiment Name: At_100uM_ABA_Mutants_cDNA_P Parameter: Timepoint (hr) Value: 6
  misc_feature: MA Experiment 20000088 PARAMETER Experiment Name: At_100uM_ABA_Mutants_cDNA_P Parameter: Tissue Value: Aerial
  misc_feature: MA Experiment 20000088 PARAMETER Experiment Name: At_100uM_ABA_Mutants_cDNA_P Parameter: Treatment Value: 100uM ABA vs. No Treatment
  misc_feature: MA Experiment ID: 20000090 Result: Down-regulated in Transcription
  misc_feature: MA Experiment ID: 20000117 Result: Down-regulated in Transcription
  misc_feature: MA Experiment 20000117 PARAMETER Experiment Name: At_100uM_ABA_Mutants_cDNA_P Parameter: Plant Line Value: Columbia
  misc_feature: MA Experiment 20000117 PARAMETER Experiment Name: At_100uM_ABA_Mutants_cDNA_P Parameter: Timepoint (hr) Value: 6
  misc_feature: MA Experiment 20000117 PARAMETER Experiment Name: At_100uM_ABA_Mutants_cDNA_P Parameter: Tissue Value: Aerial
  misc_feature: MA Experiment 20000117 PARAMETER Experiment Name: At_100uM_ABA_Mutants_cDNA_P Parameter: Treatment Value: 100uM ABA vs. No Treatment
  misc_feature: MA Experiment ID: 20000173 Result: Down-regulated in Transcription
  misc_feature: MA Experiment 20000173 PARAMETER Experiment Name: At_42deg_Heat_P Parameter: Age (day) Value: 14
  misc_feature: MA Experiment 20000173 PARAMETER Experiment Name: At_42deg_Heat_P Parameter: Organism Value: A. thaliana
  misc_feature: MA Experiment 20000173 PARAMETER Experiment Name: At_42deg_Heat_P Parameter: Plant Line Value: WS
  misc_feature: MA Experiment 20000173 PARAMETER Experiment Name: At_42deg_Heat_P Parameter: Temperature (deg C) Value: 42 vs. 22
  misc_feature: MA Experiment 20000173 PARAMETER Experiment Name: At_42deg_Heat_P Parameter: Timepoint (hr) Value: 6
  misc_feature: MA Experiment 20000173 PARAMETER Experiment Name: At_42deg_Heat_P Parameter: Tissue Value: Aerial
  misc_feature: MA Experiment ID: 20000179 Result: Up-regulated in Transcription
  misc_feature: MA Experiment 20000179 PARAMETER Experiment Name: At_Germinating_Seeds_P Parameter: Age (hr) Value: 6 vs. 0
  misc_feature: MA Experiment 20000179 PARAMETER Experiment Name: At_Germinating_Seeds_P Parameter: Tissue Value: Germinating Seeds
  misc_feature: MA Experiment ID: 20000180 Result: Up-regulated in Transcription
  misc_feature: MA Experiment 20000180 PARAMETER Experiment Name: At_Germinating_Seeds_P Parameter: Age (hr) Value: 24 vs. 0
  misc_feature: MA Experiment 20000180 PARAMETER Experiment Name: At_Germinating_Seeds_P Parameter: Tissue Value: Germinating Seeds
  misc_feature: MA Experiment ID: 20000184 Result: Up-regulated in Transcription
  misc_feature: MA Experiment 20000184 PARAMETER Experiment Name: At_Shoots__P Parameter: Age (day) Value: 7
  misc_feature: MA Experiment 20000184 PARAMETER Experiment Name: At_Shoots__P Parameter: Tissue Value: Shoots vs. Whole Plant
  misc_feature: MA Experiment ID: 20000185 Result: Up-regulated in Transcription
  misc_feature: MA Experiment 20000185 PARAMETER Experiment Name: At_Roots__P Parameter: Age (day) Value: 7 vs. 21
  misc_feature: MA Experiment 20000185 PARAMETER Experiment Name: At_Roots__P Parameter: Organism Value: A. thaliana
  misc_feature: MA Experiment 20000185 PARAMETER Experiment Name: At_Roots__P Parameter: Tissue Value: Roots vs. Whole Plant
  misc_feature: MA Experiment ID: 20000211 Result: Up-regulated in Transcription
  misc_feature: MA Experiment 20000211 PARAMETER Experiment Name: At_0.001percent_MeJA__P Parameter: Age (day) Value: 14
  misc_feature: MA Experiment 20000211 PARAMETER Experiment Name: At_0.001percent_MeJA__P Parameter: Organism Value: A. thaliana
  misc_feature: MA Experiment 20000211 PARAMETER Experiment Name: At_0.001percent_MeJA__P Parameter: Plant Line Value: WS
  misc_feature: MA Experiment 20000211 PARAMETER Experiment Name: At_0.001percent_MeJA__P Parameter: Timepoint (hr) Value: 1
  misc_feature: MA Experiment 20000211 PARAMETER Experiment Name: At_0.001percent_MeJA__P Parameter: Tissue Value: Aerial
  misc_feature: MA Experiment 20000211 PARAMETER Experiment Name: At_0.001percent_MeJA__P Parameter: Treatment Value: 0.001percent MeJA vs. No Treatment
  misc_feature: MA Experiment ID: 20000224 Result: Up-regulated in Transcription
  misc_feature: MA Experiment ID: 20000234 Result: Up-regulated in Transcription
  misc_feature: MA Experiment 20000234 PARAMETER Experiment Name: At_Siliques_P Parameter: Age (day) Value: 21
  misc_feature: MA Experiment 20000234 PARAMETER Experiment Name: At_Siliques_P Parameter: Organism Value: A. thaliana
  misc_feature: MA Experiment 20000234 PARAMETER Experiment Name: At_Siliques_P Parameter: Plant Line Value: WS
  misc_feature: MA Experiment 20000234 PARAMETER Experiment Name: At_Siliques_P Parameter: Tissue Value: Less Than 5mm Siliques vs. Whole Plant
  misc_feature: MA Experiment ID: 20000264 Result: Up-regulated in Transcription
  misc_feature: MA Experiment 20000264 PARAMETER Experiment Name: At_Open_Flower_P Parameter: Age (day) Value: 21
  misc_feature: MA Experiment 20000264 PARAMETER Experiment Name: At_Open_Flower_P Parameter: Plant Line Value: WS
  misc_feature: MA Experiment 20000264 PARAMETER Experiment Name: At_Open_Flower_P Parameter: Tissue Value: Open Flower vs. Whole Plant
  misc_feature: MA Experiment ID: 20000265 Result: Up-regulated in Transcription
  misc_feature: MA Experiment 20000265 PARAMETER Experiment Name: At_Open_Flower_P Parameter: Age (day) Value: 21
  misc_feature: MA Experiment 20000265 PARAMETER Experiment Name: At_Open_Flower_P Parameter: Plant Line Value: WS
  misc_feature: MA Experiment 20000265 PARAMETER Experiment Name: At_Open_Flower_P Parameter: Tissue Value: Closed Flower vs. Whole Plant
  misc_feature: MA Experiment ID: 20000286 Result: Up-regulated in Transcription
  misc_feature: MA Experiment 20000286 PARAMETER Experiment Name: At_Open_Flower_P Parameter: Age (day) Value: 21
  misc_feature: MA Experiment 20000286 PARAMETER Experiment Name: At_Open_Flower_P Parameter: Plant Line Value: WS
  misc_feature: MA Experiment 20000286 PARAMETER Experiment Name: At_Open_Flower_P Parameter: Tissue Value: Half Open vs. Whole Plant
  misc_feature: MA Experiment ID: 20000437 Result: Down-regulated in Transcription
  misc_feature: MA Experiment 20000437 PARAMETER Experiment Name: At_Drought_P Parameter: Age (day) Value: 8
  misc_feature: MA Experiment 20000437 PARAMETER Experiment Name: At_Drought_P Parameter: Organism Value: A. thaliana
  misc_feature: MA Experiment 20000437 PARAMETER Experiment Name: At_Drought_P Parameter: Plant Line Value: WS
  misc_feature: MA Experiment 20000437 PARAMETER Experiment Name: At_Drought_P Parameter: Timepoint (hr) Value: 24
  misc_feature: MA Experiment 20000437 PARAMETER Experiment Name: At_Drought_P Parameter: Tissue Value: Whole Plant
  misc_feature: MA Experiment 20000437 PARAMETER Experiment Name: At_Drought_P Parameter: Treatment Value: Drought vs. No Drought
  misc_feature: MA Experiment ID: 20000439 Result: Up-regulated in Transcription
  misc_feature: MA Experiment 20000439 PARAMETER Experiment Name: At_Roots__P Parameter: Age (day) Value: 14 vs. 21
  misc_feature: MA Experiment 20000439 PARAMETER Experiment Name: At_Roots__P Parameter: Organism Value: A. thaliana
  misc_feature: MA Experiment 20000439 PARAMETER Experiment Name: At_Roots__P Parameter: Tissue Value: Roots vs. Whole Plant
  misc_feature: MA Experiment ID: 20000573 Result: Down-regulated in Transcription
  misc_feature: MA Experiment 20000573 PARAMETER Experiment Name: At_100uM_ABA_Mutants__P Parameter: Organism Value: A. thaliana
  misc_feature: MA Experiment 20000573 PARAMETER Experiment Name: At_100uM_ABA_Mutants__P Parameter: Plant Line Value: CS22 vs. Ler wt
  misc_feature: MA Experiment 20000573 PARAMETER Experiment Name: At_100uM_ABA_Mutants__P Parameter: Timepoint (hr) Value: N/A
  misc_feature: MA Experiment 20000573 PARAMETER Experiment Name: At_100uM_ABA_Mutants__P Parameter: Tissue Value: Whole Plant
  misc_feature: MA Experiment 20000573 PARAMETER Experiment Name: At_100uM_ABA_Mutants__P Parameter: Treatment Value: None
  misc_feature: MA Experiment ID: 20000574 Result: Down-regulated in Transcription
  misc_feature: MA Experiment 20000574 PARAMETER Experiment Name: At_100uM_ABA_Mutants__P Parameter: Organism Value: A. thaliana
  misc_feature: MA Experiment 20000574 PARAMETER Experiment Name: At_100uM_ABA_Mutants__P Parameter: Plant Line Value: CS23 vs. Ler wt
  misc_feature: MA Experiment 20000574 PARAMETER Experiment Name: At_100uM_ABA_Mutants__P Parameter: Timepoint (hr) Value: N/A
  misc_feature: MA Experiment 20000574 PARAMETER Experiment Name: At_100uM_ABA_Mutants__P Parameter: Tissue Value: Whole Plant
  misc_feature: MA Experiment 20000574 PARAMETER Experiment Name: At_100uM_ABA_Mutants__P Parameter: Treatment Value: None
  misc_feature: MA Experiment ID: 20001248 Result: Down-regulated in Transcription
  misc_feature: MA Experiment 20001248 PARAMETER Experiment Name: At_Far-red-induction_P Parameter: Age (day) Value: 7
  misc_feature: MA Experiment 20001248 PARAMETER Experiment Name: At_Far-red-induction_P Parameter: Light Value: Far-red vs. White
  misc_feature: MA Experiment 20001248 PARAMETER Experiment Name: At_Far-red-induction_P Parameter: Organism Value: A. thaliana
  misc_feature: MA Experiment 20001248 PARAMETER Experiment Name: At_Far-red-induction_P Parameter: Plant Line Value: Columbia
  misc_feature: MA Experiment 20001248 PARAMETER Experiment Name: At_Far-red-induction_P Parameter: Timepoint (hr) Value: 4
  misc_feature: MA Experiment 20001248 PARAMETER Experiment Name: At_Far-red-induction_P Parameter: Tissue Value: Whole Plant
  misc_feature: MA Experiment ID: 20001450 Result: Down-regulated in Transcription
  misc_feature: MA Experiment 20001450 PARAMETER Experiment Name: At_Far-red-induction_P Parameter: Age (day) Value: 7
  misc_feature: MA Experiment 20001450 PARAMETER Experiment Name: At_Far-red-induction_P Parameter: Light Value: Far-red vs. White
  misc_feature: MA Experiment 20001450 PARAMETER Experiment Name: At_Far-red-induction_P Parameter: Organism Value: A. thaliana
  misc_feature: MA Experiment 20001450 PARAMETER Experiment Name: At_Far-red-induction_P Parameter: Plant Line Value: Columbia
  misc_feature: MA Experiment 20001450 PARAMETER Experiment Name: At_Far-red-induction_P Parameter: Timepoint (hr) Value: 8
  misc_feature: MA Experiment 20001450 PARAMETER Experiment Name: At_Far-red-induction_P Parameter: Tissue Value: Whole Plant
  misc_feature: MA Experiment ID: 20001451 Result: Down-regulated in Transcription
  misc_feature: MA Experiment 20001451 PARAMETER Experiment Name: At_Far-red-induction_P Parameter: Age (day) Value: 7
  misc_feature: MA Experiment 20001451 PARAMETER Experiment Name: At_Far-red-induction_P Parameter: Light Value: Far-red vs. White
  misc_feature: MA Experiment 20001451 PARAMETER Experiment Name: At_Far-red-induction_P Parameter: Organism Value: A. thaliana
  misc_feature: MA Experiment 20001451 PARAMETER Experiment Name: At_Far-red-induction_P Parameter: Plant Line Value: Columbia
  misc_feature: MA Experiment 20001451 PARAMETER Experiment Name: At_Far-red-induction_P Parameter: Timepoint (hr) Value: 24
  misc_feature: MA Experiment 20001451 PARAMETER Experiment Name: At_Far-red-induction_P Parameter: Tissue Value: Whole Plant
  misc_feature: MA Experiment ID: 20001504 Result: Up-regulated in Transcription
  misc_feature: MA Experiment 20001504 PARAMETER Experiment Name: At_Far-red-enriched_P Parameter: Age (day) Value: 10
  misc_feature: MA Experiment 20001504 PARAMETER Experiment Name: At_Far-red-enriched_P Parameter: Light Value: Far-red enriched vs. White
  misc_feature: MA Experiment 20001504 PARAMETER Experiment Name: At_Far-red-enriched_P Parameter: Organism Value: A. thaliana
  misc_feature: MA Experiment 20001504 PARAMETER Experiment Name: At_Far-red-enriched_P Parameter: Plant Line Value: Columbia
  misc_feature: MA Experiment 20001504 PARAMETER Experiment Name: At_Far-red-enriched_P Parameter: Timepoint (day) Value: 6
  misc_feature: MA Experiment 20001504 PARAMETER Experiment Name: At_Far-red-enriched_P Parameter: Tissue Value: Whole Plant
  misc_feature: MA Experiment ID: 20001557 Result: Up-regulated in Transcription
  misc_feature: MA Experiment 20001557 PARAMETER Experiment Name: At_Drought_Soil_Dry_P Parameter: Age (day) Value: 27
  misc_feature: MA Experiment 20001557 PARAMETER Experiment Name: At_Drought_Soil_Dry_P Parameter: Organism Value: A. thaliana
  misc_feature: MA Experiment 20001557 PARAMETER Experiment Name: At_Drought_Soil_Dry_P Parameter: Plant Line Value: WS
  misc_feature: MA Experiment 20001557 PARAMETER Experiment Name: At_Drought_Soil_Dry_P Parameter: Post Timepoint (hr) Value: 3
  misc_feature: MA Experiment 20001557 PARAMETER Experiment Name: At_Drought_Soil_Dry_P Parameter: Post-Treatment Value: Re-Water vs. No Drought
  misc_feature: MA Experiment 20001557 PARAMETER Experiment Name: At_Drought_Soil_Dry_P Parameter: Timepoint (day) Value: 13
  misc_feature: MA Experiment 20001557 PARAMETER Experiment Name: At_Drought_Soil_Dry_P Parameter: Treatment Value: Drought vs. No Drought
  misc_feature: MA Experiment ID: 20001558 Result: Up-regulated in Transcription
  misc_feature: MA Experiment 20001558 PARAMETER Experiment Name: At_Drought_Soil_Dry_P Parameter: Age (day) Value: 27
  misc_feature: MA Experiment 20001558 PARAMETER Experiment Name: At_Drought_Soil_Dry_P Parameter: Organism Value: A. thaliana
  misc_feature: MA Experiment 20001558 PARAMETER Experiment Name: At_Drought_Soil_Dry_P Parameter: Plant Line Value: WS
  misc_feature: MA Experiment 20001558 PARAMETER Experiment Name: At_Drought_Soil_Dry_P Parameter: Post Timepoint (hr) Value: 6
  misc_feature: MA Experiment 20001558 PARAMETER Experiment Name: At_Drought_Soil_Dry_P Parameter: Post-Treatment Value: Re-Water vs. No Drought
  misc_feature: MA Experiment 20001558 PARAMETER Experiment Name: At_Drought_Soil_Dry_P Parameter: Timepoint (day) Value: 13
  misc_feature: MA Experiment 20001558 PARAMETER Experiment Name: At_Drought_Soil_Dry_P Parameter: Treatment Value: Drought vs. No Drought
cattgtcggcagtaaaactaaaaataaaaggagttccacttttcaatttttctccactccaaaaccagaaagaaagaaaaaaacatcaatcatgacaacaacaacaacgaagaagccgcacgttctggtgataccgtttccacaatccggtcacatggttccacatcttgacctcacgcatcagattcttctccgtggagccaccgtcactgtcctcgtcacacccaaaaactcttcctatctcgatgctctccgttctcttcactccccggaacacttcaaaaccctaatccttccttttccttctcacccttgtataccttccggtgtcgaatctctccagcaacttcctctcgaagctatagttcacatgtttgatgctctctctcgtctccacgaccctctcgttgactttctcagccgtcaaccaccgtcggatctccccgacgccatcctaggaagctcatttctcagcccttggattaacaaagtagctgatgctttctctattaagtccattagtttcttacccatcaatgctcattcgatctccgtcatgtgggctcaagaagatagaagcttcttcaacgatctcgagactgccacaacggaaagctacgggctcgtcatcaacagtttctacgacctcgagcctgagtttgtagaaactgttaaaacacgtttcctgaatcaccaccgtatatggaccgtcggaccgttgctcccctttaaagctggcgttgaccgtggcggacaaagctcaatcccgccggcgaaagtctcggcttggttagattcgtgccccgaggataactccgtcgtatacgtcggttttggaagccagatccggctcacggcggagcaaacagctgctttagcggcggcgttggagaaaagcagtgtgcgtttcatatgggcggtgagagacgcagctaagaaggtgaactccagcgataactccgttgaggaagatgtgatcccggcgggatttgaagagagagtgaaggagaaaggactcgtgataagaggatgggccccacaaactatgattcttgagcatcgagccgttggatcttacctaactcatttgggttggggttcggttctggaaggaatggtcggaggagttatgttgctagcgtggccgatgcaagcagaccatttctttaacacgacgctcatcgttgataaactaagagccgcagtgcgagttggagagaacagagactcggttcctgactcggacaagctcgctaggattttggctgagtcggcgagagaggacttgccggagagagttacgttgatgaagctgagggagaaagctatggaggccattaaagaaggtgggagctcttacaagaacttggatgagctcgttgcagagatgtgtttgtaataaatatcctcttctcttgctttttaagatttgtttgtttaagagagtcaataagcaaatggggtaagaaaattgttgtttattttccatttatttttctttcttaatttgatatgacaacgattaactcgatttagagttcgttagtcaatgttttctagtatgatgatggcaataatactaag

SEQ ID NO: 25896 - protein, 465 aa, Arabidopsis thaliana
  peptide (1)..(465): Ceres Seq. ID no. 13492398
  misc_feature (40)..(186): Homolog of NCBI NO: 2232354 NR Description: UDPG glucosyltransferase [Solanum berthaultii]
  misc_feature (201)..(463): Homolog of NCBI NO: 2232354 NR Description: UDPG glucosyltransferase [Solanum berthaultii]
  misc_feature (52)..(189): Homolog of NCBI NO: 20260128 NR Description: putative glucosyltransferase [Arabidopsis
  misc_feature (194)..(460): Homolog of NCBI NO: 20260128 NR Description: putative glucosyltransferase [Arabidopsis
  misc_feature (38)..(189): Homolog of NCBI NO: 22330612 NR Description: glycosyltransferase family [Arabidopsis thaliana]
  misc_feature (194)..(460): Homolog of NCBI NO: 22330612 NR Description: glycosyltransferase family [Arabidopsis thaliana]
  misc_feature (38)..(189): Homolog of NCBI NO: 25406301 NR Description: protein glucosyltransferase F2P9.25
  misc_feature (194)..(465): Homolog of NCBI NO: 25406301 NR Description: protein glucosyltransferase F2P9.25
  misc_feature (31)..(465): Homolog of NCBI NO: 21536579 NR Description: unknown [Arabidopsis thaliana]
  misc_feature (31)..(465): Homolog of NCBI NO: 18390599 NR Description: glycosyltransferase family [Arabidopsis thaliana]
IVGSKTKNKRSSTFQFFSTPKPERKKKTSIMTTTTTKKPHVLVIPFPQSGHMVPHLDLTHQILLRGATVTVLVTPKNSSYLDALRSLHSPEHFKTLILPFPSHPCIPSGVESLQQLPLEAIVHMFDALSRLHDPLVDFLSRQPPSDLPDAILGSSFLSPWINKVADAFSIKSISFLPINAHSISVMWAQEDRSFFNDLETATTESYGLVINSFYDLEPEFVETVKTRFLNHHRIWTVGPLLPFKAGVDRGGQSSIPPAKVSAWLDSCPEDNSVVYVGFGSQIRLTAEQTAALAAALEKSSVRFIWAVRDAAKKVNSSDNSVEEDVIPAGFEERVKEKGLVIRGWAPQTMILEHRAVGSYLTHLGWGSVLEGMVGGVMLLAWPMQADHFFNTTLIVDKLRAAVRVGENRDSVPDSDKLARILAESAREDLPERVTLMKLREKAMEAIKEGGSSYKNLDELVAEMCL

SEQ ID NO: 25897 - protein, 435 aa, Arabidopsis thaliana
  peptide (1)..(435): Ceres Seq. ID no. 13492399
  misc_feature (10)..(156): Homolog of NCBI NO: 2232354 NR Description: UDPG glucosyltransferase [Solanum berthaultii]
  misc_feature (171)..(433): Homolog of NCBI NO: 2232354 NR Description: UDPG glucosyltransferase [Solanum berthaultii]
  misc_feature (22)..(159): Homolog of NCBI NO: 20260128 NR Description: putative glucosyltransferase [Arabidopsis
  misc_feature (164)..(430): Homolog of NCBI NO: 20260128 NR Description: putative glucosyltransferase [Arabidopsis
  misc_feature (8)..(159): Homolog of NCBI NO: 22330612 NR Description: glycosyltransferase family [Arabidopsis thaliana]
  misc_feature (164)..(430): Homolog of NCBI NO: 22330612 NR Description: glycosyltransferase family [Arabidopsis thaliana]
  misc_feature (8)..(159): Homolog of NCBI NO: 25406301 NR Description: protein glucosyltransferase F2P9.25
  misc_feature (164)..(435): Homolog of NCBI NO: 25406301 NR Description: protein glucosyltransferase F2P9.25
  misc_feature (1)..(435): Homolog of NCBI NO: 21536579 NR Description: unknown [Arabidopsis thaliana]
  misc_feature (1)..(435): Homolog of NCBI NO: 18390599 NR Description: glycosyltransferase family [Arabidopsis thaliana]
MTTTTTKKPHVLVIPFPQSGHMVPHLDLTHQILLRGATVTVLVTPKNSSYLDALRSLHSPEHFKTLILPFPSHPCIPSGVESLQQLPLEAIVHMFDALSRLHDPLVDFLSRQPPSDLPDAILGSSFLSPWINKVADAFSIKSISFLPINAHSISVMWAQEDRSFFNDLETATTESYGLVINSFYDLEPEFVETVKTRFLNHHRIWTVGPLLPFKAGVDRGGQSSIPPAKVSAWLDSCPEDNSVVYVGFGSQIRLTAEQTAALAAALEKSSVRFIWAVRDAAKKVNSSDNSVEEDVIPAGFEERVKEKGLVIRGWAPQTMILEHRAVGSYLTHLGWGSVLEGMVGGVMLLAWPMQADHFFNTTLIVDKLRAAVRVGENRDSVPDSDKLARILAESAREDLPERVTLMKLREKAMEAIKEGGSSYKNLDELVAEMCL

SEQ ID NO: 25898 - protein, 414 aa, Arabidopsis thaliana
  peptide (1)..(414): Ceres Seq. ID no. 13492400
  misc_feature (1)..(138): Homolog of NCBI NO: 22330612 NR Description: glycosyltransferase family [Arabidopsis thaliana]
  misc_feature (143)..(409): Homolog of NCBI NO: 22330612 NR Description: glycosyltransferase family [Arabidopsis thaliana]
  misc_feature (1)..(138): Homolog of NCBI NO: 25406301 NR Description: protein glucosyltransferase F2P9.25
  misc_feature (143)..(414): Homolog of NCBI NO: 25406301 NR Description: protein glucosyltransferase F2P9.25
  misc_feature (1)..(414): Homolog of NCBI NO: 21536579 NR Description: unknown [Arabidopsis thaliana]
  misc_feature (1)..(414): Homolog of NCBI NO: 18390599 NR Description: glycosyltransferase family [Arabidopsis thaliana]
  misc_feature (1)..(135): Homolog of NCBI NO: 2232354 NR Description: UDPG glucosyltransferase [Solanum berthaultii]
  misc_feature (150)..(412): Homolog of NCBI NO: 2232354 NR Description: UDPG glucosyltransferase [Solanum berthaultii]
  misc_feature (1)..(138): Homolog of NCBI NO: 20260128 NR Description: putative glucosyltransferase [Arabidopsis
  misc_feature (143)..(409): Homolog of NCBI NO: 20260128 NR Description: putative glucosyltransferase [Arabidopsis
MVPHLDLTHQILLRGATVTVLVTPKNSSYLDALRSLHSPEHFKTLILPFPSHPCIPSGVESLQQLPLEAIVHMFDALSRLHDPLVDFLSRQPPSDLPDAILGSSFLSPWINKVADAFSIKSISFLPINAHSISVMWAQEDRSFFNDLETATTESYGLVINSFYDLEPEFVETVKTRFLNHHRIWTVGPLLPFKAGVDRGGQSSIPPAKVSAWLDSCPEDNSVVYVGFGSQIRLTAEQTAALAAALEKSSVRFIWAVRDAAKKVNSSDNSVEEDVIPAGFEERVKEKGLVIRGWAPQTMILEHRAVGSYLTHLGWGSVLEGMVGGVMLLAWPMQADHFFNTTLIVDKLRAAVRVGENRDSVPDSDKLARILAESAREDLPERVTLMKLREKAMEAIKEGGSSYKNLDELVAEMCL

SEQ ID NO: 25899 - DNA, 1758 bp, Arabidopsis thaliana
  misc_feature (1)..(1758): Ceres Seq. ID no. 13490176
  misc_feature: MA Experiment ID: 108577 Result: Up-regulated in Transcription
  misc_feature: MA Experiment 108577 PARAMETER Experiment Name: At_42deg_Heat_cDNA_P Parameter: Temperature (deg C) Value: 42 vs. 22
  misc_feature: MA Experiment 108577 PARAMETER Experiment Name: At_42deg_Heat_cDNA_P Parameter: Timepoint (hr) Value: 6
  misc_feature: MA Experiment 108577 PARAMETER Experiment Name: At_42deg_Heat_cDNA_P Parameter: Tissue Value: Aerial
  misc_feature: MA Experiment ID: 20000111 Result: Up-regulated in Transcription
  misc_feature: MA Experiment 20000111 PARAMETER Experiment Name: At_42deg_Heat_cDNA_P Parameter: Temperature (deg C) Value: 42 vs. 22
  misc_feature: MA Experiment 20000111 PARAMETER Experiment Name: At_42deg_Heat_cDNA_P Parameter: Timepoint (hr) Value: 6
  misc_feature: MA Experiment 20000111 PARAMETER Experiment Name: At_42deg_Heat_cDNA_P Parameter: Tissue Value: Aerial
  misc_feature: MA Experiment ID: 20000112 Result: Up-regulated in Transcription
  misc_feature: MA Experiment 20000112 PARAMETER Experiment Name: At_42deg_Heat_cDNA_P Parameter: Temperature (deg C) Value: 42 vs. 22
  misc_feature: MA Experiment 20000112 PARAMETER Experiment Name: At_42deg_Heat_cDNA_P Parameter: Timepoint (hr) Value: 2
  misc_feature: MA Experiment 20000112 PARAMETER Experiment Name: At_42deg_Heat_cDNA_P Parameter: Tissue Value: Aerial
  misc_feature: MA Experiment ID: 20000173 Result: Up-regulated in Transcription
  misc_feature: MA Experiment 20000173 PARAMETER Experiment Name: At_42deg_Heat_P Parameter: Age (day) Value: 14
  misc_feature: MA Experiment 20000173 PARAMETER Experiment Name: At_42deg_Heat_P Parameter: Organism Value: A. thaliana
  misc_feature: MA Experiment 20000173 PARAMETER Experiment Name: At_42deg_Heat_P Parameter: Plant Line Value: WS
  misc_feature: MA Experiment 20000173 PARAMETER Experiment Name: At_42deg_Heat_P Parameter: Temperature (deg C) Value: 42 vs. 22
  misc_feature: MA Experiment 20000173 PARAMETER Experiment Name: At_42deg_Heat_P Parameter: Timepoint (hr) Value: 6
  misc_feature: MA Experiment 20000173 PARAMETER Experiment Name: At_42deg_Heat_P Parameter: Tissue Value: Aerial
tggtctccgacttcaaacataacacaaatcgttcatcgtcttccttctctctctctgattctctcattcgcgaatttcaaagctatggcggatacggtagagaaagttcccaccgttgttgagtcatcttcatcatccaccgttgaagcatctaatagcgccgagaagactgagcccacgacggagaagaaaaagtggggcgatgttgaagatgatgatgatgaagaagaagctgtatcggagcttaattcattgagcattaaggaagaagagaaacctgattctattcttgaggaacctgaagattctaacatcaaagctgttacttctggtgacacaccatatacatcagcaagtagatttgaagacttgaacttgtcacctgaattgatgaaaggcttgtacgttgagatgaaattcgaaaagcctagcaagatccaagctattagtttgcctatgataatgacgccgccacacaagcatctgattgcccaggctcataacggatctggaaagacgacttgtttcgttcttggaatgttgagtcgtgttgatcccacattgagagagcctcaagctctctgtatttgtcccactagagaattagctaatcagaatatggaagttcttcagaagatggggaagtttactgggatcactgctgagttggctgtgcctgactcaacgagaggtgcaccggcggcaacaagaggagctcctgtttctgctcatgttgtgattggcacccctggaacgcttaagaaatggatggcatttaagagactaggtctaaatcatttgaagattctggtttttgatgaggctgaccatatgcttgctacggatgggtttagggatgattccttgaagataatgaaagacattgggagagttaatcccaatttccaggttcttcttttctcggcaacttttaacgaaactgtcaaagattttgttgcgcggacagtcaaagatcccaaccaattgtttgtcaaaagagaggatctggctttggactcggtgaagcagtataaagttgtttgcccgaaggagcaaaacaagatcgaagtcatcaaggatcagattatggagcttggggatattgggcaaaccattatctttgtgaaaacaaaagcgtctgctcaaaaggtgcacaaagcccttgcggaaatgggatatgacgttaccagtgtccatggtaatctgactgaatcggacagggataagatagttaaagagtttaaagaatgccttactcaagtgctcattgctaccgatgtcattgcaagaggttttgaccaacagcgggtgaatttggttgtcaattataatcttcccactaaatatgaaactggagagccagattatgaggtgtaccttcacagggttgggagagctggccggtttggtcgcaaaggagcggttttcaacttgctgcttgatgatggctgggataaagaggtgatggagaagatcgagaagtattttgaagcaaatgttaaggagatcaagtcgtggaactcagaggaagagtataagagtgcattaaaggaagctggcctgctggacgagtgaggaagagagacagcatgtgttcaaaccatcttaaaagactatgtcgtctgttttcttgagattgttttaagaaagaaacttgtatacctctttgaggttttcttgtaatctttttatctgattgctgagagtttcagactttgtagattttttgttaagggaaaaggaaaacattttttatgt

SEQ ID NO: 25900 - protein, 524 aa, Arabidopsis thaliana
  peptide (1)..(524): Ceres Seq. ID no. 13490177
  misc_feature (133)..(344): Pfam Name: DEAD/DEAH box helicase Pfam Description: DEAD/DEAH box helicase
  misc_feature (133)..(344): Pfam Name: DEAD/DEAH box helicase Pfam Description: DEAD/DEAH box helicase
  misc_feature (68)..(510): Homolog of NCBI NO: 33186912 NR Description: DEAD (aspartate-glutamate-alanine-aspartate) box
  misc_feature (34)..(510): Homolog of NCBI NO: 28436904 NR Description: Similar to DEAD/H (Asp-Glu-Ala-Asp/His) box
  misc_feature (27)..(510): Homolog of NCBI NO: 38511935 NR Description: DEAD (Asp-Glu-Ala-As) box polypeptide 19
  misc_feature (68)..(510): Homolog of NCBI NO: 30749194 NR Description: gonadotropin-regulated testicular RNA helicase;
  misc_feature (29)..(518): Homolog of NCBI NO: 6324620 NR Description: Dead-Box protein 5; Dbp5p [Saccharomyces
  misc_feature (68)..(510): Homolog of NCBI NO: 33186912 NR Description: DEAD (aspartate-glutamate-alanine-aspartate) box
  misc_feature (27)..(510): Homolog of NCBI NO: 38511935 NR Description: DEAD (Asp-Glu-Ala-As) box polypeptide 19
  misc_feature (29)..(518): Homolog of NCBI NO: 6324620 NR Description: Dead-Box protein 5; Dbp5p [Saccharomyces
  misc_feature (29)..(524): Homolog of NCBI NO: 15231748 NR Description: DEAD/DEAH box helicase, putative [Arabidopsis
  misc_feature (29)..(524): Homolog of NCBI NO: 15982881 NR Description: AT3g53110/T4D2_40 [Arabidopsis thaliana]
  misc_feature (27)..(284): Homolog of NCBI NO: 22773229 NR Description: Putative DEAD/DEAH box RNA helicase protein
  misc_feature (277)..(523): Homolog of NCBI NO: 22773229 NR Description: Putative DEAD/DEAH box RNA helicase protein
  misc_feature (28)..(519): Homolog of NCBI NO: 19112808 NR Description: putative ATP-dependent cytosolic RNA helicase,
  misc_feature (68)..(510): Homolog of NCBI NO: 30749194 NR Description: gonadotropin-regulated testicular RNA helicase;
  misc_feature (34)..(510): Homolog of NCBI NO: 28436904 NR Description: Similar to DEAD/H (Asp-Glu-Ala-Asp/His) box
  misc_feature (28)..(519): Homolog of NCBI NO: 19112808 NR Description: putative ATP-dependent cytosolic RNA helicase,
  misc_feature (277)..(523): Homolog of NCBI NO: 22773229 NR Description: Putative DEAD/DEAH box RNA helicase protein
  misc_feature (27)..(284): Homolog of NCBI NO: 22773229 NR Description: Putative DEAD/DEAH box RNA helicase protein
  misc_feature (29)..(524): Homolog of NCBI NO: 15982881 NR Description: AT3g53110/T4D2_40 [Arabidopsis thaliana]
  misc_feature (29)..(524): Homolog of NCBI NO: 15231748 NR Description: DEAD/DEAH box helicase, putative [Arabidopsis
WSPTSNITQIVHRLPSLSLILSFANFKAMADTVEKVPTVVESSSSSTVEASNSAEKTEPTTEKKKWGDVEDDDDEEEAVSELNSLSIKEEEKPDSILEEPEDSNIKAVTSGDTPYTSASRFEDLNLSPELMKGLYVEMKFEKPSKIQAISLPMIMTPPHKHLIAQAHNGSGKTTCFVLGMLSRVDPTLREPQALCICPTRELANQNMEVLQKMGKFTGITAELAVPDSTRGAPAATRGAPVSAHVVIGTPGTLKKWMAFKRLGLNHLKILVFDEADHMLATDGFRDDSLKIMKDIGRVNPNFQVLLFSATFNETVKDFVARTVKDPNQLFVKREDLALDSVKQYKVVCPKEQNKIEVIKDQIMELGDIGQTIIFVKTKASAQKVHKALAEMGYDVTSVHGNLTESDRDKIVKEFKECLTQVLIATDVIARGFDQQRVNLVVNYNLPTKYETGEPDYEVYLHRVGRAGRFGRKGAVFNLLLDDGWDKEVMEKIEKYFEANVKEIKSWNSEEEYKSALKEAGLLDE

SEQ ID NO: 25901 - protein, 496 aa, Arabidopsis thaliana
  peptide (1)..(496): Ceres Seq. ID no. 13490178
  misc_feature (105)..(316): Pfam Name: DEAD/DEAH box helicase Pfam Description: DEAD/DEAH box helicase
  misc_feature (105)..(316): Pfam Name: DEAD/DEAH box helicase Pfam Description: DEAD/DEAH box helicase
  misc_feature (40)..(482): Homolog of NCBI NO: 33186912 NR Description: DEAD (aspartate-glutamate-alanine-aspartate) box
  misc_feature (6)..(482): Homolog of NCBI NO: 28436904 NR Description: Similar to DEAD/H (Asp-Glu-Ala-Asp/His) box
  misc_feature (1)..(482): Homolog of NCBI NO: 38511935 NR Description: DEAD (Asp-Glu-Ala-As) box polypeptide 19
  misc_feature (40)..(482): Homolog of NCBI NO: 30749194 NR Description: gonadotropin-regulated testicular RNA helicase;
  misc_feature (1)..(490): Homolog of NCBI NO: 6324620 NR Description: Dead-Box protein 5; Dbp5p [Saccharomyces
  misc_feature (40)..(482): Homolog of NCBI NO: 33186912 NR Description: DEAD (aspartate-glutamate-alanine-aspartate) box
  misc_feature (1)..(482): Homolog of NCBI NO: 38511935 NR Description: DEAD (Asp-Glu-Ala-As) box polypeptide 19
  misc_feature (1)..(490): Homolog of NCBI NO: 6324620 NR Description: Dead-Box protein 5; Dbp5p [Saccharomyces
  misc_feature (1)..(496): Homolog of NCBI NO: 15231748 NR Description: DEAD/DEAH box helicase, putative [Arabidopsis
  misc_feature (1)..(496): Homolog of NCBI NO: 15982881 NR Description: AT3g53110/T4D2_40 [Arabidopsis thaliana]
  misc_feature (1)..(256): Homolog of NCBI NO: 22773229 NR Description: Putative DEAD/DEAH box RNA helicase protein
  misc_feature (249)..(495): Homolog of NCBI NO: 22773229 NR Description: Putative DEAD/DEAH box RNA helicase protein
  misc_feature (1)..(491): Homolog of NCBI NO: 19112808 NR Description: putative ATP-dependent cytosolic RNA helicase,
  misc_feature (40)..(482): Homolog of NCBI NO: 30749194 NR Description: gonadotropin-regulated testicular RNA helicase;
  misc_feature (6)..(482): Homolog of NCBI NO: 28436904 NR Description: Similar to DEAD/H (Asp-Glu-Ala-Asp/His) box
  misc_feature (1)..(491): Homolog of NCBI NO: 19112808 NR Description: putative ATP-dependent cytosolic RNA helicase,
  misc_feature (249)..(495): Homolog of NCBI NO: 22773229 NR Description: Putative DEAD/DEAH box RNA helicase protein
  misc_feature (1)..(256): Homolog of NCBI NO: 22773229 NR Description: Putative DEAD/DEAH box RNA helicase protein
  misc_feature (1)..(496): Homolog of NCBI NO: 15982881 NR Description: AT3g53110/T4D2_40 [Arabidopsis thaliana]
  misc_feature (1)..(496): Homolog of NCBI NO: 15231748 NR Description: DEAD/DEAH box helicase, putative [Arabidopsis
MADTVEKVPTVVESSSSSTVEASNSAEKTEPTTEKKKWGDVEDDDDEEEAVSELNSLSIKEEEKPDSILEEPEDSNIKAVTSGDTPYTSASRFEDLNLSPELMKGLYVEMKFEKPSKIQAISLPMIMTPPHKHLIAQAHNGSGKTTCFVLGMLSRVDPTLREPQALCICPTRELANQNMEVLQKMGKFTGITAELAVPDSTRGAPAATRGAPVSAHVVIGTPGTLKKWMAFKRLGLNHLKILVFDEADHMLATDGFRDDSLKIMKDIGRVNPNFQVLLFSATFNETVKDFVARTVKDPNQLFVKREDLALDSVKQYKVVCPKEQNKIEVIKDQIMELGDIGQTIIFVKTKASAQKVHKALAEMGYDVTSVHGNLTESDRDKIVKEFKECLTQVLIATDVIARGFDQQRVNLVVNYNLPTKYETGEPDYEVYLHRVGRAGRFGRKGAVFNLLLDDGWDKEVMEKIEKYFEANVKEIKSWNSEEEYKSALKEAGLLDE

SEQ ID NO: 25902 - protein, 394 aa, Arabidopsis thaliana
  peptide (1)..(394): Ceres Seq. ID no. 13490179
  misc_feature (3)..(214): Pfam Name: DEAD/DEAH box helicase Pfam Description: DEAD/DEAH box helicase
  misc_feature (3)..(214): Pfam Name: DEAD/DEAH box helicase Pfam Description: DEAD/DEAH box helicase
  misc_feature (1)..(380): Homolog of NCBI NO: 33186912 NR Description: DEAD (aspartate-glutamate-alanine-aspartate) box
  misc_feature (1)..(380): Homolog of NCBI NO: 28436904 NR Description: Similar to DEAD/H (Asp-Glu-Ala-Asp/His) box
  misc_feature (1)..(380): Homolog of NCBI NO: 38511935 NR Description: DEAD (Asp-Glu-Ala-As) box polypeptide 19
  misc_feature (1)..(380): Homolog of NCBI NO: 30749194 NR Description: gonadotropin-regulated testicular RNA helicase;
  misc_feature (1)..(388): Homolog of NCBI NO: 6324620 NR Description: Dead-Box protein 5; Dbp5p [Saccharomyces
  misc_feature (1)..(380): Homolog of NCBI NO: 33186912 NR Description: DEAD (aspartate-glutamate-alanine-aspartate) box
  misc_feature (1)..(380): Homolog of NCBI NO: 38511935 NR Description: DEAD (Asp-Glu-Ala-As) box polypeptide 19
  misc_feature (1)..(388): Homolog of NCBI NO: 6324620 NR Description: Dead-Box protein 5; Dbp5p [Saccharomyces
  misc_feature (1)..(394): Homolog of NCBI NO: 15231748 NR Description: DEAD/DEAH box helicase, putative [Arabidopsis
  misc_feature (1)..(394): Homolog of NCBI NO: 15982881 NR Description: AT3g53110/T4D2_40 [Arabidopsis thaliana]
  misc_feature (1)..(154): Homolog of NCBI NO: 22773229 NR Description: Putative DEAD/DEAH box RNA helicase protein
  misc_feature (147)..(393): Homolog of NCBI NO: 22773229 NR Description: Putative DEAD/DEAH box RNA helicase protein
  misc_feature (1)..(389): Homolog of NCBI NO: 19112808 NR Description: putative ATP-dependent cytosolic RNA helicase,
  misc_feature (1)..(380): Homolog of NCBI NO: 30749194 NR Description: gonadotropin-regulated testicular RNA helicase;
  misc_feature (1)..(380): Homolog of NCBI NO: 28436904 NR Description: Similar to DEAD/H (Asp-Glu-Ala-Asp/His) box
  misc_feature (1)..(389): Homolog of NCBI NO: 19112808 NR Description: putative ATP-dependent cytosolic RNA helicase,
  misc_feature (147)..(393): Homolog of NCBI NO: 22773229 NR Description: Putative DEAD/DEAH box RNA helicase protein
  misc_feature (1)..(154): Homolog of NCBI NO: 22773229 NR Description: Putative DEAD/DEAH box RNA helicase protein
  misc_feature (1)..(394): Homolog of NCBI NO: 15982881 NR Description: AT3g53110/T4D2_40 [Arabidopsis thaliana]
  misc_feature (1)..(394): Homolog of NCBI NO: 15231748 NR Description: DEAD/DEAH box helicase, putative [Arabidopsis
MKGLYVEMKFEKPSKIQAISLPMIMTPPHKHLIAQAHNGSGKTTCFVLGMLSRVDPTLREPQALCICPTRELANQNMEVLQKMGKFTGITAELAVPDSTRGAPAATRGAPVSAHVVIGTPGTLKKWMAFKRLGLNHLKILVFDEADHMLATDGFRDDSLKIMKDIGRVNPNFQVLLFSATFNETVKDFVARTVKDPNQLFVKREDLALDSVKQYKVVCPKEQNKIEVIKDQIMELGDIGQTIIFVKTKASAQKVHKALAEMGYDVTSVHGNLTESDRDKIVKEFKECLTQVLIATDVIARGFDQQRVNLVVNYNLPTKYETGEPDYEVYLHRVGRAGRFGRKGAVFNLLLDDGWDKEVMEKIEKYFEANVKEIKSWNSEEEYKSALKEAGLLDE

SEQ ID NO: 25903 - DNA, 1455 bp, Arabidopsis thaliana
  misc_feature (1)..(1455): Ceres Seq. ID no. 12323827
  misc_feature: MA Experiment ID: 108434 Result: Up-regulated in Transcription
  misc_feature: MA Experiment 108434 PARAMETER Experiment Name: At_Root_Tips_cDNA_P Parameter: Tissue Value: Root Tips
  misc_feature: MA Experiment ID: 108461 Result: Up-regulated in Transcription
  misc_feature: MA Experiment 108461 PARAMETER Experiment Name: At_Germinating_Seeds_cDNA_P Parameter: Age (day) Value: 1 vs. 0
  misc_feature: MA Experiment 108461 PARAMETER Experiment Name: At_Germinating_Seeds_cDNA_P Parameter: Tissue Value: Germinating Seeds
  misc_feature: MA Experiment ID: 108462 Result: Up-regulated in Transcription
  misc_feature: MA Experiment 108462 PARAMETER Experiment Name: At_Germinating_Seeds_cDNA_P Parameter: Age (day) Value: 2 vs. 0
  misc_feature: MA Experiment 108462 PARAMETER Experiment Name: At_Germinating_Seeds_cDNA_P Parameter: Tissue Value: Germinating Seeds
  misc_feature: MA Experiment ID: 20000179 Result: Up-regulated in Transcription
  misc_feature: MA Experiment 20000179 PARAMETER Experiment Name: At_Germinating_Seeds_P Parameter: Age (hr) Value: 6 vs. 0
  misc_feature: MA Experiment 20000179 PARAMETER Experiment Name: At_Germinating_Seeds_P Parameter: Tissue Value: Germinating Seeds
  misc_feature: MA Experiment ID: 20000180 Result: Up-regulated in Transcription
  misc_feature: MA Experiment 20000180 PARAMETER Experiment Name: At_Germinating_Seeds_P Parameter: Age (hr) Value: 24 vs. 0
  misc_feature: MA Experiment 20000180 PARAMETER Experiment Name: At_Germinating_Seeds_P Parameter: Tissue Value: Germinating Seeds
  misc_feature: MA Experiment ID: 20000185 Result: Up-regulated in Transcription
  misc_feature: MA Experiment 20000185 PARAMETER Experiment Name: At_Roots__P Parameter: Age (day) Value: 7 vs. 21
  misc_feature: MA Experiment 20000185 PARAMETER Experiment Name: At_Roots__P Parameter: Organism Value: A. thaliana
  misc_feature: MA Experiment 20000185 PARAMETER Experiment Name: At_Roots__P Parameter: Tissue Value: Roots vs. Whole Plant
  misc_feature: MA Experiment ID: 20000234 Result: Up-regulated in Transcription
  misc_feature: MA Experiment 20000234 PARAMETER Experiment Name: At_Siliques_P Parameter: Age (day) Value: 21
  misc_feature: MA Experiment 20000234 PARAMETER Experiment Name: At_Siliques_P Parameter: Organism Value: A. thaliana
  misc_feature: MA Experiment 20000234 PARAMETER Experiment Name: At_Siliques_P Parameter: Plant Line Value: WS
  misc_feature: MA Experiment 20000234 PARAMETER Experiment Name: At_Siliques_P Parameter: Tissue Value: Less Than 5mm Siliques vs. Whole Plant
  misc_feature: MA Experiment ID: 20000265 Result: Up-regulated in Transcription
  misc_feature: MA Experiment 20000265 PARAMETER Experiment Name: At_Open_Flower_P Parameter: Age (day) Value: 21
  misc_feature: MA Experiment 20000265 PARAMETER Experiment Name: At_Open_Flower_P Parameter: Plant Line Value: WS
  misc_feature: MA Experiment 20000265 PARAMETER Experiment Name: At_Open_Flower_P Parameter: Tissue Value: Closed Flower vs. Whole Plant
  misc_feature: MA Experiment ID: 20000439 Result: Up-regulated in Transcription
  misc_feature: MA Experiment 20000439 PARAMETER Experiment Name: At_Roots__P Parameter: Age (day) Value: 14 vs. 21
  misc_feature: MA Experiment 20000439 PARAMETER Experiment Name: At_Roots__P Parameter: Organism Value: A. thaliana
  misc_feature: MA Experiment 20000439 PARAMETER Experiment Name: At_Roots__P Parameter: Tissue Value: Roots vs. Whole Plant
  misc_feature: MA Experiment ID: 20000794 Result: Up-regulated in Transcription
  misc_feature: MA Experiment 20000794 PARAMETER Experiment Name: At_Petals_P Parameter: Age (day) Value: 23-25 days
  misc_feature: MA Experiment 20000794 PARAMETER Experiment Name: At_Petals_P Parameter: Plant Line Value: WS
  misc_feature: MA Experiment 20000794 PARAMETER Experiment Name: At_Petals_P Parameter: Tissue Value: Petals vs. Whole plant
  misc_feature: MA Experiment ID: 20001558 Result: Up-regulated in Transcription
  misc_feature: MA Experiment 20001558 PARAMETER Experiment Name: At_Drought_Soil_Dry_P Parameter: Age (day) Value: 27
  misc_feature: MA Experiment 20001558 PARAMETER Experiment Name: At_Drought_Soil_Dry_P Parameter: Organism Value: A. thaliana
  misc_feature: MA Experiment 20001558 PARAMETER Experiment Name: At_Drought_Soil_Dry_P Parameter: Plant Line Value: WS
  misc_feature: MA Experiment 20001558 PARAMETER Experiment Name: At_Drought_Soil_Dry_P Parameter: Post Timepoint (hr) Value: 6
  misc_feature: MA Experiment 20001558 PARAMETER Experiment Name: At_Drought_Soil_Dry_P Parameter: Post-Treatment Value: Re-Water vs. No Drought
  misc_feature: MA Experiment 20001558 PARAMETER Experiment Name: At_Drought_Soil_Dry_P Parameter: Timepoint (day) Value: 13
  misc_feature: MA Experiment 20001558 PARAMETER Experiment Name: At_Drought_Soil_Dry_P Parameter: Treatment Value: Drought vs. No Drought
  misc_feature: MA Experiment ID: 20001560 Result: Up-regulated in Transcription
  misc_feature: MA Experiment 20001560 PARAMETER Experiment Name: At_Drought_Soil_Dry_P Parameter: Age (day) Value: 28
  misc_feature: MA Experiment 20001560 PARAMETER Experiment Name: At_Drought_Soil_Dry_P Parameter: Organism Value: A. thaliana
  misc_feature: MA Experiment 20001560 PARAMETER Experiment Name: At_Drought_Soil_Dry_P Parameter: Plant Line Value: WS
  misc_feature: MA Experiment 20001560 PARAMETER Experiment Name: At_Drought_Soil_Dry_P Parameter: Post Timepoint (hr) Value: None
  misc_feature: MA Experiment 20001560 PARAMETER Experiment Name: At_Drought_Soil_Dry_P Parameter: Post-Treatment Value: None
  misc_feature: MA Experiment 20001560 PARAMETER Experiment Name: At_Drought_Soil_Dry_P Parameter: Timepoint (day) Value: 14
  misc_feature: MA Experiment 20001560 PARAMETER Experiment Name: At_Drought_Soil_Dry_P Parameter: Treatment Value: Drought vs. No Drought
  misc_feature: MA Experiment ID: 20001911 Result: Down-regulated in Transcription
  misc_feature: MA Experiment 20001911 PARAMETER Experiment Name: At_Drought_Reproduction_P Parameter: Age (day) Value: 40
  misc_feature: MA Experiment 20001911 PARAMETER Experiment Name: At_Drought_Reproduction_P Parameter: Organism Value: A. thaliana
  misc_feature: MA Experiment 20001911 PARAMETER Experiment Name: At_Drought_Reproduction_P Parameter: Plant Line Value: WS
  misc_feature: MA Experiment 20001911 PARAMETER Experiment Name: At_Drought_Reproduction_P Parameter: Timepoint (day) Value: 10
  misc_feature: MA Experiment 20001911 PARAMETER Experiment Name: At_Drought_Reproduction_P Parameter: Tissue Value: Flowers
  misc_feature: MA Experiment 20001911 PARAMETER Experiment Name: At_Drought_Reproduction_P Parameter: Treatment Value: Drought vs. No Drought
aagattctcgttggcttcagacattttccatcttctaggtttctttctttctcagcaatttccaggaaaatggaagtgaaagctagagctcctgggaagatcatacttgcaggggaacacgctgttgttcatggatccaccgctgtagctgccgccattgatctctacacttacgttactctccgctttcctcttccatcagctgagaacaatgataggcttacacttcagctcaaggacatttccttggagttttcatggtccttagccagaatcaaagaagcgattccttatgattcaagcactctctgccgttctacgccggcttcatgttcagaggagacccttaaatcaattgcagttttggttgaagagcaaaatcttccaaaggaaaagatgtggctctcctctgggatctccacgtttctctggttatacaccagaattatagggttcaatccggctacagtagtcattaactctgagcttccatacgggtctggcctcggttcatcagcagctttatgtgtagctctcacagctgctctccttgcttcttctatttcagagaaaacccgtggtaacggttggtcatctctcgatgaaaccaatcttgagttgctaaataaatgggctttcgaaggcgaaaagatcatccatgggaaaccttctgggatagacaacaccgtcagtgcatacggcaacatgatcaagttctgctcaggcgagataactcggttacaatccaacatgcctctgagaatgctaattaccaacactagagttgggcgaaacacaaaagctctggtctctggtgtgtcacagagagcggtaagacatcctgatgcgatgaagtcagtgttcaacgccgtggattctataagcaaagagctcgctgcgatcattcagtctaaagacgagacctcagttacagaaaaagaagagagaataaaagaactcatggagatgaaccaaggtctgctcctgtcaatgggggttagccacagctcaatcgaggctgtgattctaaccacggtcaagcacaagcttgtctccaaacttacaggagctggtggcggcggctgcgtcctcactctattaccaaccgggacggtggtggacaaagtggtggaggagctcgagtccagcggttttcagtgtttcacggcattgattggtggtaacggagctcagatttgctattgatcaggtcggaaaaatcatatttggcctctcaccattcttaaacttgctgacgtgtacgtcaagaaggctgcaattagaaattcaaagagtcgattttttcttataaatgatgtgttgaatgtaaaattgctttattattataccatgtgacaaataattgaaaaaagcaaagattgtttagtttttttttttgtattttgaaattgttatgtttcatgatgggaaatataaaatgacaaagtttttact

SEQ ID NO: 25904 - protein, 401 aa, Arabidopsis thaliana
  peptide (1)..(401): Ceres Seq. ID no. 12323828
  misc_feature (26)..(399): Homolog of NCBI NO: 28828936 NR Description: similar to Rattus norvegicus (Rat). Mevalonate
  misc_feature (30)..(399): Homolog of NCBI NO: 13592007 NR Description: mevalonate kinase [Rattus norvegicus]
  misc_feature (30)..(396): Homolog of NCBI NO: 12963731 NR Description: mevalonate kinase [Mus musculus]
  misc_feature (30)..(399): Homolog of NCBI NO: 33303805 NR Description: mevalonate kinase [synthetic construct]
  misc_feature (30)..(399): Homolog of NCBI NO: 4557769 NR Description: mevalonate kinase [Homo sapiens]
  misc_feature (30)..(399): Homolog of NCBI NO: 450346 NR Description: ORF for viral-cellular fusion transcript
  misc_feature (24)..(369): Homolog of NCBI NO: 37532842 NR Description: putative mevalonate kinase
  misc_feature (24)..(401): Homolog of NCBI NO: 16417946 NR Description: mevalonate kinase [Hevea brasiliensis]
  misc_feature (24)..(401): Homolog of NCBI NO: 5578718 NR Description: mevalonate kinase [Arabidopsis thaliana]
  misc_feature (24)..(401): Homolog of NCBI NO: 15240936 NR Description: mevalonate kinase
KILVGFRHFPSSRFLSFSAISRKMEVKARAPGKIILAGEHAVVHGSTAVAAAIDLYTYVTLRFPLPSAENNDRLTLQLKDISLEFSWSLARIKEAIPYDSSTLCRSTPASCSEETLKSIAVLVEEQNLPKEKMWLSSGISTFLWLYTRIIGFNPATVVINSELPYGSGLGSSAALCVALTAALLASSISEKTRGNGWSSLDETNLELLNKWAFEGEKIIHGKPSGIDNTVSAYGNMIKFCSGEITRLQSNMPLRMLITNTRVGRNTKALVSGVSQRAVRHPDAMKSVFNAVDSISKELAAIIQSKDETSVTEKEERIKELMEMNQGLLLSMGVSHSSIEAVILTTVKHKLVSKLTGAGGGGCVLTLLPTGTVVDKVVEELESSGFQCFTALIGGNGAQICY

SEQ ID NO: 25905 - protein, 378 aa, Arabidopsis thaliana
  peptide (1)..(378): Ceres Seq. ID no. 12323829
  misc_feature (3)..(376): Homolog of NCBI NO: 28828936 NR Description: similar to Rattus norvegicus (Rat). Mevalonate
  misc_feature (7)..(376): Homolog of NCBI NO: 13592007 NR Description: mevalonate kinase [Rattus norvegicus]
  misc_feature (7)..(373): Homolog of NCBI NO: 12963731 NR Description: mevalonate kinase [Mus musculus]
  misc_feature (7)..(376): Homolog of NCBI NO: 33303805 NR Description: mevalonate kinase [synthetic construct]
  misc_feature (7)..(376): Homolog of NCBI NO: 4557769 NR Description: mevalonate kinase [Homo sapiens]
  misc_feature (7)..(376): Homolog of NCBI NO: 450346 NR Description: ORF for viral-cellular fusion transcript
  misc_feature (1)..(346): Homolog of NCBI NO: 37532842 NR Description: putative mevalonate kinase
  misc_feature (1)..(378): Homolog of NCBI NO: 16417946 NR Description: mevalonate kinase [Hevea brasiliensis]
  misc_feature (1)..(378): Homolog of NCBI NO: 5578718 NR Description: mevalonate kinase [Arabidopsis thaliana]
  misc_feature (1)..(378): Homolog of NCBI NO: 15240936 NR Description: mevalonate kinase
MEVKARAPGKIILAGEHAVVHGSTAVAAAIDLYTYVTLRFPLPSAENNDRLTLQLKDISLEFSWSLARIKEAIPYDSSTLCRSTPASCSEETLKSIAVLVEEQNLPKEKMWLSSGISTFLWLYTRIIGFNPATVVINSELPYGSGLGSSAALCVALTAALLASSISEKTRGNGWSSLDETNLELLNKWAFEGEKIIHGKPSGIDNTVSAYGNMIKFCSGEITRLQSNMPLRMLITNTRVGRNTKALVSGVSQRAVRHPDAMKSVFNAVDSISKELAAIIQSKDETSVTEKEERIKELMEMNQGLLLSMGVSHSSIEAVILTTVKHKLVSKLTGAGGGGCVLTLLPTGTVVDKVVEELESSGFQCFTALIGGNGAQICY

SEQ ID NO: 25906 - protein, 269 aa, Arabidopsis thaliana
  peptide (1)..(269): Ceres Seq. ID no. 12323830
  misc_feature (1)..(267): Homolog of NCBI NO: 28828936 NR Description: similar to Rattus norvegicus (Rat). Mevalonate
  misc_feature (1)..(267): Homolog of NCBI NO: 13592007 NR Description: mevalonate kinase [Rattus norvegicus]
  misc_feature (1)..(264): Homolog of NCBI NO: 12963731 NR Description: mevalonate kinase [Mus musculus]
  misc_feature (1)..(267): Homolog of NCBI NO: 33303805 NR Description: mevalonate kinase [synthetic construct]
  misc_feature (1)..(267): Homolog of NCBI NO: 4557769 NR Description: mevalonate kinase [Homo sapiens]
  misc_feature (1)..(267): Homolog of NCBI NO: 450346 NR Description: ORF for viral-cellular fusion transcript
  misc_feature (1)..(237): Homolog of NCBI NO: 37532842 NR Description: putative mevalonate kinase
  misc_feature (1)..(269): Homolog of NCBI NO: 16417946 NR Description: mevalonate kinase [Hevea brasiliensis]
  misc_feature (1)..(269): Homolog of NCBI NO: 5578718 NR Description: mevalonate kinase [Arabidopsis thaliana]
  misc_feature (1)..(269): Homolog of NCBI NO: 15240936 NR Description: mevalonate kinase
MWLSSGISTFLWLYTRIIGFNPATVVINSELPYGSGLGSSAALCVALTAALLASSISEKTRGNGWSSLDETNLELLNKWAFEGEKIIHGKPSGIDNTVSAYGNMIKFCSGEITRLQSNMPLRMLITNTRVGRNTKALVSGVSQRAVRHPDAMKSVFNAVDSISKELAAIIQSKDETSVTEKEERIKELMEMNQGLLLSMGVSHSSIEAVILTTVKHKLVSKLTGAGGGGCVLTLLPTGTVVDKVVEELESSGFQCFTALIGGNGAQICY

SEQ ID NO: 25907 - DNA, 1336 bp, Arabidopsis thaliana
  misc_feature (1)..(1336): Ceres Seq. ID no. 13493941
  misc_feature: MA Experiment ID: 108462 Result: Down-regulated in Transcription
  misc_feature: MA Experiment 108462 PARAMETER Experiment Name: At_Germinating_Seeds_cDNA_P Parameter: Age (day) Value: 2 vs. 0
  misc_feature: MA Experiment 108462 PARAMETER Experiment Name: At_Germinating_Seeds_cDNA_P Parameter: Tissue Value: Germinating Seeds
  misc_feature: MA Experiment ID: 108463 Result: Down-regulated in Transcription
  misc_feature: MA Experiment 108463 PARAMETER Experiment Name: At_Germinating_Seeds_cDNA_P Parameter: Age (day) Value: 3 vs. 0
  misc_feature: MA Experiment 108463 PARAMETER Experiment Name: At_Germinating_Seeds_cDNA_P Parameter: Tissue Value: Germinating Seeds
  misc_feature: MA Experiment ID: 108464 Result: Down-regulated in Transcription
  misc_feature: MA Experiment 108464 PARAMETER Experiment Name: At_Germinating_Seeds_cDNA_P Parameter: Age (day) Value: 4 vs. 0
  misc_feature: MA Experiment 108464 PARAMETER Experiment Name: At_Germinating_Seeds_cDNA_P Parameter: Tissue Value: Germinating Seeds
  misc_feature: MA Experiment ID: 108595 Result: Down-regulated in Transcription
  misc_feature: MA Experiment 108595 PARAMETER Experiment Name: At_Ler-pi_Ovule_cDNA_P Parameter: Plant Line Value: null
  misc_feature: MA Experiment ID: 20000495 Result: Down-regulated in Transcription
  misc_feature: MA Experiment 20000495 PARAMETER Experiment Name: At_Guard_Cells_P Parameter: Harvest Date Value: 8/2/2002
  misc_feature: MA Experiment 20000495 PARAMETER Experiment Name: At_Guard_Cells_P Parameter: Organism Value: A. thaliana
  misc_feature: MA Experiment 20000495 PARAMETER Experiment Name: At_Guard_Cells_P Parameter: Tissue Value: Guard Cells vs. Leaves
  misc_feature: MA Experiment ID: 20000794 Result: Down-regulated in Transcription
  misc_feature: MA Experiment 20000794 PARAMETER Experiment Name: At_Petals_P Parameter: Age (day) Value: 23-25 days
  misc_feature: MA Experiment 20000794 PARAMETER Experiment Name: At_Petals_P Parameter: Plant Line Value: WS
  misc_feature: MA Experiment 20000794 PARAMETER Experiment Name: At_Petals_P Parameter: Tissue Value: Petals vs. Whole plant
  misc_feature: MA Experiment ID: 20001558 Result: Up-regulated in Transcription
  misc_feature: MA Experiment 20001558 PARAMETER Experiment Name: At_Drought_Soil_Dry_P Parameter: Age (day) Value: 27
  misc_feature: MA Experiment 20001558 PARAMETER Experiment Name: At_Drought_Soil_Dry_P Parameter: Organism Value: A. thaliana
  misc_feature: MA Experiment 20001558 PARAMETER Experiment Name: At_Drought_Soil_Dry_P Parameter: Plant Line Value: WS
  misc_feature: MA Experiment 20001558 PARAMETER Experiment Name: At_Drought_Soil_Dry_P Parameter: Post Timepoint (hr) Value: 6
  misc_feature: MA Experiment 20001558 PARAMETER Experiment Name: At_Drought_Soil_Dry_P Parameter: Post-Treatment Value: Re-Water vs. No Drought
  misc_feature: MA Experiment 20001558 PARAMETER Experiment Name: At_Drought_Soil_Dry_P Parameter: Timepoint (day) Value: 13
  misc_feature: MA Experiment 20001558 PARAMETER Experiment Name: At_Drought_Soil_Dry_P Parameter: Treatment Value: Drought vs. No Drought
  misc_feature: MA Experiment ID: 20001560 Result: Up-regulated in Transcription
  misc_feature: MA Experiment 20001560 PARAMETER Experiment Name: At_Drought_Soil_Dry_P Parameter: Age (day) Value: 28
  misc_feature: MA Experiment 20001560 PARAMETER Experiment Name: At_Drought_Soil_Dry_P Parameter: Organism Value: A. thaliana
  misc_feature: MA Experiment 20001560 PARAMETER Experiment Name: At_Drought_Soil_Dry_P Parameter: Plant Line Value: WS
  misc_feature: MA Experiment 20001560 PARAMETER Experiment Name: At_Drought_Soil_Dry_P Parameter: Post Timepoint (hr) Value: None
  misc_feature: MA Experiment 20001560 PARAMETER Experiment Name: At_Drought_Soil_Dry_P Parameter: Post-Treatment Value: None
  misc_feature: MA Experiment 20001560 PARAMETER Experiment Name: At_Drought_Soil_Dry_P Parameter: Timepoint (day) Value: 14
  misc_feature: MA Experiment 20001560 PARAMETER Experiment Name: At_Drought_Soil_Dry_P Parameter: Treatment Value: Drought vs. No Drought
gctcagaaacatttctgtctctgtggagacagctgaagaagcagcagcactatcaatggcgtctctgagattgttctcaacgaatcatcaatctcttctccttccatcatctctctcacaaaagcctctaatatcttcaccaagattcgtcaataaccctagcagacggagtccaatacgatccgttcttcaatttaatcgcaaaccggaactcgccggagaaacgccgcgtatcgtcgttatcacctccggaaaaggcggtgttggaaagacgacaaccaccgcaaatgtcggtctctctctcgctcgttacggtttctcagttgtcgccattgacgccgaccttggtctccgtaacctcgatctcctcctagggttagagaatcgagtcaattacacttgcgtcgaggttataaacggagattgtcgtctcgatcaagctctggtacgtgataagcgttggtcgaatttcgaattgctatgtatatctaaacctagatcgaaacttccgatgggatttggtggtaaagcattggaatggcttgtggatgcgttgaaaactagaccggaaggttcaccggatttcatcatcatcgattgtcctgcaggaatcgatgccggattcataaccgccattactccggcgaatgaagcagttctggtaacaactccggatataacagcgttaagggatgctgatagggttacgggtttgttagaatgcgatggaatcagagatataaagatgattgtgaacagagtgagaactgatatgattaaaggagaggatatgatgtcagtgttagatgtgcaggagatgttgggattgtcattgcttggtgtaattcctgaagattctgaggttattcgaagcacgaatcgagggtttccgcttgttctgaataagcctcctacgcttgcgggattggcgtttgagcaggcggcttggagactcgttgagcaagatagtatgaaggctgttatggtggaggaagaacctaagaaacgtggcttcttctctttctttggcggctaaatggcaaacggatcgaacggtactgaactgaactgaaacttcttcctcgggtatgtatgcattgaaatcttttgtacaggagctagagatttttgaagattttgtctcttttgctttgagaatttagatttgttcctaggacaatgtggaattctactgctagtttgttgctgagttcaagctctgattcttatgccttttgttcttgaggttcttgatttctgtttctgtaatctgtttatgttaaaattgagagtttccaatatatctcaagttcttatgtcaaatcgttatgatgag

SEQ ID NO: 25908 - protein, 344 aa, Arabidopsis thaliana
  peptide (1)..(344): Ceres Seq. ID no. 13493942
  misc_feature (77)..(111): Pfam Name: 4Fe-4S iron sulfur cluster binding proteins, Pfam Description: 4Fe-4S iron sulfur cluster binding proteins,
  misc_feature (77)..(322): Homolog of NCBI NO: 11467635 NR Description: septum-site determining protein [Guillardia
  misc_feature (77)..(343): Homolog of NCBI NO: 23452400 NR Description: cell division inhibitor MinD [Chlamydomonas
  misc_feature (76)..(322): Homolog of NCBI NO: 5748667 NR Description: cell division inhibitor MinD [Prototheca
  misc_feature (77)..(319): Homolog of NCBI NO: 11467859 NR Description: septum-site determining protein [Nephroselmis
  misc_feature (77)..(322): Homolog of NCBI NO: 7524873 NR Description: septum site-determining protein [Chlorella
  misc_feature (64)..(337): Homolog of NCBI NO: 11466429 NR Description: septum-site determining protein [Mesostigma
  misc_feature (46)..(344): Homolog of NCBI NO: 34897748 NR Description: Similar to Chlorella vulgaris C-27 chloroplast
  misc_feature (19)..(111): Homolog of NCBI NO: 9971822 NR Description: minD [Tagetes erecta]
  misc_feature (108)..(344): Homolog of NCBI NO: 9971822 NR Description: minD [Tagetes erecta]
  misc_feature (19)..(344): Homolog of NCBI NO: 15237874 NR Description: septum site-determining MinD (dbj|BAA90261.1)
LRNISVSVETAEEAAALSMASLRLFSTNHQSLLLPSSLSQKPLISSPRFVNNPSRRSPIRSVLQFNRKPELAGETPRIVVITSGKGGVGKTTTTANVGLSLARYGFSVVAIDADLGLRNLDLLLGLENRVNYTCVEVINGDCRLDQALVRDKRWSNFELLCISKPRSKLPMGFGGKALEWLVDALKTRPEGSPDFIIIDCPAGIDAGFITAITPANEAVLVTTPDITALRDADRVTGLLECDGIRDIKMIVNRVRTDMIKGEDMMSVLDVQEMLGLSLLGVIPEDSEVIRSTNRGFPLVLNKPPTLAGLAFEQAAWRLVEQDSMKAVMVEEEPKKRGFFSFFGG

SEQ ID NO: 25909 - protein, 326 aa, Arabidopsis thaliana
  peptide (1)..(326): Ceres Seq. ID no. 13493943
  misc_feature (59)..(93): Pfam Name: 4Fe-4S iron sulfur cluster binding proteins, Pfam Description: 4Fe-4S iron sulfur cluster binding proteins,
  misc_feature (59)..(304): Homolog of NCBI NO: 7524873 NR Description: septum site-determining protein [Chlorella
  misc_feature (46)..(319): Homolog of NCBI NO: 11466429 NR Description: septum-site determining protein [Mesostigma
  misc_feature (28)..(326): Homolog of NCBI NO: 34897748 NR Description: Similar to Chlorella vulgaris C-27 chloroplast
  misc_feature (59)..(304): Homolog of NCBI NO: 11467635 NR Description: septum-site determining protein [Guillardia
  misc_feature (58)..(304): Homolog of NCBI NO: 5748667 NR Description: cell division inhibitor MinD [Prototheca
  misc_feature (59)..(301): Homolog of NCBI NO: 11467859 NR Description: septum-site determining protein [Nephroselmis
  misc_feature (59)..(325): Homolog of NCBI NO: 23452400 NR Description: cell division inhibitor MinD [Chlamydomonas
  misc_feature (1)..(93): Homolog of NCBI NO: 9971822 NR Description: minD [Tagetes erecta]
  misc_feature (90)..(326): Homolog of NCBI NO: 9971822 NR Description: minD [Tagetes erecta]
  misc_feature (1)..(326): Homolog of NCBI NO: 15237874 NR Description: septum site-determining MinD (dbj|BAA90261.1)
MASLRLFSTNHQSLLLPSSLSQKPLISSPRFVNNPSRRSPIRSVLQFNRKPELAGETPRIVVITSGKGGVGKTTTTANVGLSLARYGFSVVAIDADLGLRNLDLLLGLENRVNYTCVEVINGDCRLDQALVRDKRWSNFELLCISKPRSKLPMGFGGKALEWLVDALKTRPEGSPDFIIIDCPAGIDAGFITAITPANEAVLVTTPDITALRDADRVTGLLECDGIRDIKMIVNRVRTDMIKGEDMMSVLDVQEMLGLSLLGVIPEDSEVIRSTNRGFPLVLNKPPTLAGLAFEQAAWRLVEQDSMKAVMVEEEPKKRGFFSFFGG

SEQ ID NO: 25910 - protein, 174 aa, Arabidopsis thaliana
  peptide (1)..(174): Ceres Seq. ID no. 13493944
  misc_feature (1)..(170): Homolog of NCBI NO: 22299560 NR Description: septum site-determining protein
  misc_feature (1)..(152): Homolog of NCBI NO: 11467635 NR Description: septum-site determining protein [Guillardia
  misc_feature (1)..(173): Homolog of NCBI NO: 23452400 NR Description: cell division inhibitor MinD [Chlamydomonas
  misc_feature (1)..(152): Homolog of NCBI NO: 5748667 NR Description: cell division inhibitor MinD [Prototheca
  misc_feature (1)..(149): Homolog of NCBI NO: 11467859 NR Description: septum-site determining protein [Nephroselmis
  misc_feature (1)..(152): Homolog of NCBI NO: 7524873 NR Description: septum site-determining protein [Chlorella
  misc_feature (1)..(167): Homolog of NCBI NO: 11466429 NR Description: septum-site determining protein [Mesostigma
  misc_feature (1)..(174): Homolog of NCBI NO: 34897748 NR Description: Similar to Chlorella vulgaris C-27 chloroplast
  misc_feature (1)..(174): Homolog of NCBI NO: 9971822 NR Description: minD [Tagetes erecta]
  misc_feature (1)..(174): Homolog of NCBI NO: 15237874 NR Description: septum site-determining MinD (dbj|BAA90261.1)
MGFGGKALEWLVDALKTRPEGSPDFIIIDCPAGIDAGFITAITPANEAVLVTTPDITALRDADRVTGLLECDGIRDIKMIVNRVRTDMIKGEDMMSVLDVQEMLGLSLLGVIPEDSEVIRSTNRGFPLVLNKPPTLAGLAFEQAAWRLVEQDSMKAVMVEEEPKKRGFFSFFGG

SEQ ID NO: 25911 - DNA, 778 bp, Arabidopsis thaliana
  misc_feature (1)..(778): Ceres Seq. ID no. 12602659
  misc_feature: MA Experiment ID: 108434 Result: Up-regulated in Transcription
  misc_feature: MA Experiment 108434 PARAMETER Experiment Name: At_Root_Tips_cDNA_P Parameter: Tissue Value: Root Tips
  misc_feature: MA Experiment ID: 108463 Result: Down-regulated in Transcription
  misc_feature: MA Experiment 108463 PARAMETER Experiment Name: At_Germinating_Seeds_cDNA_P Parameter: Age (day) Value: 3 vs. 0
  misc_feature: MA Experiment 108463 PARAMETER Experiment Name: At_Germinating_Seeds_cDNA_P Parameter: Tissue Value: Germinating Seeds
  misc_feature: MA Experiment ID: 108464 Result: Down-regulated in Transcription
  misc_feature: MA Experiment 108464 PARAMETER Experiment Name: At_Germinating_Seeds_cDNA_P Parameter: Age (day) Value: 4 vs. 0
  misc_feature: MA Experiment 108464 PARAMETER Experiment Name: At_Germinating_Seeds_cDNA_P Parameter: Tissue Value: Germinating Seeds
  misc_feature: MA Experiment ID: 108573 Result: Down-regulated in Transcription
  misc_feature: MA Experiment 108573 PARAMETER Experiment Name: At_Drought_cDNA_P Parameter: Timepoint (hr) Value: 6
  misc_feature: MA Experiment 108573 PARAMETER Experiment Name: At_Drought_cDNA_P Parameter: Tissue Value: Aerial
  misc_feature: MA Experiment 108573 PARAMETER Experiment Name: At_Drought_cDNA_P Parameter: Treatment Value: Drought vs. No Drought
  misc_feature: MA Experiment ID: 20000328 Result: Up-regulated in Transcription
  misc_feature: MA Experiment 20000328 PARAMETER Experiment Name: At_42deg_Heat_Sub_P Parameter: Age (day) Value: 14
  misc_feature: MA Experiment 20000328 PARAMETER Experiment Name: At_42deg_Heat_Sub_P Parameter: Organism Value: A. thaliana
  misc_feature: MA Experiment 20000328 PARAMETER Experiment Name: At_42deg_Heat_Sub_P Parameter: Plant Line Value: WS
  misc_feature: MA Experiment 20000328 PARAMETER Experiment Name: At_42deg_Heat_Sub_P Parameter: Temperature (deg C) Value: 42 vs. 22
  misc_feature: MA Experiment 20000328 PARAMETER Experiment Name: At_42deg_Heat_Sub_P Parameter: Timepoint (hr) Value: 6
  misc_feature: MA Experiment 20000328 PARAMETER Experiment Name: At_42deg_Heat_Sub_P Parameter: Tissue Value: Aerial
  misc_feature: MA Experiment ID: 20000355 Result: Up-regulated in Transcription
  misc_feature: MA Experiment 20000355 PARAMETER Experiment Name: At_Siliques_Sub_P Parameter: Age (day) Value: 21
  misc_feature: MA Experiment 20000355 PARAMETER Experiment Name: At_Siliques_Sub_P Parameter: Organism Value: A. thaliana
  misc_feature: MA Experiment 20000355 PARAMETER Experiment Name: At_Siliques_Sub_P Parameter: Plant Line Value: WS
  misc_feature: MA Experiment 20000355 PARAMETER Experiment Name: At_Siliques_Sub_P Parameter: Tissue Value: Less Than 5mm Siliques vs. Whole Plant
acgttcctcatcttccaaaaaaccctaaaagctcatttcgcagctgcctccttttcgtttgccactttttgatcaagcgaaactccaaaacacagagccatgccgccgaagttggacccgagccagatcgtcgatgtgtacgtccgtgtaaccggaggagaagtgggagccgccagttctctagctccaaagatcggtcctctcggtctcgcaccaaagaagatcggagaagacatcgcgaaagagacggccaaagaatggaaaggacttcgtgtcaccgtgaagctgacggttcagaatcgtcaagctaaggtaaccgtggttccatctgctgcagctctcgtcatcaaggcgttgaaggagccagagagagaccgtaagaaggtgaagaacattaagcataacggtaacatctctttcgatgatgtgactgagattgctaggattatgaggcctagatctattgctaaggagctgagtgggactgtgagggagattcttggaacgtgtgtctctgtgggatgcactgttgatgggaaagaccctaaggatcttcagcaggagattcaagaaggtgagattgagattcctgagaattaaggaacaatggagtttttttttcttcttatgggaatttgaaatgcttctgttgttatctttctcgttttaccatattttgtttttgtttgggaacttagctgctatgatgtttcacttagaatgactctcaagttttggattcttattattctctgtttcaaaaccccaatggttctcc

SEQ ID NO: 25912 - protein, 166 aa, Arabidopsis thaliana
  peptide (1)..(166): Ceres Seq. ID no. 12602660
  misc_feature (76)..(144): Pfam Name: Ribosomal protein L11, RNA binding domain Pfam Description: Ribosomal protein L11, RNA binding domain
  misc_feature (1)..(164): Homolog of NCBI NO: 17864452 NR Description: Ribosomal protein L12 CG3195-PA
  misc_feature (1)..(164): Homolog of NCBI NO: 31235341 NR Description: ENSANGP00000019214 [Anopheles gambiae]
  misc_feature (1)..(165): Homolog of NCBI NO: 19075397 NR Description: 60s ribosomal protein l12 [Schizosaccharomyces
  misc_feature (1)..(142): Homolog of NCBI NO: 3986695 NR Description: ribosomal protein L12 [Cichorium intybus]
  misc_feature (1)..(164): Homolog of NCBI NO: 6094002 NR Description: 60S RIBOSOMAL PROTEIN L12
  misc_feature (1)..(164): Homolog of NCBI NO: 38567975 NR Description: OSJNBa0093F12.16 [Oryza sativa (japonica
  misc_feature (1)..(166): Homolog of NCBI NO: 40287508 NR Description: 60S ribosomal protein L12 [Capsicum annuum]
  misc_feature (1)..(164): Homolog of NCBI NO: 15239409 NR Description: 60S ribosomal protein L12 - like
  misc_feature (1)..(166): Homolog of NCBI NO: 15228098 NR Description: 60S ribosomal protein L12
  misc_feature (1)..(166): Homolog of NCBI NO: 15231814 NR Description: 60S RIBOSOMAL PROTEIN L12 -like; protein id:
MPPKLDPSQIVDVYVRVTGGEVGAASSLAPKIGPLGLAPKKIGEDIAKETAKEWKGLRVTVKLTVQNRQAKVTVVPSAAALVIKALKEPERDRKKVKNIKHNGNISFDDVTEIARIMRPRSIAKELSGTVREILGTCVSVGCTVDGKDPKDLQQEIQEGEIEIPEN

SEQ ID NO: 25913 - protein, 102 aa, Arabidopsis thaliana
  peptide (1)..(102): Ceres Seq. ID no. 12602661
VPHLPKNPKSSFRSCLLFVCHFLIKRNSKTQSHAAEVGPEPDRRCVRPCNRRRSGSRQFSSSKDRSSRSRTKEDRRRHRERDGQRMERTSCHREADGSESSS

SEQ ID NO: 25914 - DNA, 1022 bp, Arabidopsis thaliana
  misc_feature (1)..(1022): Ceres Seq. ID no. 12327118
  misc_feature: MA Experiment ID: 108435 Result: Up-regulated in Transcription
  misc_feature: MA Experiment 108435 PARAMETER Experiment Name: At_stm_Mutants_cDNA_P Parameter: Plant Line Value: wt Landsburg vs stm
  misc_feature: MA Experiment 108435 PARAMETER Experiment Name: At_stm_Mutants_cDNA_P Parameter: Tissue Value: Shoot Apical Meristem Region
  misc_feature: MA Experiment ID: 108488 Result: Down-regulated in Transcription
  misc_feature: MA Experiment ID: 108501 Result: Down-regulated in Transcription
  misc_feature: MA Experiment 108501 PARAMETER Experiment Name: At_ap2_floral_buds_cDNA_P Parameter: Plant Line Value: ap2 (Ler.)
  misc_feature: MA Experiment 108501 PARAMETER Experiment Name: At_ap2_floral_buds_cDNA_P Parameter: Tissue Value: Closed Flower
  misc_feature: MA Experiment ID: 108561 Result: Up-regulated in Transcription
  misc_feature: MA Experiment 108561 PARAMETER Experiment Name: At_100uM_ABA_cDNA_P Parameter: Timepoint (hr) Value: 6
  misc_feature: MA Experiment 108561 PARAMETER Experiment Name: At_100uM_ABA_cDNA_P Parameter: Tissue Value: Aerial
  misc_feature: MA Experiment 108561 PARAMETER Experiment Name: At_100uM_ABA_cDNA_P Parameter: Treatment Value: 100uM ABA vs. No Treatment
  misc_feature: MA Experiment ID: 108572 Result: Up-regulated in Transcription
  misc_feature: MA Experiment 108572 PARAMETER Experiment Name: At_Drought_cDNA_P Parameter: Timepoint (hr) Value: 1
  misc_feature: MA Experiment 108572 PARAMETER Experiment Name: At_Drought_cDNA_P Parameter: Tissue Value: Aerial
  misc_feature: MA Experiment 108572 PARAMETER Experiment Name: At_Drought_cDNA_P Parameter: Treatment Value: Drought vs. No Drought
  misc_feature: MA Experiment ID: 108573 Result: Up-regulated in Transcription
  misc_feature: MA Experiment 108573 PARAMETER Experiment Name: At_Drought_cDNA_P Parameter: Timepoint (hr) Value: 6
  misc_feature: MA Experiment 108573 PARAMETER Experiment Name: At_Drought_cDNA_P Parameter: Tissue Value: Aerial
  misc_feature: MA Experiment 108573 PARAMETER Experiment Name: At_Drought_cDNA_P Parameter: Treatment Value: Drought vs. No Drought
  misc_feature: MA Experiment ID: 108577 Result: Up-regulated in Transcription
  misc_feature: MA Experiment 108577 PARAMETER Experiment Name: At_42deg_Heat_cDNA_P Parameter: Temperature (deg C) Value: 42 vs. 22
  misc_feature: MA Experiment 108577 PARAMETER Experiment Name: At_42deg_Heat_cDNA_P Parameter: Timepoint (hr) Value: 6
  misc_feature: MA Experiment 108577 PARAMETER Experiment Name: At_42deg_Heat_cDNA_P Parameter: Tissue Value: Aerial
  misc_feature: MA Experiment ID: 108585 Result: Up-regulated in Transcription
  misc_feature: MA Experiment 108585 PARAMETER Experiment Name: At_5mM_NaNP_cDNA_P Parameter: Timepoint (hr) Value: 6
  misc_feature: MA Experiment 108585 PARAMETER Experiment Name: At_5mM_NaNP_cDNA_P Parameter: Tissue Value: Aerial
  misc_feature: MA Experiment 108585 PARAMETER Experiment Name: At_5mM_NaNP_cDNA_P Parameter: Treatment Value: null
  misc_feature: MA Experiment ID: 108594 Result: Down-regulated in Transcription
  misc_feature: MA Experiment 108594 PARAMETER Experiment Name: At_Ler-rhl_Root_cDNA_P Parameter: Plant Line Value: null
  misc_feature: MA Experiment ID: 108595 Result: Up-regulated in Transcription
  misc_feature: MA Experiment 108595 PARAMETER Experiment Name: At_Ler-pi_Ovule_cDNA_P Parameter: Plant Line Value: null
  misc_feature: MA Experiment ID: 108605 Result: Up-regulated in Transcription
  misc_feature: MA Experiment 108605 PARAMETER Experiment Name: At_100uM_ABA_cDNA_P Parameter: Timepoint (hr) Value: 6
  misc_feature: MA Experiment 108605 PARAMETER Experiment Name: At_100uM_ABA_cDNA_P Parameter: Tissue Value: Aerial
  misc_feature: MA Experiment 108605 PARAMETER Experiment Name: At_100uM_ABA_cDNA_P Parameter: Treatment Value: 100uM ABA vs. No Treatment
  misc_feature: MA Experiment ID: 108607 Result: Up-regulated in Transcription
  misc_feature: MA Experiment 108607 PARAMETER Experiment Name: At_100uM_ABA_cDNA_P Parameter: Timepoint (hr) Value: 4
  misc_feature: MA Experiment 108607 PARAMETER Experiment Name: At_100uM_ABA_cDNA_P Parameter: Tissue Value: Aerial
  misc_feature: MA Experiment 108607 PARAMETER Experiment Name: At_100uM_ABA_cDNA_P Parameter: Treatment Value: 100uM ABA vs. No Treatment
  misc_feature: MA Experiment ID: 20000070 Result: Up-regulated in Transcription
  misc_feature: MA Experiment 20000070 PARAMETER Experiment Name: At_100uM_ABA_Mutants_cDNA_P Parameter: Plant Line Value: CS24
  misc_feature: MA Experiment 20000070 PARAMETER Experiment Name: At_100uM_ABA_Mutants_cDNA_P Parameter: Timepoint (hr) Value: 6
  misc_feature: MA Experiment 20000070 PARAMETER Experiment Name: At_100uM_ABA_Mutants_cDNA_P Parameter: Tissue Value: Aerial
  misc_feature: MA Experiment 20000070 PARAMETER Experiment Name: At_100uM_ABA_Mutants_cDNA_P Parameter: Treatment Value: 100uM ABA vs. No Treatment
  misc_feature: MA Experiment ID: 20000072 Result: Up-regulated in Transcription
  misc_feature: MA Experiment 20000072 PARAMETER Experiment Name: At_100uM_ABA_Mutants_cDNA_P Parameter: Plant Line Value: CS8105
  misc_feature: MA Experiment 20000072 PARAMETER Experiment Name: At_100uM_ABA_Mutants_cDNA_P Parameter: Timepoint (hr) Value: 6
  misc_feature: MA Experiment 20000072 PARAMETER Experiment Name: At_100uM_ABA_Mutants_cDNA_P Parameter: Tissue Value: Aerial
  misc_feature: MA Experiment 20000072 PARAMETER Experiment Name: At_100uM_ABA_Mutants_cDNA_P Parameter: Treatment Value: 100uM ABA vs. No Treatment
  misc_feature: MA Experiment ID: 20000088 Result: Up-regulated in Transcription
  misc_feature: MA Experiment 20000088 PARAMETER Experiment Name: At_100uM_ABA_Mutants_cDNA_P Parameter: Plant Line Value: Landsberg
  misc_feature: MA Experiment 20000088 PARAMETER Experiment Name: At_100uM_ABA_Mutants_cDNA_P Parameter: Timepoint (hr) Value: 6
  misc_feature: MA Experiment 20000088 PARAMETER Experiment Name: At_100uM_ABA_Mutants_cDNA_P Parameter: Tissue Value: Aerial
  misc_feature: MA Experiment 20000088 PARAMETER Experiment Name: At_100uM_ABA_Mutants_cDNA_P Parameter: Treatment Value: 100uM ABA vs. No Treatment
  misc_feature: MA Experiment ID: 20000112 Result: Up-regulated in Transcription
  misc_feature: MA Experiment 20000112 PARAMETER Experiment Name: At_42deg_Heat_cDNA_P Parameter: Temperature (deg C) Value: 42 vs. 22
  misc_feature: MA Experiment 20000112 PARAMETER Experiment Name: At_42deg_Heat_cDNA_P Parameter: Timepoint (hr) Value: 2
  misc_feature: MA Experiment 20000112 PARAMETER Experiment Name: At_42deg_Heat_cDNA_P Parameter: Tissue Value: Aerial
  misc_feature: MA Experiment ID: 20000166 Result: Up-regulated in Transcription
  misc_feature: MA Experiment 20000166 PARAMETER Experiment Name: At_100uM_ABA_P Parameter: Age (day) Value: 14
  misc_feature: MA Experiment 20000166 PARAMETER Experiment Name: At_100uM_ABA_P Parameter: Organism Value: A. thaliana
  misc_feature: MA Experiment 20000166 PARAMETER Experiment Name: At_100uM_ABA_P Parameter: Plant Line Value: WS
  misc_feature: MA Experiment 20000166 PARAMETER Experiment Name: At_100uM_ABA_P Parameter: Timepoint (hr) Value: 1
  misc_feature: MA Experiment 20000166 PARAMETER Experiment Name: At_100uM_ABA_P Parameter: Tissue Value: Aerial
  misc_feature: MA Experiment 20000166 PARAMETER Experiment Name: At_100uM_ABA_P Parameter: Treatment Value: 100uM ABA vs. No Treatment
  misc_feature: MA Experiment ID: 20000169 Result: Up-regulated in Transcription
  misc_feature: MA Experiment 20000169 PARAMETER Experiment Name: At_100uM_ABA_P Parameter: Age (day) Value: 14
  misc_feature: MA Experiment 20000169 PARAMETER Experiment Name: At_100uM_ABA_P Parameter: Organism Value: A. thaliana
  misc_feature: MA Experiment 20000169 PARAMETER Experiment Name: At_100uM_ABA_P Parameter: Plant Line Value: WS
  misc_feature: MA Experiment 20000169 PARAMETER Experiment Name: At_100uM_ABA_P Parameter: Timepoint (hr) Value: 6
  misc_feature: MA Experiment 20000169 PARAMETER Experiment Name: At_100uM_ABA_P Parameter: Tissue Value: Aerial
  misc_feature: MA Experiment 20000169 PARAMETER Experiment Name: At_100uM_ABA_P Parameter: Treatment Value: 100uM ABA vs. No Treatment
  misc_feature: MA Experiment ID: 20000214 Result: Down-regulated in Transcription
  misc_feature: MA Experiment 20000214 PARAMETER Experiment Name: At_4deg_Cold_P Parameter: Timepoint (hr) Value: 6
  misc_feature: MA Experiment ID: 20000224 Result: Down-regulated in Transcription
  misc_feature: MA Experiment ID: 20000227 Result: Up-regulated in Transcription
  misc_feature: MA Experiment 20000227 PARAMETER Experiment Name: At_Root-Tips-vs-Tops_P Parameter: Tissue Value: Root Tips vs. Root Tops
  misc_feature: MA Experiment ID: 20000265 Result: Up-regulated in Transcription
  misc_feature: MA Experiment 20000265 PARAMETER Experiment Name: At_Open_Flower_P Parameter: Age (day) Value: 21
  misc_feature: MA Experiment 20000265 PARAMETER Experiment Name: At_Open_Flower_P Parameter: Plant Line Value: WS
  misc_feature: MA Experiment 20000265 PARAMETER Experiment Name: At_Open_Flower_P Parameter: Tissue Value: Closed Flower vs. Whole Plant
  misc_feature: MA Experiment ID: 20000267 Result: Up-regulated in Transcription
  misc_feature: MA Experiment 20000267 PARAMETER Experiment Name: At_Drought_P Parameter: Age (day) Value: 7
  misc_feature: MA Experiment 20000267 PARAMETER Experiment Name: At_Drought_P Parameter: Organism Value: A. thaliana
  misc_feature: MA Experiment 20000267 PARAMETER Experiment Name: At_Drought_P Parameter: Plant Line Value: WS
  misc_feature: MA Experiment 20000267 PARAMETER Experiment Name: At_Drought_P Parameter: Timepoint (hr) Value: 6
  misc_feature: MA Experiment 20000267 PARAMETER Experiment Name: At_Drought_P Parameter: Tissue Value: Whole Plant
  misc_feature: MA Experiment 20000267 PARAMETER Experiment Name: At_Drought_P Parameter: Treatment Value: Drought vs. No Drought
  misc_feature: MA Experiment ID: 20000436 Result: Up-regulated in Transcription
  misc_feature: MA Experiment 20000436 PARAMETER Experiment Name: At_Drought_P Parameter: Age (day) Value: 7
  misc_feature: MA Experiment 20000436 PARAMETER Experiment Name: At_Drought_P Parameter: Organism Value: A. thaliana
  misc_feature: MA Experiment 20000436 PARAMETER Experiment Name: At_Drought_P Parameter: Plant Line Value: WS
  misc_feature: MA Experiment 20000436 PARAMETER Experiment Name: At_Drought_P Parameter: Timepoint (hr) Value: 12
  misc_feature: MA Experiment 20000436 PARAMETER Experiment Name: At_Drought_P Parameter: Tissue Value: Whole Plant
  misc_feature: MA Experiment 20000436 PARAMETER Experiment Name: At_Drought_P Parameter: Treatment Value: Drought vs. No Drought
  misc_feature: MA Experiment ID: 20000437 Result: Up-regulated in Transcription
  misc_feature: MA Experiment 20000437 PARAMETER Experiment Name: At_Drought_P Parameter: Age (day) Value: 8
  misc_feature: MA Experiment 20000437 PARAMETER Experiment Name: At_Drought_P Parameter: Organism Value: A. thaliana
  misc_feature: MA Experiment 20000437 PARAMETER Experiment Name: At_Drought_P Parameter: Plant Line Value: WS
  misc_feature: MA Experiment 20000437 PARAMETER Experiment Name: At_Drought_P Parameter: Timepoint (hr) Value: 24
  misc_feature: MA Experiment 20000437 PARAMETER Experiment Name: At_Drought_P Parameter: Tissue Value: Whole Plant
  misc_feature: MA Experiment 20000437 PARAMETER Experiment Name: At_Drought_P Parameter: Treatment Value: Drought vs. No Drought
  misc_feature: MA Experiment ID: 20000441 Result: Down-regulated in Transcription
  misc_feature: MA Experiment 20000441 PARAMETER Experiment Name: At_1uM_BR-BRZ__P Parameter: Tissue Value: Shoot Apices
  misc_feature: MA Experiment 20000441 PARAMETER Experiment Name: At_1uM_BR-BRZ__P Parameter: Treatment Value: 1uM BR vs. No Treatment
  misc_feature: MA Experiment ID: 20000443 Result: Down-regulated in Transcription
  misc_feature: MA Experiment 20000443 PARAMETER Experiment Name: At_1uM_BR-BRZ__P Parameter: Tissue Value: Shoot Apices
  misc_feature: MA Experiment 20000443 PARAMETER Experiment Name: At_1uM_BR-BRZ__P Parameter: Treatment Value: 1uM BRZ vs. No Treatment
  misc_feature: MA Experiment ID: 20000453 Result: Up-regulated in Transcription
  misc_feature: MA Experiment 20000453 PARAMETER Experiment Name: At_100uM_ABA_P Parameter: Age (day) Value: 15
  misc_feature: MA Experiment 20000453 PARAMETER Experiment Name: At_100uM_ABA_P Parameter: Organism Value: A. thaliana
  misc_feature: MA Experiment 20000453 PARAMETER Experiment Name: At_100uM_ABA_P Parameter: Plant Line Value: WS
  misc_feature: MA Experiment 20000453 PARAMETER Experiment Name: At_100uM_ABA_P Parameter: Timepoint (hr) Value: 24
  misc_feature: MA Experiment 20000453 PARAMETER Experiment Name: At_100uM_ABA_P Parameter: Tissue Value: Aerial
  misc_feature: MA Experiment 20000453 PARAMETER Experiment Name: At_100uM_ABA_P Parameter: Treatment Value: 100uM ABA vs. No Treatment
  misc_feature: MA Experiment ID: 20000455 Result: Up-regulated in Transcription
  misc_feature: MA Experiment 20000455 PARAMETER Experiment Name: At_100uM_ABA_P Parameter: Age (day) Value: 16
  misc_feature: MA Experiment 20000455 PARAMETER Experiment Name: At_100uM_ABA_P Parameter: Organism Value: A. thaliana
  misc_feature: MA Experiment 20000455 PARAMETER Experiment Name: At_100uM_ABA_P Parameter: Plant Line Value: WS
  misc_feature: MA Experiment 20000455 PARAMETER Experiment Name: At_100uM_ABA_P Parameter: Timepoint (hr) Value: 48
  misc_feature: MA Experiment 20000455 PARAMETER Experiment Name: At_100uM_ABA_P Parameter: Tissue Value: Aerial
  misc_feature: MA Experiment 20000455 PARAMETER Experiment Name: At_100uM_ABA_P Parameter: Treatment Value: 100uM ABA vs. No Treatment
  misc_feature: MA Experiment ID: 20000456 Result: Down-regulated in Transcription
  misc_feature: MA Experiment 20000456 PARAMETER Experiment Name: At_100uM_BA_P Parameter: Age (day) Value: 14
  misc_feature: MA Experiment 20000456 PARAMETER Experiment Name: At_100uM_BA_P Parameter: Organism Value: A. thaliana
  misc_feature: MA Experiment 20000456 PARAMETER Experiment Name: At_100uM_BA_P Parameter: Plant Line Value: WS
  misc_feature: MA Experiment 20000456 PARAMETER Experiment Name: At_100uM_BA_P Parameter: Timepoint (hr) Value: 6
  misc_feature: MA Experiment 20000456 PARAMETER Experiment Name: At_100uM_BA_P Parameter: Tissue Value: Aerial
  misc_feature: MA Experiment 20000456 PARAMETER Experiment Name: At_100uM_BA_P Parameter: Treatment Value: 100uM BA vs. No Treatment
  misc_feature: MA Experiment ID: 20000460 Result: Down-regulated in Transcription
  misc_feature: MA Experiment 20000460 PARAMETER Experiment Name: At_10percent_PEG_P Parameter: Age (day) Value: 12
  misc_feature: MA Experiment 20000460 PARAMETER Experiment Name: At_10percent_PEG_P Parameter: Organism Value: A. thaliana
  misc_feature: MA Experiment 20000460 PARAMETER Experiment Name: At_10percent_PEG_P Parameter: Plant Line Value: WS
  misc_feature: MA Experiment 20000460 PARAMETER Experiment Name: At_10percent_PEG_P Parameter: Timepoint (day) Value: 12
  misc_feature: MA Experiment 20000460 PARAMETER Experiment Name: At_10percent_PEG_P Parameter: Tissue Value: Whole Plant
  misc_feature: MA Experiment 20000460 PARAMETER Experiment Name: At_10percent_PEG_P Parameter: Treatment Value: 10percent PEG vs. No Treatment
  misc_feature: MA Experiment ID: 20000527 Result: Down-regulated in Transcription
  misc_feature: MA Experiment 20000527 PARAMETER Experiment Name: At_10percent_PEG_P Parameter: Age (day) Value: 20
  misc_feature: MA Experiment 20000527 PARAMETER Experiment Name: At_10percent_PEG_P Parameter: Organism Value: A. thaliana
  misc_feature: MA Experiment 20000527 PARAMETER Experiment Name: At_10percent_PEG_P Parameter: Plant Line Value: WS
  misc_feature: MA Experiment 20000527 PARAMETER Experiment Name: At_10percent_PEG_P Parameter: Timepoint (day) Value: 20
  misc_feature: MA Experiment 20000527 PARAMETER Experiment Name: At_10percent_PEG_P Parameter: Tissue Value: Whole Plant
  misc_feature: MA Experiment 20000527 PARAMETER Experiment Name: At_10percent_PEG_P Parameter: Treatment Value: 10percent PEG vs. No Treatment
  misc_feature: MA Experiment ID: 20000576 Result: Down-regulated in Transcription
  misc_feature: MA Experiment 20000576 PARAMETER Experiment Name: At_100uM_ABA_Mutants__P Parameter: Organism Value: A. thaliana
  misc_feature: MA Experiment 20000576 PARAMETER Experiment Name: At_100uM_ABA_Mutants__P Parameter: Plant Line Value: CS23
  misc_feature: MA Experiment 20000576 PARAMETER Experiment Name: At_100uM_ABA_Mutants__P Parameter: Timepoint (hr) Value: 6
  misc_feature: MA Experiment 20000576 PARAMETER Experiment Name: At_100uM_ABA_Mutants__P Parameter: Tissue Value: Whole Plant
  misc_feature: MA Experiment 20000576 PARAMETER Experiment Name: At_100uM_ABA_Mutants__P Parameter: Treatment Value: 1uM ABA vs. No Treatment
  misc_feature: MA Experiment ID: 20000709 Result: Down-regulated in Transcription
  misc_feature: MA Experiment 20000709 PARAMETER Experiment Name: At_15mM_NH4NO3_L-to-H_P Parameter: Age (hr) Value: 14
  misc_feature: MA Experiment 20000709 PARAMETER Experiment Name: At_15mM_NH4NO3_L-to-H_P Parameter: Organism Value: A. thaliana
  misc_feature: MA Experiment 20000709 PARAMETER Experiment Name: At_15mM_NH4NO3_L-to-H_P Parameter: Plant Line Value: WS
  misc_feature: MA Experiment 20000709 PARAMETER Experiment Name: At_15mM_NH4NO3_L-to-H_P Parameter: Timepoint (hr) Value: 4
  misc_feature: MA Experiment 20000709 PARAMETER Experiment Name: At_15mM_NH4NO3_L-to-H_P Parameter: Tissue Value: Aerial
  misc_feature: MA Experiment 20000709 PARAMETER Experiment Name: At_15mM_NH4NO3_L-to-H_P Parameter: Treatment Value: 15mM NH4NO3 vs. 30mM Mannitol
  misc_feature: MA Experiment ID: 20000794 Result: Up-regulated in Transcription
  misc_feature: MA Experiment 20000794 PARAMETER Experiment Name: At_Petals_P Parameter: Age (day) Value: 23-25 days
  misc_feature: MA Experiment 20000794 PARAMETER Experiment Name: At_Petals_P Parameter: Plant Line Value: WS
  misc_feature: MA Experiment 20000794 PARAMETER Experiment Name: At_Petals_P Parameter: Tissue Value: Petals vs. Whole plant
  misc_feature: MA Experiment ID: 20001247 Result: Up-regulated in Transcription
  misc_feature: MA Experiment 20001247 PARAMETER Experiment Name: At_Far-red-induction_P Parameter: Age (day) Value: 7
  misc_feature: MA Experiment 20001247 PARAMETER Experiment Name: At_Far-red-induction_P Parameter: Light Value: Far-red vs. White
  misc_feature: MA Experiment 20001247 PARAMETER Experiment Name: At_Far-red-induction_P Parameter: Organism Value: A. thaliana
  misc_feature: MA Experiment 20001247 PARAMETER Experiment Name: At_Far-red-induction_P Parameter: Plant Line Value: Columbia
  misc_feature: MA Experiment 20001247 PARAMETER Experiment Name: At_Far-red-induction_P Parameter: Timepoint (hr) Value: 1
  misc_feature: MA Experiment 20001247 PARAMETER Experiment Name: At_Far-red-induction_P Parameter: Tissue Value: Whole Plant
  misc_feature: MA Experiment ID: 20001248 Result: Up-regulated in Transcription
  misc_feature: MA Experiment 20001248 PARAMETER Experiment Name: At_Far-red-induction_P Parameter: Age (day) Value: 7
  misc_feature: MA Experiment 20001248 PARAMETER Experiment Name: At_Far-red-induction_P Parameter: Light Value: Far-red vs. White
  misc_feature: MA Experiment 20001248 PARAMETER Experiment Name: At_Far-red-induction_P Parameter: Organism Value: A. thaliana
  misc_feature: MA Experiment 20001248 PARAMETER Experiment Name: At_Far-red-induction_P Parameter: Plant Line Value: Columbia
  misc_feature: MA Experiment 20001248 PARAMETER Experiment Name: At_Far-red-induction_P Parameter: Timepoint (hr) Value: 4
  misc_feature: MA Experiment 20001248 PARAMETER Experiment Name: At_Far-red-induction_P Parameter: Tissue Value: Whole Plant
  misc_feature: MA Experiment ID: 20001450 Result: Up-regulated in Transcription
  misc_feature: MA Experiment 20001450 PARAMETER Experiment Name: At_Far-red-induction_P Parameter: Age (day) Value: 7
  misc_feature: MA Experiment 20001450 PARAMETER Experiment Name: At_Far-red-induction_P Parameter: Light Value: Far-red vs. White
  misc_feature: MA Experiment 20001450 PARAMETER Experiment Name: At_Far-red-induction_P Parameter: Organism Value: A. thaliana
  misc_feature: MA Experiment 20001450 PARAMETER Experiment Name: At_Far-red-induction_P Parameter: Plant Line Value: Columbia
  misc_feature: MA Experiment 20001450 PARAMETER Experiment Name: At_Far-red-induction_P Parameter: Timepoint (hr) Value: 8
  misc_feature: MA Experiment 20001450 PARAMETER Experiment Name: At_Far-red-induction_P Parameter: Tissue Value: Whole Plant
  misc_feature: MA Experiment ID: 20001451 Result: Up-regulated in Transcription
  misc_feature: MA Experiment 20001451 PARAMETER Experiment Name: At_Far-red-induction_P Parameter: Age (day) Value: 7
  misc_feature: MA Experiment 20001451 PARAMETER Experiment Name: At_Far-red-induction_P Parameter: Light Value: Far-red vs. White
  misc_feature: MA Experiment 20001451 PARAMETER Experiment Name: At_Far-red-induction_P Parameter: Organism Value: A. thaliana
  misc_feature: MA Experiment 20001451 PARAMETER Experiment Name: At_Far-red-induction_P Parameter: Plant Line Value: Columbia
  misc_feature: MA Experiment 20001451 PARAMETER Experiment Name: At_Far-red-induction_P Parameter: Timepoint (hr) Value: 24
  misc_feature: MA Experiment 20001451 PARAMETER Experiment Name: At_Far-red-induction_P Parameter: Tissue Value: Whole Plant
  misc_feature: MA Experiment ID: 20001554 Result: Up-regulated in Transcription
  misc_feature: MA Experiment 20001554 PARAMETER Experiment Name: At_Drought_Soil_Dry_P Parameter: Age (day) Value: 21
  misc_feature: MA Experiment 20001554 PARAMETER Experiment Name: At_Drought_Soil_Dry_P Parameter: Organism Value: A. thaliana
  misc_feature: MA Experiment 20001554 PARAMETER Experiment Name: At_Drought_Soil_Dry_P Parameter: Plant Line Value: WS
  misc_feature: MA Experiment 20001554 PARAMETER Experiment Name: At_Drought_Soil_Dry_P Parameter: Post Timepoint (hr) Value: None
  misc_feature: MA Experiment 20001554 PARAMETER Experiment Name: At_Drought_Soil_Dry_P Parameter: Post-Treatment Value: None
  misc_feature: MA Experiment 20001554 PARAMETER Experiment Name: At_Drought_Soil_Dry_P Parameter: Timepoint (day) Value: 7
  misc_feature: MA Experiment 20001554 PARAMETER Experiment Name: At_Drought_Soil_Dry_P Parameter: Treatment Value: Drought vs. No Drought
  misc_feature: MA Experiment ID: 20001555 Result: Up-regulated in Transcription
  misc_feature: MA Experiment 20001555 PARAMETER Experiment Name: At_Drought_Soil_Dry_P Parameter: Age (day) Value: 24
  misc_feature: MA Experiment 20001555 PARAMETER Experiment Name: At_Drought_Soil_Dry_P Parameter: Organism Value: A. thaliana
  misc_feature: MA Experiment 20001555 PARAMETER Experiment Name: At_Drought_Soil_Dry_P Parameter: Plant Line Value: WS
  misc_feature: MA Experiment 20001555 PARAMETER Experiment Name: At_Drought_Soil_Dry_P Parameter: Post Timepoint (hr) Value: None
  misc_feature: MA Experiment 20001555 PARAMETER Experiment Name: At_Drought_Soil_Dry_P Parameter: Post-Treatment Value: None
  misc_feature: MA Experiment 20001555 PARAMETER Experiment Name: At_Drought_Soil_Dry_P Parameter: Timepoint (day) Value: 10
  misc_feature: MA Experiment 20001555 PARAMETER Experiment Name: At_Drought_Soil_Dry_P Parameter: Treatment Value: Drought vs. No Drought
  misc_feature: MA Experiment ID: 20001556 Result: Up-regulated in Transcription
  misc_feature: MA Experiment 20001556 PARAMETER Experiment Name: At_Drought_Soil_Dry_P Parameter: Age (day) Value: 26
  misc_feature: MA Experiment 20001556 PARAMETER Experiment Name: At_Drought_Soil_Dry_P Parameter: Organism Value: A. thaliana
  misc_feature: MA Experiment 20001556 PARAMETER Experiment Name: At_Drought_Soil_Dry_P Parameter: Plant Line Value: WS
  misc_feature: MA Experiment 20001556 PARAMETER Experiment Name: At_Drought_Soil_Dry_P Parameter: Post Timepoint (hr) Value: None
  misc_feature: MA Experiment 20001556 PARAMETER Experiment Name: At_Drought_Soil_Dry_P Parameter: Post-Treatment Value: None
  misc_feature: MA Experiment 20001556 PARAMETER Experiment Name: At_Drought_Soil_Dry_P Parameter: Timepoint (day) Value: 12
  misc_feature: MA Experiment 20001556 PARAMETER Experiment Name: At_Drought_Soil_Dry_P Parameter: Treatment Value: Drought vs. No Drought
  misc_feature: MA Experiment ID: 20001557 Result: Up-regulated in Transcription
  misc_feature: MA Experiment 20001557 PARAMETER Experiment Name: At_Drought_Soil_Dry_P Parameter: Age (day) Value: 27
  misc_feature: MA Experiment 20001557 PARAMETER Experiment Name: At_Drought_Soil_Dry_P Parameter: Organism Value: A. thaliana
  misc_feature: MA Experiment 20001557 PARAMETER Experiment Name: At_Drought_Soil_Dry_P Parameter: Plant Line Value: WS
  misc_feature: MA Experiment 20001557 PARAMETER Experiment Name: At_Drought_Soil_Dry_P Parameter: Post Timepoint (hr) Value: 3
  misc_feature: MA Experiment 20001557 PARAMETER Experiment Name: At_Drought_Soil_Dry_P Parameter: Post-Treatment Value: Re-Water vs. No Drought
  misc_feature: MA Experiment 20001557 PARAMETER Experiment Name: At_Drought_Soil_Dry_P Parameter: Timepoint (day) Value: 13
  misc_feature: MA Experiment 20001557 PARAMETER Experiment Name: At_Drought_Soil_Dry_P Parameter: Treatment Value: Drought vs. No Drought
  misc_feature: MA Experiment ID: 20001558 Result: Up-regulated in Transcription
  misc_feature: MA Experiment 20001558 PARAMETER Experiment Name: At_Drought_Soil_Dry_P Parameter: Age (day) Value: 27
  misc_feature: MA Experiment 20001558 PARAMETER Experiment Name: At_Drought_Soil_Dry_P Parameter: Organism Value: A. thaliana
  misc_feature: MA Experiment 20001558 PARAMETER Experiment Name: At_Drought_Soil_Dry_P Parameter: Plant Line Value: WS
  misc_feature: MA Experiment 20001558 PARAMETER Experiment Name: At_Drought_Soil_Dry_P Parameter: Post Timepoint (hr) Value: 6
  misc_feature: MA Experiment 20001558 PARAMETER Experiment Name: At_Drought_Soil_Dry_P Parameter: Post-Treatment Value: Re-Water vs. No Drought
  misc_feature: MA Experiment 20001558 PARAMETER Experiment Name: At_Drought_Soil_Dry_P Parameter: Timepoint (day) Value: 13
  misc_feature: MA Experiment 20001558 PARAMETER Experiment Name: At_Drought_Soil_Dry_P Parameter: Treatment Value: Drought vs. No Drought
  misc_feature: MA Experiment ID: 20001559 Result: Up-regulated in Transcription
  misc_feature: MA Experiment 20001559 PARAMETER Experiment Name: At_Drought_Soil_Dry_P Parameter: Age (day) Value: 28
  misc_feature: MA Experiment 20001559 PARAMETER Experiment Name: At_Drought_Soil_Dry_P Parameter: Organism Value: A. thaliana
  misc_feature: MA Experiment 20001559 PARAMETER Experiment Name: At_Drought_Soil_Dry_P Parameter: Plant Line Value: WS
  misc_feature: MA Experiment 20001559 PARAMETER Experiment Name: At_Drought_Soil_Dry_P Parameter: Post Timepoint (hr) Value: 29
  misc_feature: MA Experiment 20001559 PARAMETER Experiment Name: At_Drought_Soil_Dry_P Parameter: Post-Treatment Value: Re-Water vs. No Drought
  misc_feature: MA Experiment 20001559 PARAMETER Experiment Name: At_Drought_Soil_Dry_P Parameter: Timepoint (day) Value: 14
  misc_feature: MA Experiment 20001559 PARAMETER Experiment Name: At_Drought_Soil_Dry_P Parameter: Treatment Value: Drought vs. No Drought
  misc_feature: MA Experiment ID: 20001560 Result: Up-regulated in Transcription
  misc_feature: MA Experiment 20001560 PARAMETER Experiment Name: At_Drought_Soil_Dry_P Parameter: Age (day) Value: 28
  misc_feature: MA Experiment 20001560 PARAMETER Experiment Name: At_Drought_Soil_Dry_P Parameter: Organism Value: A. thaliana
  misc_feature: MA Experiment 20001560 PARAMETER Experiment Name: At_Drought_Soil_Dry_P Parameter: Plant Line Value: WS
  misc_feature: MA Experiment 20001560 PARAMETER Experiment Name: At_Drought_Soil_Dry_P Parameter: Post Timepoint (hr) Value: None
  misc_feature: MA Experiment 20001560 PARAMETER Experiment Name: At_Drought_Soil_Dry_P Parameter: Post-Treatment Value: None
  misc_feature: MA Experiment 20001560 PARAMETER Experiment Name: At_Drought_Soil_Dry_P Parameter: Timepoint (day) Value: 14
  misc_feature: MA Experiment 20001560 PARAMETER Experiment Name: At_Drought_Soil_Dry_P Parameter: Treatment Value: Drought vs. No Drought
  misc_feature: MA Experiment ID: 20001771 Result: Up-regulated in Transcription
  misc_feature: MA Experiment 20001771 PARAMETER Experiment Name: At_Far-red-enriched-adult_P Parameter: Age (day) Value: 28
  misc_feature: MA Experiment 20001771 PARAMETER Experiment Name: At_Far-red-enriched-adult_P Parameter: Light Value: Far-red enriched vs. White
  misc_feature: MA Experiment 20001771 PARAMETER Experiment Name: At_Far-red-enriched-adult_P Parameter: Organism Value: A. thaliana
  misc_feature: MA Experiment 20001771 PARAMETER Experiment Name: At_Far-red-enriched-adult_P Parameter: Plant Line Value: Columbia
  misc_feature: MA Experiment 20001771 PARAMETER Experiment Name: At_Far-red-enriched-adult_P Parameter: Timepoint (hr) Value: 16
  misc_feature: MA Experiment 20001771 PARAMETER Experiment Name: At_Far-red-enriched-adult_P Parameter: Tissue Value: Aerial
  misc_feature: MA Experiment ID: 20001904 Result: Up-regulated in Transcription
  misc_feature: MA Experiment 20001904 PARAMETER Experiment Name: At_Drought_Reproduction_P Parameter: Age (day) Value: 37
  misc_feature: MA Experiment 20001904 PARAMETER Experiment Name: At_Drought_Reproduction_P Parameter: Organism Value: A. thaliana
  misc_feature: MA Experiment 20001904 PARAMETER Experiment Name: At_Drought_Reproduction_P Parameter: Plant Line Value: WS
  misc_feature: MA Experiment 20001904 PARAMETER Experiment Name: At_Drought_Reproduction_P Parameter: Timepoint (day) Value: 7
  misc_feature: MA Experiment 20001904 PARAMETER Experiment Name: At_Drought_Reproduction_P Parameter: Tissue Value: Rosettes
  misc_feature: MA Experiment 20001904 PARAMETER Experiment Name: At_Drought_Reproduction_P Parameter: Treatment Value: Drought vs. No Drought
  misc_feature: MA Experiment ID: 20001906 Result: Up-regulated in Transcription
  misc_feature: MA Experiment 20001906 PARAMETER Experiment Name: At_Drought_Reproduction_P Parameter: Age (day) Value: 35
  misc_feature: MA Experiment 20001906 PARAMETER Experiment Name: At_Drought_Reproduction_P Parameter: Organism Value: A. thaliana
  misc_feature: MA Experiment 20001906 PARAMETER Experiment Name: At_Drought_Reproduction_P Parameter: Plant Line Value: WS
  misc_feature: MA Experiment 20001906 PARAMETER Experiment Name: At_Drought_Reproduction_P Parameter: Timepoint (day) Value: 5
  misc_feature: MA Experiment 20001906 PARAMETER Experiment Name: At_Drought_Reproduction_P Parameter: Tissue Value: Siliques
  misc_feature: MA Experiment 20001906 PARAMETER Experiment Name: At_Drought_Reproduction_P Parameter: Treatment Value: Drought vs. No Drought
  misc_feature: MA Experiment ID: 20001908 Result: Up-regulated in Transcription
  misc_feature: MA Experiment 20001908 PARAMETER Experiment Name: At_Drought_Reproduction_P Parameter: Age (day) Value: 40
  misc_feature: MA Experiment 20001908 PARAMETER Experiment Name: At_Drought_Reproduction_P Parameter: Organism Value: A. thaliana
  misc_feature: MA Experiment 20001908 PARAMETER Experiment Name: At_Drought_Reproduction_P Parameter: Plant Line Value: WS
  misc_feature: MA Experiment 20001908 PARAMETER Experiment Name: At_Drought_Reproduction_P Parameter: Timepoint (day) Value: 10
  misc_feature: MA Experiment 20001908 PARAMETER Experiment Name: At_Drought_Reproduction_P Parameter: Tissue Value: Siliques
  misc_feature: MA Experiment 20001908 PARAMETER Experiment Name: At_Drought_Reproduction_P Parameter: Treatment Value: Drought vs. No Drought
  misc_feature: MA Experiment ID: 20001911 Result: Up-regulated in Transcription
  misc_feature: MA Experiment 20001911 PARAMETER Experiment Name: At_Drought_Reproduction_P Parameter: Age (day) Value: 40
  misc_feature: MA Experiment 20001911 PARAMETER Experiment Name: At_Drought_Reproduction_P Parameter: Organism Value: A. thaliana
  misc_feature: MA Experiment 20001911 PARAMETER Experiment Name: At_Drought_Reproduction_P Parameter: Plant Line Value: WS
  misc_feature: MA Experiment 20001911 PARAMETER Experiment Name: At_Drought_Reproduction_P Parameter: Timepoint (day) Value: 10
  misc_feature: MA Experiment 20001911 PARAMETER Experiment Name: At_Drought_Reproduction_P Parameter: Tissue Value: Flowers
  misc_feature: MA Experiment 20001911 PARAMETER Experiment Name: At_Drought_Reproduction_P Parameter: Treatment Value: Drought vs. No Drought
atcatcatcaccatctcttacaacaaatctcaggcggctcaacactatcctcttctacattttccaacgatggcctcaaacgcactctcgtctttcaccgccgctaatcccgctctgtctcctaagccactactccctcacggctctgcttctccgtcggtttctctcggcttctccaggaaagttggcggcggcagagcagtggtcgttgcagcggctacggtggacacaaacaacatgccgatgaccggagtcgtgttccagcctttcgaagaggtgaagaaagccgatctggccattccaatcacatctcatgcctctctcgctcgccagaggtttgccgacgctagcgaggcagtcattaatgagcaaatcaatgtggaatacaacgtctcctatgtgtaccattcaatgtacgcatactttgacagagacaacgttgctatgaagggactagccaaatttttcaaggaatcaagtgaggaagagagagggcatgctgagaagtttatggagtaccagaaccaaagaggaggaagagtgaaactccaccctatcgtctcacctatctcagaattcgaacatgctgaaaaaggagatgctttatatgcaatggagttggctctgtctctagagaaactcactaatgagaagcttctaaacgttcacaaagtggcctcagagaacaatgatccccagttagctgatttcgttgagagtgaatttctgggagagcagattgaagcaatcaagaagatctcagactacatcacccagctaaggatgatcggcaaaggccacggagtttggcatttcgaccagatgcttctgaactagacttggacctctataagttcactttcagatgaccaatgttggggttaaaacagaagaacccgaagattctgtaaaagctttagattgaacattatggactaataagattgtagtagtaagctttgtgttcaagatggtttttgtaataacttcgtaagcttaatcaatgaagtttttgttttagt

SEQ ID NO: 25915 - protein, 278 aa, Arabidopsis thaliana
  peptide (1)..(278): Ceres Seq. ID no. 12327119
  misc_feature (118)..(263): Pfam Name: Ferritin-like domain Pfam Description: Ferritin-like domain
  misc_feature (24)..(278): Homolog of NCBI NO: 29839389 NR Description: Ferritin 1, chloroplast precursor
  misc_feature (24)..(278): Homolog of NCBI NO: 21536745 NR Description: ferritin 1 precursor [Arabidopsis thaliana]
  misc_feature (24)..(278): Homolog of NCBI NO: 15241018 NR Description: ferritin 1 precursor
IIITISYNKSQAAQHYPLLHFPTMASNALSSFTAANPALSPKPLLPHGSASPSVSLGFSRKVGGGRAVVVAAATVDTNNMPMTGVVFQPFEEVKKADLAIPITSHASLARQRFADASEAVINEQINVEYNVSYVYHSMYAYFDRDNVAMKGLAKFFKESSEEERGHAEKFMEYQNQRGGRVKLHPIVSPISEFEHAEKGDALYAMELALSLEKLTNEKLLNVHKVASENNDPQLADFVESEFLGEQIEAIKKISDYITQLRMIGKGHGVWHFDQMLLN

SEQ ID NO: 25916 - protein, 255 aa, Arabidopsis thaliana
  peptide (1)..(255): Ceres Seq. ID no. 12327120
  misc_feature (95)..(240): Pfam Name: Ferritin-like domain Pfam Description: Ferritin-like domain
  misc_feature (1)..(255): Homolog of NCBI NO: 29839389 NR Description: Ferritin 1, chloroplast precursor
  misc_feature (1)..(255): Homolog of NCBI NO: 21536745 NR Description: ferritin 1 precursor [Arabidopsis thaliana]
  misc_feature (1)..(255): Homolog of NCBI NO: 15241018 NR Description: ferritin 1 precursor
MASNALSSFTAANPALSPKPLLPHGSASPSVSLGFSRKVGGGRAVVVAAATVDTNNMPMTGVVFQPFEEVKKADLAIPITSHASLARQRFADASEAVINEQINVEYNVSYVYHSMYAYFDRDNVAMKGLAKFFKESSEEERGHAEKFMEYQNQRGGRVKLHPIVSPISEFEHAEKGDALYAMELALSLEKLTNEKLLNVHKVASENNDPQLADFVESEFLGEQIEAIKKISDYITQLRMIGKGHGVWHFDQMLLN

SEQ ID NO: 25917 - protein, 199 aa, Arabidopsis thaliana
  peptide (1)..(199): Ceres Seq. ID no. 12327121
  misc_feature (39)..(184): Pfam Name: Ferritin-like domain Pfam Description: Ferritin-like domain
  misc_feature (1)..(199): Homolog of NCBI NO: 29839389 NR Description: Ferritin 1, chloroplast precursor
  misc_feature (1)..(199): Homolog of NCBI NO: 21536745 NR Description: ferritin 1 precursor [Arabidopsis thaliana]
  misc_feature (1)..(199): Homolog of NCBI NO: 15241018 NR Description: ferritin 1 precursor
MPMTGVVFQPFEEVKKADLAIPITSHASLARQRFADASEAVINEQINVEYNVSYVYHSMYAYFDRDNVAMKGLAKFFKESSEEERGHAEKFMEYQNQRGGRVKLHPIVSPISEFEHAEKGDALYAMELALSLEKLTNEKLLNVHKVASENNDPQLADFVESEFLGEQIEAIKKISDYITQLRMIGKGHGVWHFDQMLLN

SEQ ID NO: 25918 - DNA, 664 bp, Arabidopsis thaliana
  misc_feature (1)..(664): Ceres Seq. ID no. 13489721
  misc_feature: MA Experiment ID: 108434 Result: Up-regulated in Transcription
  misc_feature: MA Experiment 108434 PARAMETER Experiment Name: At_Root_Tips_cDNA_P Parameter: Tissue Value: Root Tips
  misc_feature: MA Experiment ID: 108462 Result: Down-regulated in Transcription
  misc_feature: MA Experiment 108462 PARAMETER Experiment Name: At_Germinating_Seeds_cDNA_P Parameter: Age (day) Value: 2 vs. 0
  misc_feature: MA Experiment 108462 PARAMETER Experiment Name: At_Germinating_Seeds_cDNA_P Parameter: Tissue Value: Germinating Seeds
  misc_feature: MA Experiment ID: 108463 Result: Down-regulated in Transcription
  misc_feature: MA Experiment 108463 PARAMETER Experiment Name: At_Germinating_Seeds_cDNA_P Parameter: Age (day) Value: 3 vs. 0
  misc_feature: MA Experiment 108463 PARAMETER Experiment Name: At_Germinating_Seeds_cDNA_P Parameter: Tissue Value: Germinating Seeds
  misc_feature: MA Experiment ID: 108464 Result: Down-regulated in Transcription
  misc_feature: MA Experiment 108464 PARAMETER Experiment Name: At_Germinating_Seeds_cDNA_P Parameter: Age (day) Value: 4 vs. 0
  misc_feature: MA Experiment 108464 PARAMETER Experiment Name: At_Germinating_Seeds_cDNA_P Parameter: Tissue Value: Germinating Seeds
  misc_feature: MA Experiment ID: 108573 Result: Down-regulated in Transcription
  misc_feature: MA Experiment 108573 PARAMETER Experiment Name: At_Drought_cDNA_P Parameter: Timepoint (hr) Value: 6
  misc_feature: MA Experiment 108573 PARAMETER Experiment Name: At_Drought_cDNA_P Parameter: Tissue Value: Aerial
  misc_feature: MA Experiment 108573 PARAMETER Experiment Name: At_Drought_cDNA_P Parameter: Treatment Value: Drought vs. No Drought
  misc_feature: MA Experiment ID: 20000227 Result: Up-regulated in Transcription
  misc_feature: MA Experiment 20000227 PARAMETER Experiment Name: At_Root-Tips-vs-Tops_P Parameter: Tissue Value: Root Tips vs. Root Tops
  misc_feature: MA Experiment ID: 20000234 Result: Up-regulated in Transcription
  misc_feature: MA Experiment 20000234 PARAMETER Experiment Name: At_Siliques_P Parameter: Age (day) Value: 21
  misc_feature: MA Experiment 20000234 PARAMETER Experiment Name: At_Siliques_P Parameter: Organism Value: A. thaliana
  misc_feature: MA Experiment 20000234 PARAMETER Experiment Name: At_Siliques_P Parameter: Plant Line Value: WS
  misc_feature: MA Experiment 20000234 PARAMETER Experiment Name: At_Siliques_P Parameter: Tissue Value: Less Than 5mm Siliques vs. Whole Plant
  misc_feature: MA Experiment ID: 20000264 Result: Up-regulated in Transcription
  misc_feature: MA Experiment 20000264 PARAMETER Experiment Name: At_Open_Flower_P Parameter: Age (day) Value: 21
  misc_feature: MA Experiment 20000264 PARAMETER Experiment Name: At_Open_Flower_P Parameter: Plant Line Value: WS
  misc_feature: MA Experiment 20000264 PARAMETER Experiment Name: At_Open_Flower_P Parameter: Tissue Value: Open Flower vs. Whole Plant
  misc_feature: MA Experiment ID: 20001451 Result: Up-regulated in Transcription
  misc_feature: MA Experiment 20001451 PARAMETER Experiment Name: At_Far-red-induction_P Parameter: Age (day) Value: 7
  misc_feature: MA Experiment 20001451 PARAMETER Experiment Name: At_Far-red-induction_P Parameter: Light Value: Far-red vs. White
  misc_feature: MA Experiment 20001451 PARAMETER Experiment Name: At_Far-red-induction_P Parameter: Organism Value: A. thaliana
  misc_feature: MA Experiment 20001451 PARAMETER Experiment Name: At_Far-red-induction_P Parameter: Plant Line Value: Columbia
  misc_feature: MA Experiment 20001451 PARAMETER Experiment Name: At_Far-red-induction_P Parameter: Timepoint (hr) Value: 24
  misc_feature: MA Experiment 20001451 PARAMETER Experiment Name: At_Far-red-induction_P Parameter: Tissue Value: Whole Plant
  misc_feature: MA Experiment ID: 20001558 Result: Up-regulated in Transcription
  misc_feature: MA Experiment 20001558 PARAMETER Experiment Name: At_Drought_Soil_Dry_P Parameter: Age (day) Value: 27
  misc_feature: MA Experiment 20001558 PARAMETER Experiment Name: At_Drought_Soil_Dry_P Parameter: Organism Value: A. thaliana
  misc_feature: MA Experiment 20001558 PARAMETER Experiment Name: At_Drought_Soil_Dry_P Parameter: Plant Line Value: WS
  misc_feature: MA Experiment 20001558 PARAMETER Experiment Name: At_Drought_Soil_Dry_P Parameter: Post Timepoint (hr) Value: 6
  misc_feature: MA Experiment 20001558 PARAMETER Experiment Name: At_Drought_Soil_Dry_P Parameter: Post-Treatment Value: Re-Water vs. No Drought
  misc_feature: MA Experiment 20001558 PARAMETER Experiment Name: At_Drought_Soil_Dry_P Parameter: Timepoint (day) Value: 13
  misc_feature: MA Experiment 20001558 PARAMETER Experiment Name: At_Drought_Soil_Dry_P Parameter: Treatment Value: Drought vs. No Drought
  misc_feature: MA Experiment ID: 20001560 Result: Up-regulated in Transcription
  misc_feature: MA Experiment 20001560 PARAMETER Experiment Name: At_Drought_Soil_Dry_P Parameter: Age (day) Value: 28
  misc_feature: MA Experiment 20001560 PARAMETER Experiment Name: At_Drought_Soil_Dry_P Parameter: Organism Value: A. thaliana
  misc_feature: MA Experiment 20001560 PARAMETER Experiment Name: At_Drought_Soil_Dry_P Parameter: Plant Line Value: WS
  misc_feature: MA Experiment 20001560 PARAMETER Experiment Name: At_Drought_Soil_Dry_P Parameter: Post Timepoint (hr) Value: None
  misc_feature: MA Experiment 20001560 PARAMETER Experiment Name: At_Drought_Soil_Dry_P Parameter: Post-Treatment Value: None
  misc_feature: MA Experiment 20001560 PARAMETER Experiment Name: At_Drought_Soil_Dry_P Parameter: Timepoint (day) Value: 14
  misc_feature: MA Experiment 20001560 PARAMETER Experiment Name: At_Drought_Soil_Dry_P Parameter: Treatment Value: Drought vs. No Drought
  misc_feature: MA Experiment ID: 20001757 Result: Up-regulated in Transcription
  misc_feature: MA Experiment 20001757 PARAMETER Experiment Name: At_50mM_NH4NO3_L-to-H_P Parameter: Timepoint (hr) Value: 6
  misc_feature: MA Experiment 20001757 PARAMETER Experiment Name: At_50mM_NH4NO3_L-to-H_P Parameter: Tissue Value: Leaf
  misc_feature: MA Experiment 20001757 PARAMETER Experiment Name: At_50mM_NH4NO3_L-to-H_P Parameter: Treatment Value: 50mM NH4NO3 vs 100mM Mannitol
gcgactctcctctctgtttcgtttttttttcctttcattcttcttatctcctcacactcttcgaacaaggaggaaccctaatctcaagatgaatagggaaaagttgatgaagatggctaacaccgtccgcactggcggaaagggtacagtcagaagaaagaagaaggctgtgcacaagaccaatacaactgatgacaagaggctccagagcacacttaagagaattggagttaactccattcccgctattgaagaagttaacatctttaaggatgatgttgttattcagttcatcaaccctaaggttcaagcttcaattgctgcaaacacatgggttgttagcggttctcctcagaccaaaaaattgcaagatatccttcctcagatcatcagccaacttggaccagacaacatggacaacctgaagaagctagcagagcagttccagaaacaggcttctggtgaaggtaatgccgcctcagcaaccattcaagaagaggatgatgacgatgtcccagagcttgttggagagacattcgaaactgctgctgaagagaaagcaccagctgctgctgcttcttcttagagagaaaagagcgagaccacatcgaaaaaaaaaaaaccgcactttgatttttacatatctttataatatgtttgttcg

SEQ ID NO: 25919 - protein, 194 aa, Arabidopsis thaliana
  peptide (1)..(194): Ceres Seq. ID no. 13489722
  misc_feature (63)..(121): Pfam Name: NAC domain Pfam Description: NAC domain
  misc_feature (38)..(191): Homolog of NCBI NO: 25956272 NR Description: unnamed protein product [Lotus japonicus]
  misc_feature (30)..(185): Homolog of NCBI NO: 27573340 NR Description: putative transcription factor
  misc_feature (30)..(186): Homolog of NCBI NO: 37535464 NR Description: putative transcription factor
  misc_feature (30)..(194): Homolog of NCBI NO: 29367567 NR Description: putative transcription factor BTF3
  misc_feature (30)..(194): Homolog of NCBI NO: 24431603 NR Description: Putative transcription factor
  misc_feature (30)..(191): Homolog of NCBI NO: 33945882 NR Description: transcription factor homolog BTF3-like protein
  misc_feature (30)..(193): Homolog of NCBI NO: 21537065 NR Description: putative transcription factor BTF3 (RNA
  misc_feature (30)..(193): Homolog of NCBI NO: 15219413 NR Description: transcription factor BTF3 (RNA polymerase B
  misc_feature (30)..(194): Homolog of NCBI NO: 16323127 NR Description: At1g17880/F2H15_10 [Arabidopsis thaliana]
  misc_feature (30)..(194): Homolog of NCBI NO: 15220876 NR Description: transcription factor -related [Arabidopsis
RLSSLFRFFFLSFFLSPHTLRTRRNPNLKMNREKLMKMANTVRTGGKGTVRRKKKAVHKTNTTDDKRLQSTLKRIGVNSIPAIEEVNIFKDDVVIQFINPKVQASIAANTWVVSGSPQTKKLQDILPQIISQLGPDNMDNLKKLAEQFQKQASGEGNAASATIQEEDDDDVPELVGETFETAAEEKAPAAAASS

SEQ ID NO: 25920 - protein, 165 aa, Arabidopsis thaliana
  peptide (1)..(165): Ceres Seq. ID no. 13489723
  misc_feature (34)..(92): Pfam Name: NAC domain Pfam Description: NAC domain
  misc_feature (9)..(162): Homolog of NCBI NO: 25956272 NR Description: unnamed protein product [Lotus japonicus]
  misc_feature (1)..(156): Homolog of NCBI NO: 27573340 NR Description: putative transcription factor
  misc_feature (1)..(157): Homolog of NCBI NO: 37535464 NR Description: putative transcription factor
  misc_feature (1)..(165): Homolog of NCBI NO: 29367567 NR Description: putative transcription factor BTF3
  misc_feature (1)..(165): Homolog of NCBI NO: 24431603 NR Description: Putative transcription factor
  misc_feature (1)..(162): Homolog of NCBI NO: 33945882 NR Description: transcription factor homolog BTF3-like protein
  misc_feature (1)..(164): Homolog of NCBI NO: 21537065 NR Description: putative transcription factor BTF3 (RNA
  misc_feature (1)..(164): Homolog of NCBI NO: 15219413 NR Description: transcription factor BTF3 (RNA polymerase B
  misc_feature (1)..(165): Homolog of NCBI NO: 16323127 NR Description: At1g17880/F2H15_10 [Arabidopsis thaliana]
  misc_feature (1)..(165): Homolog of NCBI NO: 15220876 NR Description: transcription factor -related [Arabidopsis
MNREKLMKMANTVRTGGKGTVRRKKKAVHKTNTTDDKRLQSTLKRIGVNSIPAIEEVNIFKDDVVIQFINPKVQASIAANTWVVSGSPQTKKLQDILPQIISQLGPDNMDNLKKLAEQFQKQASGEGNAASATIQEEDDDDVPELVGETFETAAEEKAPAAAASS

SEQ ID NO: 25921 - protein, 159 aa, Arabidopsis thaliana
  peptide (1)..(159): Ceres Seq. ID no. 13489724
  misc_feature (28)..(86): Pfam Name: NAC domain Pfam Description: NAC domain
  misc_feature (3)..(156): Homolog of NCBI NO: 25956272 NR Description: unnamed protein product [Lotus japonicus]
  misc_feature (1)..(150): Homolog of NCBI NO: 27573340 NR Description: putative transcription factor
  misc_feature (1)..(151): Homolog of NCBI NO: 37535464 NR Description: putative transcription factor
  misc_feature (1)..(159): Homolog of NCBI NO: 29367567 NR Description: putative transcription factor BTF3
  misc_feature (1)..(159): Homolog of NCBI NO: 24431603 NR Description: Putative transcription factor
  misc_feature (1)..(156): Homolog of NCBI NO: 33945882 NR Description: transcription factor homolog BTF3-like protein
  misc_feature (1)..(158): Homolog of NCBI NO: 21537065 NR Description: putative transcription factor BTF3 (RNA
  misc_feature (1)..(158): Homolog of NCBI NO: 15219413 NR Description: transcription factor BTF3 (RNA polymerase B
  misc_feature (1)..(159): Homolog of NCBI NO: 16323127 NR Description: At1g17880/F2H15_10 [Arabidopsis thaliana]
  misc_feature (1)..(159): Homolog of NCBI NO: 15220876 NR Description: transcription factor -related [Arabidopsis
MKMANTVRTGGKGTVRRKKKAVHKTNTTDDKRLQSTLKRIGVNSIPAIEEVNIFKDDVVIQFINPKVQASIAANTWVVSGSPQTKKLQDILPQIISQLGPDNMDNLKKLAEQFQKQASGEGNAASATIQEEDDDDVPELVGETFETAAEEKAPAAAASS

SEQ ID NO: 25922 - DNA, 1373 bp, Arabidopsis thaliana
  misc_feature (1)..(1373): Ceres Seq. ID no. 12384973
  misc_feature: MA Experiment ID: 108434 Result: Down-regulated in Transcription
  misc_feature: MA Experiment 108434 PARAMETER Experiment Name: At_Root_Tips_cDNA_P Parameter: Tissue Value: Root Tips
  misc_feature: MA Experiment ID: 108435 Result: Down-regulated in Transcription
  misc_feature: MA Experiment 108435 PARAMETER Experiment Name: At_stm_Mutants_cDNA_P Parameter: Plant Line Value: wt Landsburg vs stm
  misc_feature: MA Experiment 108435 PARAMETER Experiment Name: At_stm_Mutants_cDNA_P Parameter: Tissue Value: Shoot Apical Meristem Region
  misc_feature: MA Experiment ID: 108461 Result: Down-regulated in Transcription
  misc_feature: MA Experiment 108461 PARAMETER Experiment Name: At_Germinating_Seeds_cDNA_P Parameter: Age (day) Value: 1 vs. 0
  misc_feature: MA Experiment 108461 PARAMETER Experiment Name: At_Germinating_Seeds_cDNA_P Parameter: Tissue Value: Germinating Seeds
  misc_feature: MA Experiment ID: 108462 Result: Down-regulated in Transcription
  misc_feature: MA Experiment 108462 PARAMETER Experiment Name: At_Germinating_Seeds_cDNA_P Parameter: Age (day) Value: 2 vs. 0
  misc_feature: MA Experiment 108462 PARAMETER Experiment Name: At_Germinating_Seeds_cDNA_P Parameter: Tissue Value: Germinating Seeds
  misc_feature: MA Experiment ID: 108488 Result: Down-regulated in Transcription
  misc_feature: MA Experiment ID: 108501 Result: Down-regulated in Transcription
  misc_feature: MA Experiment 108501 PARAMETER Experiment Name: At_ap2_floral_buds_cDNA_P Parameter: Plant Line Value: ap2 (Ler.)
  misc_feature: MA Experiment 108501 PARAMETER Experiment Name: At_ap2_floral_buds_cDNA_P Parameter: Tissue Value: Closed Flower
  misc_feature: MA Experiment ID: 108561 Result: Up-regulated in Transcription
  misc_feature: MA Experiment 108561 PARAMETER Experiment Name: At_100uM_ABA_cDNA_P Parameter: Timepoint (hr) Value: 6
  misc_feature: MA Experiment 108561 PARAMETER Experiment Name: At_100uM_ABA_cDNA_P Parameter: Tissue Value: Aerial
  misc_feature: MA Experiment 108561 PARAMETER Experiment Name: At_100uM_ABA_cDNA_P Parameter: Treatment Value: 100uM ABA vs. No Treatment
  misc_feature: MA Experiment ID: 108573 Result: Up-regulated in Transcription
  misc_feature: MA Experiment 108573 PARAMETER Experiment Name: At_Drought_cDNA_P Parameter: Timepoint (hr) Value: 6
  misc_feature: MA Experiment 108573 PARAMETER Experiment Name: At_Drought_cDNA_P Parameter: Tissue Value: Aerial
  misc_feature: MA Experiment 108573 PARAMETER Experiment Name: At_Drought_cDNA_P Parameter: Treatment Value: Drought vs. No Drought
  misc_feature: MA Experiment ID: 108574 Result: Up-regulated in Transcription
  misc_feature: MA Experiment 108574 PARAMETER Experiment Name: At_Wounding__cDNA_P Parameter: Timepoint (hr) Value: 1
  misc_feature: MA Experiment 108574 PARAMETER Experiment Name: At_Wounding__cDNA_P Parameter: Tissue Value: Aerial
  misc_feature: MA Experiment 108574 PARAMETER Experiment Name: At_Wounding__cDNA_P Parameter: Treatment Value: Wounding vs. No Wounding
  misc_feature: MA Experiment ID: 108579 Result: Up-regulated in Transcription
  misc_feature: MA Experiment 108579 PARAMETER Experiment Name: At_4deg_Cold_cDNA_P Parameter: Temperature (deg C) Value: 4 vs. 22
  misc_feature: MA Experiment 108579 PARAMETER Experiment Name: At_4deg_Cold_cDNA_P Parameter: Timepoint (hr) Value: 6
  misc_feature: MA Experiment 108579 PARAMETER Experiment Name: At_4deg_Cold_cDNA_P Parameter: Tissue Value: Aerial
  misc_feature: MA Experiment ID: 108595 Result: Up-regulated in Transcription
  misc_feature: MA Experiment 108595 PARAMETER Experiment Name: At_Ler-pi_Ovule_cDNA_P Parameter: Plant Line Value: null
  misc_feature: MA Experiment ID: 108667 Result: Up-regulated in Transcription
  misc_feature: MA Experiment 108667 PARAMETER Experiment Name: At_2mM_SA_cDNA_P Parameter: Plant Line Value: WS
  misc_feature: MA Experiment 108667 PARAMETER Experiment Name: At_2mM_SA_cDNA_P Parameter: Timepoint (hr) Value: 1
  misc_feature: MA Experiment 108667 PARAMETER Experiment Name: At_2mM_SA_cDNA_P Parameter: Treatment Value: 2mM SA vs. No Treatment
  misc_feature: MA Experiment ID: 20000070 Result: Up-regulated in Transcription
  misc_feature: MA Experiment 20000070 PARAMETER Experiment Name: At_100uM_ABA_Mutants_cDNA_P Parameter: Plant Line Value: CS24
  misc_feature: MA Experiment 20000070 PARAMETER Experiment Name: At_100uM_ABA_Mutants_cDNA_P Parameter: Timepoint (hr) Value: 6
  misc_feature: MA Experiment 20000070 PARAMETER Experiment Name: At_100uM_ABA_Mutants_cDNA_P Parameter: Tissue Value: Aerial
  misc_feature: MA Experiment 20000070 PARAMETER Experiment Name: At_100uM_ABA_Mutants_cDNA_P Parameter: Treatment Value: 100uM ABA vs. No Treatment
  misc_feature: MA Experiment ID: 20000071 Result: Up-regulated in Transcription
  misc_feature: MA Experiment 20000071 PARAMETER Experiment Name: At_100uM_ABA_Mutants_cDNA_P Parameter: Plant Line Value: CS8104
  misc_feature: MA Experiment 20000071 PARAMETER Experiment Name: At_100uM_ABA_Mutants_cDNA_P Parameter: Timepoint (hr) Value: 6
  misc_feature: MA Experiment 20000071 PARAMETER Experiment Name: At_100uM_ABA_Mutants_cDNA_P Parameter: Tissue Value: Aerial
  misc_feature: MA Experiment 20000071 PARAMETER Experiment Name: At_100uM_ABA_Mutants_cDNA_P Parameter: Treatment Value: 100uM ABA vs. No Treatment
  misc_feature: MA Experiment ID: 20000072 Result: Up-regulated in Transcription
  misc_feature: MA Experiment 20000072 PARAMETER Experiment Name: At_100uM_ABA_Mutants_cDNA_P Parameter: Plant Line Value: CS8105
  misc_feature: MA Experiment 20000072 PARAMETER Experiment Name: At_100uM_ABA_Mutants_cDNA_P Parameter: Timepoint (hr) Value: 6
  misc_feature: MA Experiment 20000072 PARAMETER Experiment Name: At_100uM_ABA_Mutants_cDNA_P Parameter: Tissue Value: Aerial
  misc_feature: MA Experiment 20000072 PARAMETER Experiment Name: At_100uM_ABA_Mutants_cDNA_P Parameter: Treatment Value: 100uM ABA vs. No Treatment
  misc_feature: MA Experiment ID: 20000088 Result: Up-regulated in Transcription
  misc_feature: MA Experiment 20000088 PARAMETER Experiment Name: At_100uM_ABA_Mutants_cDNA_P Parameter: Plant Line Value: Landsberg
  misc_feature: MA Experiment 20000088 PARAMETER Experiment Name: At_100uM_ABA_Mutants_cDNA_P Parameter: Timepoint (hr) Value: 6
  misc_feature: MA Experiment 20000088 PARAMETER Experiment Name: At_100uM_ABA_Mutants_cDNA_P Parameter: Tissue Value: Aerial
  misc_feature: MA Experiment 20000088 PARAMETER Experiment Name: At_100uM_ABA_Mutants_cDNA_P Parameter: Treatment Value: 100uM ABA vs. No Treatment
  misc_feature: MA Experiment ID: 20000113 Result: Up-regulated in Transcription
  misc_feature: MA Experiment 20000113 PARAMETER Experiment Name: At_42deg_Heat_cDNA_P Parameter: Temperature (deg C) Value: 42 vs. 22
  misc_feature: MA Experiment 20000113 PARAMETER Experiment Name: At_42deg_Heat_cDNA_P Parameter: Timepoint (hr) Value: 8
  misc_feature: MA Experiment 20000113 PARAMETER Experiment Name: At_42deg_Heat_cDNA_P Parameter: Tissue Value: Aerial
  misc_feature: MA Experiment ID: 20000117 Result: Up-regulated in Transcription
  misc_feature: MA Experiment 20000117 PARAMETER Experiment Name: At_100uM_ABA_Mutants_cDNA_P Parameter: Plant Line Value: Columbia
  misc_feature: MA Experiment 20000117 PARAMETER Experiment Name: At_100uM_ABA_Mutants_cDNA_P Parameter: Timepoint (hr) Value: 6
  misc_feature: MA Experiment 20000117 PARAMETER Experiment Name: At_100uM_ABA_Mutants_cDNA_P Parameter: Tissue Value: Aerial
  misc_feature: MA Experiment 20000117 PARAMETER Experiment Name: At_100uM_ABA_Mutants_cDNA_P Parameter: Treatment Value: 100uM ABA vs. No Treatment
  misc_feature: MA Experiment ID: 20000179 Result: Down-regulated in Transcription
  misc_feature: MA Experiment 20000179 PARAMETER Experiment Name: At_Germinating_Seeds_P Parameter: Age (hr) Value: 6 vs. 0
  misc_feature: MA Experiment 20000179 PARAMETER Experiment Name: At_Germinating_Seeds_P Parameter: Tissue Value: Germinating Seeds
  misc_feature: MA Experiment ID: 20000227 Result: Down-regulated in Transcription
  misc_feature: MA Experiment 20000227 PARAMETER Experiment Name: At_Root-Tips-vs-Tops_P Parameter: Tissue Value: Root Tips vs. Root Tops
  misc_feature: MA Experiment ID: 20000234 Result: Down-regulated in Transcription
  misc_feature: MA Experiment 20000234 PARAMETER Experiment Name: At_Siliques_P Parameter: Age (day) Value: 21
  misc_feature: MA Experiment 20000234 PARAMETER Experiment Name: At_Siliques_P Parameter: Organism Value: A. thaliana
  misc_feature: MA Experiment 20000234 PARAMETER Experiment Name: At_Siliques_P Parameter: Plant Line Value: WS
  misc_feature: MA Experiment 20000234 PARAMETER Experiment Name: At_Siliques_P Parameter: Tissue Value: Less Than 5mm Siliques vs. Whole Plant
  misc_feature: MA Experiment ID: 20000235 Result: Down-regulated in Transcription
  misc_feature: MA Experiment 20000235 PARAMETER Experiment Name: At_Siliques_P Parameter: Age (day) Value: 21
  misc_feature: MA Experiment 20000235 PARAMETER Experiment Name: At_Siliques_P Parameter: Organism Value: A. thaliana
  misc_feature: MA Experiment 20000235 PARAMETER Experiment Name: At_Siliques_P Parameter: Plant Line Value: WS
  misc_feature: MA Experiment 20000235 PARAMETER Experiment Name: At_Siliques_P Parameter: Tissue Value: 5-10mm Siliques vs. Whole Plant
  misc_feature: MA Experiment ID: 20000264 Result: Down-regulated in Transcription
  misc_feature: MA Experiment 20000264 PARAMETER Experiment Name: At_Open_Flower_P Parameter: Age (day) Value: 21
  misc_feature: MA Experiment 20000264 PARAMETER Experiment Name: At_Open_Flower_P Parameter: Plant Line Value: WS
  misc_feature: MA Experiment 20000264 PARAMETER Experiment Name: At_Open_Flower_P Parameter: Tissue Value: Open Flower vs. Whole Plant
  misc_feature: MA Experiment ID: 20000265 Result: Down-regulated in Transcription
  misc_feature: MA Experiment 20000265 PARAMETER Experiment Name: At_Open_Flower_P Parameter: Age (day) Value: 21
  misc_feature: MA Experiment 20000265 PARAMETER Experiment Name: At_Open_Flower_P Parameter: Plant Line Value: WS
  misc_feature: MA Experiment 20000265 PARAMETER Experiment Name: At_Open_Flower_P Parameter: Tissue Value: Closed Flower vs. Whole Plant
  misc_feature: MA Experiment ID: 20000268 Result: Down-regulated in Transcription
  misc_feature: MA Experiment 20000268 PARAMETER Experiment Name: At_100mM_NaCl__P Parameter: Age (day) Value: 14
  misc_feature: MA Experiment 20000268 PARAMETER Experiment Name: At_100mM_NaCl__P Parameter: Organism Value: A. thaliana
  misc_feature: MA Experiment 20000268 PARAMETER Experiment Name: At_100mM_NaCl__P Parameter: Plant Line Value: WS
  misc_feature: MA Experiment 20000268 PARAMETER Experiment Name: At_100mM_NaCl__P Parameter: Timepoint (hr) Value: 6
  misc_feature: MA Experiment 20000268 PARAMETER Experiment Name: At_100mM_NaCl__P Parameter: Tissue Value: Whole Plant
  misc_feature: MA Experiment 20000268 PARAMETER Experiment Name: At_100mM_NaCl__P Parameter: Treatment Value: 100mM NaCl vs. No Treatment
  misc_feature: MA Experiment ID: 20000286 Result: Down-regulated in Transcription
  misc_feature: MA Experiment 20000286 PARAMETER Experiment Name: At_Open_Flower_P Parameter: Age (day) Value: 21
  misc_feature: MA Experiment 20000286 PARAMETER Experiment Name: At_Open_Flower_P Parameter: Plant Line Value: WS
  misc_feature: MA Experiment 20000286 PARAMETER Experiment Name: At_Open_Flower_P Parameter: Tissue Value: Half Open vs. Whole Plant
  misc_feature: MA Experiment ID: 20000438 Result: Down-regulated in Transcription
  misc_feature: MA Experiment 20000438 PARAMETER Experiment Name: At_Shoots__P Parameter: Age (day) Value: 14
  misc_feature: MA Experiment 20000438 PARAMETER Experiment Name: At_Shoots__P Parameter: Tissue Value: Shoots vs. Whole Plant
  misc_feature: MA Experiment ID: 20000439 Result: Down-regulated in Transcription
  misc_feature: MA Experiment 20000439 PARAMETER Experiment Name: At_Roots__P Parameter: Age (day) Value: 14 vs. 21
  misc_feature: MA Experiment 20000439 PARAMETER Experiment Name: At_Roots__P Parameter: Organism Value: A. thaliana
  misc_feature: MA Experiment 20000439 PARAMETER Experiment Name: At_Roots__P Parameter: Tissue Value: Roots vs. Whole Plant
  misc_feature: MA Experiment ID: 20000495 Result: Down-regulated in Transcription
  misc_feature: MA Experiment 20000495 PARAMETER Experiment Name: At_Guard_Cells_P Parameter: Harvest Date Value: 8/2/2002
  misc_feature: MA Experiment 20000495 PARAMETER Experiment Name: At_Guard_Cells_P Parameter: Organism Value: A. thaliana
  misc_feature: MA Experiment 20000495 PARAMETER Experiment Name: At_Guard_Cells_P Parameter: Tissue Value: Guard Cells vs. Leaves
  misc_feature: MA Experiment ID: 20000496 Result: Down-regulated in Transcription
  misc_feature: MA Experiment 20000496 PARAMETER Experiment Name: At_Guard_Cells_P Parameter: Harvest Date Value: 7/19/2002
  misc_feature: MA Experiment 20000496 PARAMETER Experiment Name: At_Guard_Cells_P Parameter: Organism Value: Canola
  misc_feature: MA Experiment 20000496 PARAMETER Experiment Name: At_Guard_Cells_P Parameter: Tissue Value: Guard Cells vs. Leaves
  misc_feature: MA Experiment ID: 20000709 Result: Up-regulated in Transcription
  misc_feature: MA Experiment 20000709 PARAMETER Experiment Name: At_15mM_NH4NO3_L-to-H_P Parameter: Age (hr) Value: 14
  misc_feature: MA Experiment 20000709 PARAMETER Experiment Name: At_15mM_NH4NO3_L-to-H_P Parameter: Organism Value: A. thaliana
  misc_feature: MA Experiment 20000709 PARAMETER Experiment Name: At_15mM_NH4NO3_L-to-H_P Parameter: Plant Line Value: WS
  misc_feature: MA Experiment 20000709 PARAMETER Experiment Name: At_15mM_NH4NO3_L-to-H_P Parameter: Timepoint (hr) Value: 4
  misc_feature: MA Experiment 20000709 PARAMETER Experiment Name: At_15mM_NH4NO3_L-to-H_P Parameter: Tissue Value: Aerial
  misc_feature: MA Experiment 20000709 PARAMETER Experiment Name: At_15mM_NH4NO3_L-to-H_P Parameter: Treatment Value: 15mM NH4NO3 vs. 30mM Mannitol
aaaaggaaaaaagaaaaagaagaagaggagctaaaaaaacgacgtcgtagaaggagattcttgccatggccacacatagtctctccttcttcttcagagttcttctcctcctctttcttactctctcagagagaattaaagggcaaggtgtgggaatcaactacggccaaatagcaaacaacctcccatctccggcaagagtcgccgtgctccttcgatcactaaacatcacaagagtaaaactctacgacgcagatccaaacgtcctcttctccttctcaaactcacaagtagatttcatgatcggtttaggcaacgagtatcttcaaaacatgtcaacagatccaaccaaagctcaagattggttacaacaaagacttgaaccacatatctcaaaaacacgaataacctcaatagttgtcggcaacgaaatcttcaaaaccaatgatcatgtcctcatccaaagcctattaccggctatgaaatcggtttacgctgctttaaccaatcttggtttagagaaacaagtaaccgtaacttcagctcattctttagacattctttcaacatcttatcctccttcttcaggatcattcaaagaagagtttattcaatatcttcaaccacttcttgattttcattctcaaatcgaatcacctttcttgataaatgcttatcccttttttgcttataaagatagtcctaaagaagttccattagagtatgttttgtttcaacctaatcaaggtatggttgatccaaacactaatcttcattatgacaacatgttgtttgctcaagttgatgcgctttactctgccattaagactttgggacataccgatatcgaggttcggatatcggaaaccggttggccttctaaaggagatgagaatgagattggagcttcgccggagaacgcggctttgtataatgggaatttgttgaagttgattcagcagaggaaaggaactccggcgaagcaatctgttcctattgatgtttatgtgtttgctctgtttaatgagaatcttaaaccgggtccggtttctgagaggaattatggacttttttatccggatggtaaaccggtttacaatgtcggtatgcaaggttatttacctgatattatctatacttcaagggcaactacaattaagattttgaatttgtggagagtcgtgatgggtttggctgtggcttggttcatactcgatatgggcgacaagatgaggatgagataagcttcgcttgtgtctttgtctgtccttgtaggatttttgttttaatatgttagttgattataggtgaggtatacaattctttgtcatgtattggattcacaaaaattaaaaaaattaatttattccttg

SEQ ID NO: 25923 - protein, 392 aa, Arabidopsis thaliana
  peptide (1)..(392): Ceres Seq. ID no. 12384974
  misc_feature (29)..(348): Pfam Name: Glycosyl hydrolases family 17 Pfam Description: Glycosyl hydrolases family 17
  misc_feature (7)..(383): Homolog of NCBI NO: 22328768 NR Description: glycosyl hydrolase family 17; protein id:
  misc_feature (26)..(349): Homolog of NCBI NO: 6006371 NR Description: Similar to hypothetical protein - potato (S31196)
  misc_feature (1)..(349): Homolog of NCBI NO: 15238298 NR Description: glycosyl hydrolase family 17
  misc_feature (6)..(356): Homolog of NCBI NO: 30692765 NR Description: glycosyl hydrolase family 17 [Arabidopsis
  misc_feature (6)..(356): Homolog of NCBI NO: 25316443 NR Description: CDS protein F9L11.6 [imported] - Arabidopsis
  misc_feature (14)..(348): Homolog of NCBI NO: 419789 NR Description: hypothetical protein - potato
  misc_feature (10)..(368): Homolog of NCBI NO: 38346337 NR Description: OSJNBa0073L04.8 [Oryza sativa (japonica
  misc_feature (1)..(350): Homolog of NCBI NO: 34908492 NR Description: putative beta-1,3-glucanase
  misc_feature (1)..(366): Homolog of NCBI NO: 25316425 NR Description: probable beta-1,3-glucanase [imported] -
  misc_feature (1)..(392): Homolog of NCBI NO: 18401444 NR Description: glycosyl hydrolase family 17
MATHSLSFFFRVLLLLFLTLSERIKGQGVGINYGQIANNLPSPARVAVLLRSLNITRVKLYDADPNVLFSFSNSQVDFMIGLGNEYLQNMSTDPTKAQDWLQQRLEPHISKTRITSIVVGNEIFKTNDHVLIQSLLPAMKSVYAALTNLGLEKQVTVTSAHSLDILSTSYPPSSGSFKEEFIQYLQPLLDFHSQIESPFLINAYPFFAYKDSPKEVPLEYVLFQPNQGMVDPNTNLHYDNMLFAQVDALYSAIKTLGHTDIEVRISETGWPSKGDENEIGASPENAALYNGNLLKLIQQRKGTPAKQSVPIDVYVFALFNENLKPGPVSERNYGLFYPDGKPVYNVGMQGYLPDIIYTSRATTIKILNLWRVVMGLAVAWFILDMGDKMRMR

SEQ ID NO: 25924 - protein, 314 aa, Arabidopsis thaliana
  peptide (1)..(314): Ceres Seq. ID no. 12384975
  misc_feature (1)..(270): Pfam Name: Glycosyl hydrolases family 17 Pfam Description: Glycosyl hydrolases family 17
  misc_feature (1)..(270): Homolog of NCBI NO: 419789 NR Description: hypothetical protein - potato
  misc_feature (1)..(290): Homolog of NCBI NO: 38346337 NR Description: OSJNBa0073L04.8 [Oryza sativa (japonica
  misc_feature (1)..(272): Homolog of NCBI NO: 34908492 NR Description: putative beta-1,3-glucanase
  misc_feature (1)..(271): Homolog of NCBI NO: 6006371 NR Description: Similar to hypothetical protein - potato (S31196)
  misc_feature (1)..(278): Homolog of NCBI NO: 30692765 NR Description: glycosyl hydrolase family 17 [Arabidopsis
  misc_feature (1)..(278): Homolog of NCBI NO: 25316443 NR Description: CDS protein F9L11.6 [imported] - Arabidopsis
  misc_feature (1)..(271): Homolog of NCBI NO: 15238298 NR Description: glycosyl hydrolase family 17
  misc_feature (1)..(305): Homolog of NCBI NO: 22328768 NR Description: glycosyl hydrolase family 17; protein id:
  misc_feature (1)..(288): Homolog of NCBI NO: 25316425 NR Description: probable beta-1,3-glucanase [imported] -
  misc_feature (1)..(314): Homolog of NCBI NO: 18401444 NR Description: glycosyl hydrolase family 17
MIGLGNEYLQNMSTDPTKAQDWLQQRLEPHISKTRITSIVVGNEIFKTNDHVLIQSLLPAMKSVYAALTNLGLEKQVTVTSAHSLDILSTSYPPSSGSFKEEFIQYLQPLLDFHSQIESPFLINAYPFFAYKDSPKEVPLEYVLFQPNQGMVDPNTNLHYDNMLFAQVDALYSAIKTLGHTDIEVRISETGWPSKGDENEIGASPENAALYNGNLLKLIQQRKGTPAKQSVPIDVYVFALFNENLKPGPVSERNYGLFYPDGKPVYNVGMQGYLPDIIYTSRATTIKILNLWRVVMGLAVAWFILDMGDKMRMR

SEQ ID NO: 25925 - protein, 303 aa, Arabidopsis thaliana
  peptide (1)..(303): Ceres Seq. ID no. 12384976
  misc_feature (1)..(259): Pfam Name: Glycosyl hydrolases family 17 Pfam Description: Glycosyl hydrolases family 17
  misc_feature (1)..(294): Homolog of NCBI NO: 22328768 NR Description: glycosyl hydrolase family 17; protein id:
  misc_feature (1)..(260): Homolog of NCBI NO: 6006371 NR Description: Similar to hypothetical protein - potato (S31196)
  misc_feature (1)..(260): Homolog of NCBI NO: 15238298 NR Description: glycosyl hydrolase family 17
  misc_feature (1)..(267): Homolog of NCBI NO: 30692765 NR Description: glycosyl hydrolase family 17 [Arabidopsis
  misc_feature (1)..(267): Homolog of NCBI NO: 25316443 NR Description: CDS protein F9L11.6 [imported] - Arabidopsis
  misc_feature (1)..(259): Homolog of NCBI NO: 419789 NR Description: hypothetical protein - potato
  misc_feature (1)..(279): Homolog of NCBI NO: 38346337 NR Description: OSJNBa0073L04.8 [Oryza sativa (japonica
  misc_feature (1)..(261): Homolog of NCBI NO: 34908492 NR Description: putative beta-1,3-glucanase
  misc_feature (1)..(277): Homolog of NCBI NO: 25316425 NR Description: probable beta-1,3-glucanase [imported] -
  misc_feature (1)..(303): Homolog of NCBI NO: 18401444 NR Description: glycosyl hydrolase family 17
MSTDPTKAQDWLQQRLEPHISKTRITSIVVGNEIFKTNDHVLIQSLLPAMKSVYAALTNLGLEKQVTVTSAHSLDILSTSYPPSSGSFKEEFIQYLQPLLDFHSQIESPFLINAYPFFAYKDSPKEVPLEYVLFQPNQGMVDPNTNLHYDNMLFAQVDALYSAIKTLGHTDIEVRISETGWPSKGDENEIGASPENAALYNGNLLKLIQQRKGTPAKQSVPIDVYVFALFNENLKPGPVSERNYGLFYPDGKPVYNVGMQGYLPDIIYTSRATTIKILNLWRVVMGLAVAWFILDMGDKMRMR

SEQ ID NO: 25926 - DNA, 1682 bp, Arabidopsis thaliana
  misc_feature (1)..(1682): Ceres Seq. ID no. 12337939
  misc_feature: MA Experiment ID: 20000169 Result: Up-regulated in Transcription
  misc_feature: MA Experiment 20000169 PARAMETER Experiment Name: At_100uM_ABA_P Parameter: Age (day) Value: 14
  misc_feature: MA Experiment 20000169 PARAMETER Experiment Name: At_100uM_ABA_P Parameter: Organism Value: A. thaliana
  misc_feature: MA Experiment 20000169 PARAMETER Experiment Name: At_100uM_ABA_P Parameter: Plant Line Value: WS
  misc_feature: MA Experiment 20000169 PARAMETER Experiment Name: At_100uM_ABA_P Parameter: Timepoint (hr) Value: 6
  misc_feature: MA Experiment 20000169 PARAMETER Experiment Name: At_100uM_ABA_P Parameter: Tissue Value: Aerial
  misc_feature: MA Experiment 20000169 PARAMETER Experiment Name: At_100uM_ABA_P Parameter: Treatment Value: 100uM ABA vs. No Treatment
  misc_feature: MA Experiment ID: 20000173 Result: Down-regulated in Transcription
  misc_feature: MA Experiment 20000173 PARAMETER Experiment Name: At_42deg_Heat_P Parameter: Age (day) Value: 14
  misc_feature: MA Experiment 20000173 PARAMETER Experiment Name: At_42deg_Heat_P Parameter: Organism Value: A. thaliana
  misc_feature: MA Experiment 20000173 PARAMETER Experiment Name: At_42deg_Heat_P Parameter: Plant Line Value: WS
  misc_feature: MA Experiment 20000173 PARAMETER Experiment Name: At_42deg_Heat_P Parameter: Temperature (deg C) Value: 42 vs. 22
  misc_feature: MA Experiment 20000173 PARAMETER Experiment Name: At_42deg_Heat_P Parameter: Timepoint (hr) Value: 6
  misc_feature: MA Experiment 20000173 PARAMETER Experiment Name: At_42deg_Heat_P Parameter: Tissue Value: Aerial
  misc_feature: MA Experiment ID: 20000179 Result: Up-regulated in Transcription
  misc_feature: MA Experiment 20000179 PARAMETER Experiment Name: At_Germinating_Seeds_P Parameter: Age (hr) Value: 6 vs. 0
  misc_feature: MA Experiment 20000179 PARAMETER Experiment Name: At_Germinating_Seeds_P Parameter: Tissue Value: Germinating Seeds
  misc_feature: MA Experiment ID: 20000180 Result: Up-regulated in Transcription
  misc_feature: MA Experiment 20000180 PARAMETER Experiment Name: At_Germinating_Seeds_P Parameter: Age (hr) Value: 24 vs. 0
  misc_feature: MA Experiment 20000180 PARAMETER Experiment Name: At_Germinating_Seeds_P Parameter: Tissue Value: Germinating Seeds
  misc_feature: MA Experiment ID: 20000185 Result: Up-regulated in Transcription
  misc_feature: MA Experiment 20000185 PARAMETER Experiment Name: At_Roots__P Parameter: Age (day) Value: 7 vs. 21
  misc_feature: MA Experiment 20000185 PARAMETER Experiment Name: At_Roots__P Parameter: Organism Value: A. thaliana
  misc_feature: MA Experiment 20000185 PARAMETER Experiment Name: At_Roots__P Parameter: Tissue Value: Roots vs. Whole Plant
  misc_feature: MA Experiment ID: 20000264 Result: Up-regulated in Transcription
  misc_feature: MA Experiment 20000264 PARAMETER Experiment Name: At_Open_Flower_P Parameter: Age (day) Value: 21
  misc_feature: MA Experiment 20000264 PARAMETER Experiment Name: At_Open_Flower_P Parameter: Plant Line Value: WS
  misc_feature: MA Experiment 20000264 PARAMETER Experiment Name: At_Open_Flower_P Parameter: Tissue Value: Open Flower vs. Whole Plant
  misc_feature: MA Experiment ID: 20000265 Result: Up-regulated in Transcription
  misc_feature: MA Experiment 20000265 PARAMETER Experiment Name: At_Open_Flower_P Parameter: Age (day) Value: 21
  misc_feature: MA Experiment 20000265 PARAMETER Experiment Name: At_Open_Flower_P Parameter: Plant Line Value: WS
  misc_feature: MA Experiment 20000265 PARAMETER Experiment Name: At_Open_Flower_P Parameter: Tissue Value: Closed Flower vs. Whole Plant
  misc_feature: MA Experiment ID: 20000286 Result: Up-regulated in Transcription
  misc_feature: MA Experiment 20000286 PARAMETER Experiment Name: At_Open_Flower_P Parameter: Age (day) Value: 21
  misc_feature: MA Experiment 20000286 PARAMETER Experiment Name: At_Open_Flower_P Parameter: Plant Line Value: WS
  misc_feature: MA Experiment 20000286 PARAMETER Experiment Name: At_Open_Flower_P Parameter: Tissue Value: Half Open vs. Whole Plant
  misc_feature: MA Experiment ID: 20000439 Result: Up-regulated in Transcription
  misc_feature: MA Experiment 20000439 PARAMETER Experiment Name: At_Roots__P Parameter: Age (day) Value: 14 vs. 21
  misc_feature: MA Experiment 20000439 PARAMETER Experiment Name: At_Roots__P Parameter: Organism Value: A. thaliana
  misc_feature: MA Experiment 20000439 PARAMETER Experiment Name: At_Roots__P Parameter: Tissue Value: Roots vs. Whole Plant
  misc_feature: MA Experiment ID: 20000794 Result: Up-regulated in Transcription
  misc_feature: MA Experiment 20000794 PARAMETER Experiment Name: At_Petals_P Parameter: Age (day) Value: 23-25 days
  misc_feature: MA Experiment 20000794 PARAMETER Experiment Name: At_Petals_P Parameter: Plant Line Value: WS
  misc_feature: MA Experiment 20000794 PARAMETER Experiment Name: At_Petals_P Parameter: Tissue Value: Petals vs. Whole plant
  misc_feature: MA Experiment ID: 20001557 Result: Down-regulated in Transcription
  misc_feature: MA Experiment 20001557 PARAMETER Experiment Name: At_Drought_Soil_Dry_P Parameter: Age (day) Value: 27
  misc_feature: MA Experiment 20001557 PARAMETER Experiment Name: At_Drought_Soil_Dry_P Parameter: Organism Value: A. thaliana
  misc_feature: MA Experiment 20001557 PARAMETER Experiment Name: At_Drought_Soil_Dry_P Parameter: Plant Line Value: WS
  misc_feature: MA Experiment 20001557 PARAMETER Experiment Name: At_Drought_Soil_Dry_P Parameter: Post Timepoint (hr) Value: 3
  misc_feature: MA Experiment 20001557 PARAMETER Experiment Name: At_Drought_Soil_Dry_P Parameter: Post-Treatment Value: Re-Water vs. No Drought
  misc_feature: MA Experiment 20001557 PARAMETER Experiment Name: At_Drought_Soil_Dry_P Parameter: Timepoint (day) Value: 13
  misc_feature: MA Experiment 20001557 PARAMETER Experiment Name: At_Drought_Soil_Dry_P Parameter: Treatment Value: Drought vs. No Drought
  misc_feature: MA Experiment ID: 20001558 Result: Down-regulated in Transcription
  misc_feature: MA Experiment 20001558 PARAMETER Experiment Name: At_Drought_Soil_Dry_P Parameter: Age (day) Value: 27
  misc_feature: MA Experiment 20001558 PARAMETER Experiment Name: At_Drought_Soil_Dry_P Parameter: Organism Value: A. thaliana
  misc_feature: MA Experiment 20001558 PARAMETER Experiment Name: At_Drought_Soil_Dry_P Parameter: Plant Line Value: WS
  misc_feature: MA Experiment 20001558 PARAMETER Experiment Name: At_Drought_Soil_Dry_P Parameter: Post Timepoint (hr) Value: 6
  misc_feature: MA Experiment 20001558 PARAMETER Experiment Name: At_Drought_Soil_Dry_P Parameter: Post-Treatment Value: Re-Water vs. No Drought
  misc_feature: MA Experiment 20001558 PARAMETER Experiment Name: At_Drought_Soil_Dry_P Parameter: Timepoint (day) Value: 13
  misc_feature: MA Experiment 20001558 PARAMETER Experiment Name: At_Drought_Soil_Dry_P Parameter: Treatment Value: Drought vs. No Drought
  misc_feature: MA Experiment ID: 20001905 Result: Up-regulated in Transcription
  misc_feature: MA Experiment 20001905 PARAMETER Experiment Name: At_Drought_Reproduction_P Parameter: Age (day) Value: 40
  misc_feature: MA Experiment 20001905 PARAMETER Experiment Name: At_Drought_Reproduction_P Parameter: Organism Value: A. thaliana
  misc_feature: MA Experiment 20001905 PARAMETER Experiment Name: At_Drought_Reproduction_P Parameter: Plant Line Value: WS
  misc_feature: MA Experiment 20001905 PARAMETER Experiment Name: At_Drought_Reproduction_P Parameter: Timepoint (day) Value: 10
  misc_feature: MA Experiment 20001905 PARAMETER Experiment Name: At_Drought_Reproduction_P Parameter: Tissue Value: Rosettes
  misc_feature: MA Experiment 20001905 PARAMETER Experiment Name: At_Drought_Reproduction_P Parameter: Treatment Value: Drought vs. No Drought
  misc_feature: MA Experiment ID: 20001911 Result: Down-regulated in Transcription
  misc_feature: MA Experiment 20001911 PARAMETER Experiment Name: At_Drought_Reproduction_P Parameter: Age (day) Value: 40
  misc_feature: MA Experiment 20001911 PARAMETER Experiment Name: At_Drought_Reproduction_P Parameter: Organism Value: A. thaliana
  misc_feature: MA Experiment 20001911 PARAMETER Experiment Name: At_Drought_Reproduction_P Parameter: Plant Line Value: WS
  misc_feature: MA Experiment 20001911 PARAMETER Experiment Name: At_Drought_Reproduction_P Parameter: Timepoint (day) Value: 10
  misc_feature: MA Experiment 20001911 PARAMETER Experiment Name: At_Drought_Reproduction_P Parameter: Tissue Value: Flowers
  misc_feature: MA Experiment 20001911 PARAMETER Experiment Name: At_Drought_Reproduction_P Parameter: Treatment Value: Drought vs. No Drought
atcaatttcgaggaataaaagtaagaaacattgcgacaaaaaaaaaaaaaagagatattgaggaatggctgcgaagaaggtttttggatcggcggaagcgagtaatttggtgacggagcttcgtcggagttttgatgatggtgtgacacgtggttatgaatggagagtgactcagcttaagaaactgatgattatttgtgataatcatgagcctgagatcgtcgcggctcttcgcgatgatcttggtaagcctgagcttgaatcttctgtttatgaggtatctctactgagaaactctatcaagttggctcttaagcagctaaagaactggatggctccggagaaggcaaagacttctctaacaacgtttcctgcatccgcggagattgtgtctgagcctcttggtgttgtgctagtgatctcggcttggaactatccttttctgttgtctattgatcctgttattggtgcaatttctgctgggaatgctgttgttttaaagccatcagaattggctccagcttcgtcagctctgctcactaagttactggaacagtatcttgatccttctgcggtgcgagttgtcgaaggagctgttaccgaaacaagtgctctgctagagcagaagtgggacaagatattctacacaggtagttcaaaaatcggacgtgtcataatggcggcagctgcgaagcatctcacaccggttgttctagagcttggaggaaaatctcctgtcgttgtagactcggataccgatttgaaagttaccgtcaggcggataatcgtaggcaaatggggttgcaacaacggacaggcgtgcgtttcgccggactatatcttgacgacaaaagaatatgctcctaaattgattgatgccatgaagcttgaattggagaaattttatgggaagaaccctatagagtcgaaagatatgtcacgtatcgtaaactcgaatcactttgatcgcttgtctaagttgttagacgagaaggaagtttctgacaaaattgtctatggtggtgaaaaggacagagaaaacttgaaaattgctccgacaatcttgctcgatgtaccattagattctctgatcatgagtgaagaaatatttggccctctccttccaatcctcacgcttaacaacttggaagagagctttgacgtgattcgttctcgacctaagccacttgcggcatacttgtttacacataacaagaagttgaaagagagattcacagcgacagtctccgctggaggcatagtagtcaatgacatagctgttcatcttgcacttcacacattgccattcggaggagttggtgaaagtggaatgggtgcttaccatggtaaattctcatttgatgcttttagtcacaagaaggcggttctctacagaagccttttcggtgattcagccgtcaggtatccgccatactcgagaggaaagcttagattgttaaaagcccttgtcgacagcaatatattcgatttattcaaagtccttctcggtttagcttaaacggtaaaaagaccgaggacacttccctttgtaccttatttacttgttttatttttcaaacatggacttagttggttaatatgttttggtttggtgttgattctatgaatattgaagttgataaataaaagattttcggttgattatggaaaccggtttcttc

SEQ ID NO: 25927 - protein, 484 aa, Arabidopsis thaliana
  peptide (1)..(484): Ceres Seq. ID no. 12337940
  misc_feature (1)..(445): Pfam Name: Aldehyde dehydrogenase family Pfam Description: Aldehyde dehydrogenase family
  misc_feature (331)..(483): Homolog of NCBI NO: 15234364 NR Description: aldehyde dehydrogenase like protein; protein id:
  misc_feature (18)..(228): Homolog of NCBI NO: 15234364 NR Description: aldehyde dehydrogenase like protein; protein id:
  misc_feature (1)..(483): Homolog of NCBI NO: 4973431 NR Description: putative aldehyde dehydrogenase OS-ALDH
  misc_feature (10)..(469): Homolog of NCBI NO: 23126018 NR Description: hypothetical protein [Nostoc punctiforme]
  misc_feature (8)..(483): Homolog of NCBI NO: 33317836 NR Description: aldehyde dehydrogenase [Oryza sativa (indica
  misc_feature (7)..(484): Homolog of NCBI NO: 17065876 NR Description: aldehyde dehydrogenase [Arabidopsis thaliana]
  misc_feature (7)..(484): Homolog of NCBI NO: 18418408 NR Description: putative aldehyde dehydrogenase
  misc_feature (11)..(482): Homolog of NCBI NO: 17065918 NR Description: aldehyde dehydrogenase [Craterostigma
  misc_feature (1)..(484): Homolog of NCBI NO: 15219358 NR Description: aldehyde dehydrogenase, putative
  misc_feature (1)..(484): Homolog of NCBI NO: 21536879 NR Description: aldehyde dehydrogenase, putative [Arabidopsis
MAAKKVFGSAEASNLVTELRRSFDDGVTRGYEWRVTQLKKLMIICDNHEPEIVAALRDDLGKPELESSVYEVSLLRNSIKLALKQLKNWMAPEKAKTSLTTFPASAEIVSEPLGVVLVISAWNYPFLLSIDPVIGAISAGNAVVLKPSELAPASSALLTKLLEQYLDPSAVRVVEGAVTETSALLEQKWDKIFYTGSSKIGRVIMAAAAKHLTPVVLELGGKSPVVVDSDTDLKVTVRRIIVGKWGCNNGQACVSPDYILTTKEYAPKLIDAMKLELEKFYGKNPIESKDMSRIVNSNHFDRLSKLLDEKEVSDKIVYGGEKDRENLKIAPTILLDVPLDSLIMSEEIFGPLLPILTLNNLEESFDVIRSRPKPLAAYLFTHNKKLKERFTATVSAGGIVVNDIAVHLALHTLPFGGVGESGMGAYHGKFSFDAFSHKKAVLYRSLFGDSAVRYPPYSRGKLRLLKALVDSNIFDLFKVLLGLA

SEQ ID NO: 25928 - protein, 443 aa, Arabidopsis thaliana
  peptide (1)..(443): Ceres Seq. ID no. 12337941
  misc_feature (1)..(404): Pfam Name: Aldehyde dehydrogenase family Pfam Description: Aldehyde dehydrogenase family
  misc_feature (290)..(442): Homolog of NCBI NO: 15234364 NR Description: aldehyde dehydrogenase like protein; protein id:
  misc_feature (1)..(187): Homolog of NCBI NO: 15234364 NR Description: aldehyde dehydrogenase like protein; protein id:
  misc_feature (1)..(442): Homolog of NCBI NO: 4973431 NR Description: putative aldehyde dehydrogenase OS-ALDH
  misc_feature (1)..(428): Homolog of NCBI NO: 23126018 NR Description: hypothetical protein [Nostoc punctiforme]
  misc_feature (1)..(442): Homolog of NCBI NO: 33317836 NR Description: aldehyde dehydrogenase [Oryza sativa (indica
  misc_feature (1)..(443): Homolog of NCBI NO: 17065876 NR Description: aldehyde dehydrogenase [Arabidopsis thaliana]
  misc_feature (1)..(443): Homolog of NCBI NO: 18418408 NR Description: putative aldehyde dehydrogenase
  misc_feature (1)..(441): Homolog of NCBI NO: 17065918 NR Description: aldehyde dehydrogenase [Craterostigma
  misc_feature (1)..(443): Homolog of NCBI NO: 15219358 NR Description: aldehyde dehydrogenase, putative
  misc_feature (1)..(443): Homolog of NCBI NO: 21536879 NR Description: aldehyde dehydrogenase, putative [Arabidopsis
MIICDNHEPEIVAALRDDLGKPELESSVYEVSLLRNSIKLALKQLKNWMAPEKAKTSLTTFPASAEIVSEPLGVVLVISAWNYPFLLSIDPVIGAISAGNAVVLKPSELAPASSALLTKLLEQYLDPSAVRVVEGAVTETSALLEQKWDKIFYTGSSKIGRVIMAAAAKHLTPVVLELGGKSPVVVDSDTDLKVTVRRIIVGKWGCNNGQACVSPDYILTTKEYAPKLIDAMKLELEKFYGKNPIESKDMSRIVNSNHFDRLSKLLDEKEVSDKIVYGGEKDRENLKIAPTILLDVPLDSLIMSEEIFGPLLPILTLNNLEESFDVIRSRPKPLAAYLFTHNKKLKERFTATVSAGGIVVNDIAVHLALHTLPFGGVGESGMGAYHGKFSFDAFSHKKAVLYRSLFGDSAVRYPPYSRGKLRLLKALVDSNIFDLFKVLLGLA

SEQ ID NO: 25929 - protein, 395 aa, Arabidopsis thaliana
  peptide (1)..(395): Ceres Seq. ID no. 12337942
  misc_feature (1)..(356): Pfam Name: Aldehyde dehydrogenase family Pfam Description: Aldehyde dehydrogenase family
  misc_feature (242)..(394): Homolog of NCBI NO: 15234364 NR Description: aldehyde dehydrogenase like protein; protein id:
  misc_feature (1)..(139): Homolog of NCBI NO: 15234364 NR Description: aldehyde dehydrogenase like protein; protein id:
  misc_feature (1)..(394): Homolog of NCBI NO: 4973431 NR Description: putative aldehyde dehydrogenase OS-ALDH
  misc_feature (1)..(380): Homolog of NCBI NO: 23126018 NR Description: hypothetical protein [Nostoc punctiforme]
  misc_feature (1)..(394): Homolog of NCBI NO: 33317836 NR Description: aldehyde dehydrogenase [Oryza sativa (indica
  misc_feature (1)..(395): Homolog of NCBI NO: 17065876 NR Description: aldehyde dehydrogenase [Arabidopsis thaliana]
  misc_feature (1)..(395): Homolog of NCBI NO: 18418408 NR Description: putative aldehyde dehydrogenase
  misc_feature (1)..(393): Homolog of NCBI NO: 17065918 NR Description: aldehyde dehydrogenase [Craterostigma
  misc_feature (1)..(395): Homolog of NCBI NO: 15219358 NR Description: aldehyde dehydrogenase, putative
  misc_feature (1)..(395): Homolog of NCBI NO: 21536879 NR Description: aldehyde dehydrogenase, putative [Arabidopsis
MAPEKAKTSLTTFPASAEIVSEPLGVVLVISAWNYPFLLSIDPVIGAISAGNAVVLKPSELAPASSALLTKLLEQYLDPSAVRVVEGAVTETSALLEQKWDKIFYTGSSKIGRVIMAAAAKHLTPVVLELGGKSPVVVDSDTDLKVTVRRIIVGKWGCNNGQACVSPDYILTTKEYAPKLIDAMKLELEKFYGKNPIESKDMSRIVNSNHFDRLSKLLDEKEVSDKIVYGGEKDRENLKIAPTILLDVPLDSLIMSEEIFGPLLPILTLNNLEESFDVIRSRPKPLAAYLFTHNKKLKERFTATVSAGGIVVNDIAVHLALHTLPFGGVGESGMGAYHGKFSFDAFSHKKAVLYRSLFGDSAVRYPPYSRGKLRLLKALVDSNIFDLFKVLLGLA

SEQ ID NO: 25930 - DNA, 999 bp, Arabidopsis thaliana
  misc_feature (1)..(999): Ceres Seq. ID no. 12372115
  misc_feature: MA Experiment ID: 108461 Result: Up-regulated in Transcription
  misc_feature: MA Experiment 108461 PARAMETER Experiment Name: At_Germinating_Seeds_cDNA_P Parameter: Age (day) Value: 1 vs. 0
  misc_feature: MA Experiment 108461 PARAMETER Experiment Name: At_Germinating_Seeds_cDNA_P Parameter: Tissue Value: Germinating Seeds
  misc_feature: MA Experiment ID: 108464 Result: Up-regulated in Transcription
  misc_feature: MA Experiment 108464 PARAMETER Experiment Name: At_Germinating_Seeds_cDNA_P Parameter: Age (day) Value: 4 vs. 0
  misc_feature: MA Experiment 108464 PARAMETER Experiment Name: At_Germinating_Seeds_cDNA_P Parameter: Tissue Value: Germinating Seeds
  misc_feature: MA Experiment ID: 108594 Result: Down-regulated in Transcription
  misc_feature: MA Experiment 108594 PARAMETER Experiment Name: At_Ler-rhl_Root_cDNA_P Parameter: Plant Line Value: null
  misc_feature: MA Experiment ID: 20000180 Result: Up-regulated in Transcription
  misc_feature: MA Experiment 20000180 PARAMETER Experiment Name: At_Germinating_Seeds_P Parameter: Age (hr) Value: 24 vs. 0
  misc_feature: MA Experiment 20000180 PARAMETER Experiment Name: At_Germinating_Seeds_P Parameter: Tissue Value: Germinating Seeds
  misc_feature: MA Experiment ID: 20000185 Result: Up-regulated in Transcription
  misc_feature: MA Experiment 20000185 PARAMETER Experiment Name: At_Roots__P Parameter: Age (day) Value: 7 vs. 21
  misc_feature: MA Experiment 20000185 PARAMETER Experiment Name: At_Roots__P Parameter: Organism Value: A. thaliana
  misc_feature: MA Experiment 20000185 PARAMETER Experiment Name: At_Roots__P Parameter: Tissue Value: Roots vs. Whole Plant
  misc_feature: MA Experiment ID: 20000227 Result: Up-regulated in Transcription
  misc_feature: MA Experiment 20000227 PARAMETER Experiment Name: At_Root-Tips-vs-Tops_P Parameter: Tissue Value: Root Tips vs. Root Tops
  misc_feature: MA Experiment ID: 20001910 Result: Down-regulated in Transcription
  misc_feature: MA Experiment 20001910 PARAMETER Experiment Name: At_Drought_Reproduction_P Parameter: Age (day) Value: 37
  misc_feature: MA Experiment 20001910 PARAMETER Experiment Name: At_Drought_Reproduction_P Parameter: Organism Value: A. thaliana
  misc_feature: MA Experiment 20001910 PARAMETER Experiment Name: At_Drought_Reproduction_P Parameter: Plant Line Value: WS
  misc_feature: MA Experiment 20001910 PARAMETER Experiment Name: At_Drought_Reproduction_P Parameter: Timepoint (day) Value: 7
  misc_feature: MA Experiment 20001910 PARAMETER Experiment Name: At_Drought_Reproduction_P Parameter: Tissue Value: Flowers
  misc_feature: MA Experiment 20001910 PARAMETER Experiment Name: At_Drought_Reproduction_P Parameter: Treatment Value: Drought vs. No Drought
ataattcaattcgctctccttctctctctatctctgccctttctttctctctcacacacaaacacgatccaatgacgacgagcaacaacgtgaacggatgtttcggagacacgaagctgaccaaagtgttcgtaggaggattggcttgggatactcacaaagaagcaatgtatgatcatttcatcaagtatggggacatcttggaggcagtcattatctccgacaaactcactcgccgttccaaaggatatggctttgtgactttcaaagatgcggaagctgccacgagagcttgcgaagactctactccgatcatcaatggccgccgtgccaactgcaatctcgcctccctcggtggccgtcttcgtaaatcccctaccatgacctctcctcaacaaggaccaaaaaatgggaacagggccacgccaccacatgttggaaatcattctcagtggtactacccgtccggattcacaaaccagcaacatcaacaacaaaatcatcaagccgttcctttctatgggtacccttccgcctacgttgccccgaacatgaccttcaatcaaaaagttggatatgtcggaggaacctatatgaacggatactatgcacaaatgcaaccacaaccgcaatcgcagccacaaccgcaatattaccaccatcacatgtatggtggaggacgagttatggttggggcagcaagtccaatggtgcctttctacactgtctatccttatcatcaatctcaagccatcgggtttccacaaccttcattttcgaaacctctttctttttccactcctcctatatcaggcacagttggaggagagagcatacagaagaaggccatacattgataggctagaagctgttaatcaaacgattgactcagcccaaaattattcattttatccatctcactaagctttatttttttctagagacttgtatttgtaataatttaatttcgttacatttaataatttattcattgaagcc

SEQ ID NO: 25931 - protein, 284 aa, Arabidopsis thaliana
  peptide (1)..(284): Ceres Seq. ID no. 12372116
  misc_feature (42)..(97): Pfam Name: RNA recognition motif. (a.k.a. RRM, RBD, or RNP domain) Pfam Description: RNA recognition motif. (a.k.a. RRM, RBD, or RNP
  misc_feature (24)..(266): Homolog of NCBI NO: 25518109 NR Description: T16E15.6 protein - Arabidopsis thaliana
  misc_feature (34)..(87): Homolog of NCBI NO: 27476063 NR Description: Hypothetical protein [Oryza sativa (japonica
  misc_feature (86)..(144): Homolog of NCBI NO: 27476063 NR Description: Hypothetical protein [Oryza sativa (japonica
  misc_feature (23)..(188): Homolog of NCBI NO: 25518498 NR Description: hypothetical protein F9H16.14 - Arabidopsis
  misc_feature (30)..(283): Homolog of NCBI NO: 22330665 NR Description: RRM-containing protein; protein id: At1g76460.1
  misc_feature (23)..(268): Homolog of NCBI NO: 18394923 NR Description: RRM-containing protein
  misc_feature (23)..(268): Homolog of NCBI NO: 23505939 NR Description: At1g20880/F9H16_14 [Arabidopsis thaliana]
  misc_feature (23)..(268): Homolog of NCBI NO: 15010636 NR Description: At1g20880/F9H16_14 [Arabidopsis thaliana]
  misc_feature (24)..(284): Homolog of NCBI NO: 15232579 NR Description: RRM-containing protein
  misc_feature (24)..(284): Homolog of NCBI NO: 21536939 NR Description: RNA binding protein-like [Arabidopsis thaliana]
NSIRSPSLSISALSFSLTHKHDPMTTSNNVNGCFGDTKLTKVFVGGLAWDTHKEAMYDHFIKYGDILEAVIISDKLTRRSKGYGFVTFKDAEAATRACEDSTPIINGRRANCNLASLGGRLRKSPTMTSPQQGPKNGNRATPPHVGNHSQWYYPSGFTNQQHQQQNHQAVPFYGYPSAYVAPNMTFNQKVGYVGGTYMNGYYAQMQPQPQSQPQPQYYHHHMYGGGRVMVGAASPMVPFYTVYPYHQSQAIGFPQPSFSKPLSFSTPPISGTVGGESIQKKAIH

SEQ ID NO: 25932 - protein, 261 aa, Arabidopsis thaliana
  peptide (1)..(261): Ceres Seq. ID no. 12372117
  misc_feature (19)..(74): Pfam Name: RNA recognition motif. (a.k.a. RRM, RBD, or RNP domain) Pfam Description: RNA recognition motif. (a.k.a. RRM, RBD, or RNP
  misc_feature (1)..(243): Homolog of NCBI NO: 25518109 NR Description: T16E15.6 protein - Arabidopsis thaliana
  misc_feature (11)..(64): Homolog of NCBI NO: 27476063 NR Description: Hypothetical protein [Oryza sativa (japonica
  misc_feature (63)..(121): Homolog of NCBI NO: 27476063 NR Description: Hypothetical protein [Oryza sativa (japonica
  misc_feature (1)..(165): Homolog of NCBI NO: 25518498 NR Description: hypothetical protein F9H16.14 - Arabidopsis
  misc_feature (7)..(260): Homolog of NCBI NO: 22330665 NR Description: RRM-containing protein; protein id: At1g76460.1
  misc_feature (1)..(245): Homolog of NCBI NO: 18394923 NR Description: RRM-containing protein
  misc_feature (1)..(245): Homolog of NCBI NO: 23505939 NR Description: At1g20880/F9H16_14 [Arabidopsis thaliana]
  misc_feature (1)..(245): Homolog of NCBI NO: 15010636 NR Description: At1g20880/F9H16_14 [Arabidopsis thaliana]
  misc_feature (1)..(261): Homolog of NCBI NO: 15232579 NR Description: RRM-containing protein
  misc_feature (1)..(261): Homolog of NCBI NO: 21536939 NR Description: RNA binding protein-like [Arabidopsis thaliana]
MTTSNNVNGCFGDTKLTKVFVGGLAWDTHKEAMYDHFIKYGDILEAVIISDKLTRRSKGYGFVTFKDAEAATRACEDSTPIINGRRANCNLASLGGRLRKSPTMTSPQQGPKNGNRATPPHVGNHSQWYYPSGFTNQQHQQQNHQAVPFYGYPSAYVAPNMTFNQKVGYVGGTYMNGYYAQMQPQPQSQPQPQYYHHHMYGGGRVMVGAASPMVPFYTVYPYHQSQAIGFPQPSFSKPLSFSTPPISGTVGGESIQKKAIH

SEQ ID NO: 25933 - protein, 229 aa, Arabidopsis thaliana
  peptide (1)..(229): Ceres Seq. ID no. 12372118
  misc_feature (1)..(42): Pfam Name: RNA recognition motif. (a.k.a. RRM, RBD, or RNP domain) Pfam Description: RNA recognition motif. (a.k.a. RRM, RBD, or RNP
  misc_feature (1)..(211): Homolog of NCBI NO: 25518109 NR Description: T16E15.6 protein - Arabidopsis thaliana
  misc_feature (1)..(32): Homolog of NCBI NO: 27476063 NR Description: Hypothetical protein [Oryza sativa (japonica
  misc_feature (31)..(89): Homolog of NCBI NO: 27476063 NR Description: Hypothetical protein [Oryza sativa (japonica
  misc_feature (1)..(133): Homolog of NCBI NO: 25518498 NR Description: hypothetical protein F9H16.14 - Arabidopsis
  misc_feature (1)..(228): Homolog of NCBI NO: 22330665 NR Description: RRM-containing protein; protein id: At1g76460.1
  misc_feature (1)..(213): Homolog of NCBI NO: 18394923 NR Description: RRM-containing protein
  misc_feature (1)..(213): Homolog of NCBI NO: 23505939 NR Description: At1g20880/F9H16_14 [Arabidopsis thaliana]
  misc_feature (1)..(213): Homolog of NCBI NO: 15010636 NR Description: At1g20880/F9H16_14 [Arabidopsis thaliana]
  misc_feature (1)..(229): Homolog of NCBI NO: 15232579 NR Description: RRM-containing protein
  misc_feature (1)..(229): Homolog of NCBI NO: 21536939 NR Description: RNA binding protein-like [Arabidopsis thaliana]
MYDHFIKYGDILEAVIISDKLTRRSKGYGFVTFKDAEAATRACEDSTPIINGRRANCNLASLGGRLRKSPTMTSPQQGPKNGNRATPPHVGNHSQWYYPSGFTNQQHQQQNHQAVPFYGYPSAYVAPNMTFNQKVGYVGGTYMNGYYAQMQPQPQSQPQPQYYHHHMYGGGRVMVGAASPMVPFYTVYPYHQSQAIGFPQPSFSKPLSFSTPPISGTVGGESIQKKAIH

SEQ ID NO: 25934 - DNA, 1750 bp, Arabidopsis thaliana
  misc_feature (1)..(1750): Ceres Seq. ID no. 12324223
  misc_feature: MA Experiment ID: 108434 Result: Down-regulated in Transcription
  misc_feature: MA Experiment 108434 PARAMETER Experiment Name: At_Root_Tips_cDNA_P Parameter: Tissue Value: Root Tips
  misc_feature: MA Experiment ID: 108461 Result: Up-regulated in Transcription
  misc_feature: MA Experiment 108461 PARAMETER Experiment Name: At_Germinating_Seeds_cDNA_P Parameter: Age (day) Value: 1 vs. 0
  misc_feature: MA Experiment 108461 PARAMETER Experiment Name: At_Germinating_Seeds_cDNA_P Parameter: Tissue Value: Germinating Seeds
  misc_feature: MA Experiment ID: 108462 Result: Up-regulated in Transcription
  misc_feature: MA Experiment 108462 PARAMETER Experiment Name: At_Germinating_Seeds_cDNA_P Parameter: Age (day) Value: 2 vs. 0
  misc_feature: MA Experiment 108462 PARAMETER Experiment Name: At_Germinating_Seeds_cDNA_P Parameter: Tissue Value: Germinating Seeds
  misc_feature: MA Experiment ID: 108463 Result: Up-regulated in Transcription
  misc_feature: MA Experiment 108463 PARAMETER Experiment Name: At_Germinating_Seeds_cDNA_P Parameter: Age (day) Value: 3 vs. 0
  misc_feature: MA Experiment 108463 PARAMETER Experiment Name: At_Germinating_Seeds_cDNA_P Parameter: Tissue Value: Germinating Seeds
  misc_feature: MA Experiment ID: 108464 Result: Up-regulated in Transcription
  misc_feature: MA Experiment 108464 PARAMETER Experiment Name: At_Germinating_Seeds_cDNA_P Parameter: Age (day) Value: 4 vs. 0
  misc_feature: MA Experiment 108464 PARAMETER Experiment Name: At_Germinating_Seeds_cDNA_P Parameter: Tissue Value: Germinating Seeds
  misc_feature: MA Experiment ID: 108469 Result: Up-regulated in Transcription
  misc_feature: MA Experiment ID: 108489 Result: Down-regulated in Transcription
  misc_feature: MA Experiment ID: 108572 Result: Up-regulated in Transcription
  misc_feature: MA Experiment 108572 PARAMETER Experiment Name: At_Drought_cDNA_P Parameter: Timepoint (hr) Value: 1
  misc_feature: MA Experiment 108572 PARAMETER Experiment Name: At_Drought_cDNA_P Parameter: Tissue Value: Aerial
  misc_feature: MA Experiment 108572 PARAMETER Experiment Name: At_Drought_cDNA_P Parameter: Treatment Value: Drought vs. No Drought
  misc_feature: MA Experiment ID: 108574 Result: Up-regulated in Transcription
  misc_feature: MA Experiment 108574 PARAMETER Experiment Name: At_Wounding__cDNA_P Parameter: Timepoint (hr) Value: 1
  misc_feature: MA Experiment 108574 PARAMETER Experiment Name: At_Wounding__cDNA_P Parameter: Tissue Value: Aerial
  misc_feature: MA Experiment 108574 PARAMETER Experiment Name: At_Wounding__cDNA_P Parameter: Treatment Value: Wounding vs. No Wounding
  misc_feature: MA Experiment ID: 108577 Result: Down-regulated in Transcription
  misc_feature: MA Experiment 108577 PARAMETER Experiment Name: At_42deg_Heat_cDNA_P Parameter: Temperature (deg C) Value: 42 vs. 22
  misc_feature: MA Experiment 108577 PARAMETER Experiment Name: At_42deg_Heat_cDNA_P Parameter: Timepoint (hr) Value: 6
  misc_feature: MA Experiment 108577 PARAMETER Experiment Name: At_42deg_Heat_cDNA_P Parameter: Tissue Value: Aerial
  misc_feature: MA Experiment ID: 108585 Result: Up-regulated in Transcription
  misc_feature: MA Experiment 108585 PARAMETER Experiment Name: At_5mM_NaNP_cDNA_P Parameter: Timepoint (hr) Value: 6
  misc_feature: MA Experiment 108585 PARAMETER Experiment Name: At_5mM_NaNP_cDNA_P Parameter: Tissue Value: Aerial
  misc_feature: MA Experiment 108585 PARAMETER Experiment Name: At_5mM_NaNP_cDNA_P Parameter: Treatment Value: null
  misc_feature: MA Experiment ID: 108594 Result: Down-regulated in Transcription
  misc_feature: MA Experiment 108594 PARAMETER Experiment Name: At_Ler-rhl_Root_cDNA_P Parameter: Plant Line Value: null
  misc_feature: MA Experiment ID: 108605 Result: Up-regulated in Transcription
  misc_feature: MA Experiment 108605 PARAMETER Experiment Name: At_100uM_ABA_cDNA_P Parameter: Timepoint (hr) Value: 6
  misc_feature: MA Experiment 108605 PARAMETER Experiment Name: At_100uM_ABA_cDNA_P Parameter: Tissue Value: Aerial
  misc_feature: MA Experiment 108605 PARAMETER Experiment Name: At_100uM_ABA_cDNA_P Parameter: Treatment Value: 100uM ABA vs. No Treatment
  misc_feature: MA Experiment ID: 108608 Result: Up-regulated in Transcription
  misc_feature: MA Experiment 108608 PARAMETER Experiment Name: At_100uM_ABA_cDNA_P Parameter: Timepoint (hr) Value: 1
  misc_feature: MA Experiment 108608 PARAMETER Experiment Name: At_100uM_ABA_cDNA_P Parameter: Tissue Value: Aerial
  misc_feature: MA Experiment 108608 PARAMETER Experiment Name: At_100uM_ABA_cDNA_P Parameter: Treatment Value: 100uM ABA vs. No Treatment
  misc_feature: MA Experiment ID: 108667 Result: Up-regulated in Transcription
  misc_feature: MA Experiment 108667 PARAMETER Experiment Name: At_2mM_SA_cDNA_P Parameter: Plant Line Value: WS
  misc_feature: MA Experiment 108667 PARAMETER Experiment Name: At_2mM_SA_cDNA_P Parameter: Timepoint (hr) Value: 1
  misc_feature: MA Experiment 108667 PARAMETER Experiment Name: At_2mM_SA_cDNA_P Parameter: Treatment Value: 2mM SA vs. No Treatment
  misc_feature: MA Experiment ID: 108668 Result: Up-regulated in Transcription
  misc_feature: MA Experiment 108668 PARAMETER Experiment Name: At_2mM_SA_cDNA_P Parameter: Plant Line Value: WS
  misc_feature: MA Experiment 108668 PARAMETER Experiment Name: At_2mM_SA_cDNA_P Parameter: Timepoint (hr) Value: 6
  misc_feature: MA Experiment 108668 PARAMETER Experiment Name: At_2mM_SA_cDNA_P Parameter: Treatment Value: 2mM SA vs. No Treatment
  misc_feature: MA Experiment ID: 20000030 Result: Down-regulated in Transcription
  misc_feature: MA Experiment 20000030 PARAMETER Experiment Name: At_CS6630_Roots_cDNA_P Parameter: Plant Line Value: CS6630 vs. WS
  misc_feature: MA Experiment 20000030 PARAMETER Experiment Name: At_CS6630_Roots_cDNA_P Parameter: Tissue Value: Roots
  misc_feature: MA Experiment ID: 20000111 Result: Down-regulated in Transcription
  misc_feature: MA Experiment 20000111 PARAMETER Experiment Name: At_42deg_Heat_cDNA_P Parameter: Temperature (deg C) Value: 42 vs. 22
  misc_feature: MA Experiment 20000111 PARAMETER Experiment Name: At_42deg_Heat_cDNA_P Parameter: Timepoint (hr) Value: 6
  misc_feature: MA Experiment 20000111 PARAMETER Experiment Name: At_42deg_Heat_cDNA_P Parameter: Tissue Value: Aerial
  misc_feature: MA Experiment ID: 20000113 Result: Down-regulated in Transcription
  misc_feature: MA Experiment 20000113 PARAMETER Experiment Name: At_42deg_Heat_cDNA_P Parameter: Temperature (deg C) Value: 42 vs. 22
  misc_feature: MA Experiment 20000113 PARAMETER Experiment Name: At_42deg_Heat_cDNA_P Parameter: Timepoint (hr) Value: 8
  misc_feature: MA Experiment 20000113 PARAMETER Experiment Name: At_42deg_Heat_cDNA_P Parameter: Tissue Value: Aerial
  misc_feature: MA Experiment ID: 20000166 Result: Up-regulated in Transcription
  misc_feature: MA Experiment 20000166 PARAMETER Experiment Name: At_100uM_ABA_P Parameter: Age (day) Value: 14
  misc_feature: MA Experiment 20000166 PARAMETER Experiment Name: At_100uM_ABA_P Parameter: Organism Value: A. thaliana
  misc_feature: MA Experiment 20000166 PARAMETER Experiment Name: At_100uM_ABA_P Parameter: Plant Line Value: WS
  misc_feature: MA Experiment 20000166 PARAMETER Experiment Name: At_100uM_ABA_P Parameter: Timepoint (hr) Value: 1
  misc_feature: MA Experiment 20000166 PARAMETER Experiment Name: At_100uM_ABA_P Parameter: Tissue Value: Aerial
  misc_feature: MA Experiment 20000166 PARAMETER Experiment Name: At_100uM_ABA_P Parameter: Treatment Value: 100uM ABA vs. No Treatment
  misc_feature: MA Experiment ID: 20000173 Result: Down-regulated in Transcription
  misc_feature: MA Experiment 20000173 PARAMETER Experiment Name: At_42deg_Heat_P Parameter: Age (day) Value: 14
  misc_feature: MA Experiment 20000173 PARAMETER Experiment Name: At_42deg_Heat_P Parameter: Organism Value: A. thaliana
  misc_feature: MA Experiment 20000173 PARAMETER Experiment Name: At_42deg_Heat_P Parameter: Plant Line Value: WS
  misc_feature: MA Experiment 20000173 PARAMETER Experiment Name: At_42deg_Heat_P Parameter: Temperature (deg C) Value: 42 vs. 22
  misc_feature: MA Experiment 20000173 PARAMETER Experiment Name: At_42deg_Heat_P Parameter: Timepoint (hr) Value: 6
  misc_feature: MA Experiment 20000173 PARAMETER Experiment Name: At_42deg_Heat_P Parameter: Tissue Value: Aerial
  misc_feature: MA Experiment ID: 20000180 Result: Up-regulated in Transcription
  misc_feature: MA Experiment 20000180 PARAMETER Experiment Name: At_Germinating_Seeds_P Parameter: Age (hr) Value: 24 vs. 0
  misc_feature: MA Experiment 20000180 PARAMETER Experiment Name: At_Germinating_Seeds_P Parameter: Tissue Value: Germinating Seeds
  misc_feature: MA Experiment ID: 20000182 Result: Up-regulated in Transcription
  misc_feature: MA Experiment 20000182 PARAMETER Experiment Name: At_2mM_SA_P Parameter: Age (day) Value: 14
  misc_feature: MA Experiment 20000182 PARAMETER Experiment Name: At_2mM_SA_P Parameter: Organism Value: A. thaliana
  misc_feature: MA Experiment 20000182 PARAMETER Experiment Name: At_2mM_SA_P Parameter: Plant Line Value: WS
  misc_feature: MA Experiment 20000182 PARAMETER Experiment Name: At_2mM_SA_P Parameter: Timepoint (hr) Value: 6
  misc_feature: MA Experiment 20000182 PARAMETER Experiment Name: At_2mM_SA_P Parameter: Tissue Value: Aerial
  misc_feature: MA Experiment 20000182 PARAMETER Experiment Name: At_2mM_SA_P Parameter: Treatment Value: 2mM SA vs. No Treatment
  misc_feature: MA Experiment ID: 20000224 Result: Up-regulated in Transcription
  misc_feature: MA Experiment ID: 20000234 Result: Down-regulated in Transcription
  misc_feature: MA Experiment 20000234 PARAMETER Experiment Name: At_Siliques_P Parameter: Age (day) Value: 21
  misc_feature: MA Experiment 20000234 PARAMETER Experiment Name: At_Siliques_P Parameter: Organism Value: A. thaliana
  misc_feature: MA Experiment 20000234 PARAMETER Experiment Name: At_Siliques_P Parameter: Plant Line Value: WS
  misc_feature: MA Experiment 20000234 PARAMETER Experiment Name: At_Siliques_P Parameter: Tissue Value: Less Than 5mm Siliques vs. Whole Plant
  misc_feature: MA Experiment ID: 20000439 Result: Up-regulated in Transcription
  misc_feature: MA Experiment 20000439 PARAMETER Experiment Name: At_Roots__P Parameter: Age (day) Value: 14 vs. 21
  misc_feature: MA Experiment 20000439 PARAMETER Experiment Name: At_Roots__P Parameter: Organism Value: A. thaliana
  misc_feature: MA Experiment 20000439 PARAMETER Experiment Name: At_Roots__P Parameter: Tissue Value: Roots vs. Whole Plant
  misc_feature: MA Experiment ID: 20000460 Result: Down-regulated in Transcription
  misc_feature: MA Experiment 20000460 PARAMETER Experiment Name: At_10percent_PEG_P Parameter: Age (day) Value: 12
  misc_feature: MA Experiment 20000460 PARAMETER Experiment Name: At_10percent_PEG_P Parameter: Organism Value: A. thaliana
  misc_feature: MA Experiment 20000460 PARAMETER Experiment Name: At_10percent_PEG_P Parameter: Plant Line Value: WS
  misc_feature: MA Experiment 20000460 PARAMETER Experiment Name: At_10percent_PEG_P Parameter: Timepoint (day) Value: 12
  misc_feature: MA Experiment 20000460 PARAMETER Experiment Name: At_10percent_PEG_P Parameter: Tissue Value: Whole Plant
  misc_feature: MA Experiment 20000460 PARAMETER Experiment Name: At_10percent_PEG_P Parameter: Treatment Value: 10percent PEG vs. No Treatment
  misc_feature: MA Experiment ID: 20000495 Result: Down-regulated in Transcription
  misc_feature: MA Experiment 20000495 PARAMETER Experiment Name: At_Guard_Cells_P Parameter: Harvest Date Value: 8/2/2002
  misc_feature: MA Experiment 20000495 PARAMETER Experiment Name: At_Guard_Cells_P Parameter: Organism Value: A. thaliana
  misc_feature: MA Experiment 20000495 PARAMETER Experiment Name: At_Guard_Cells_P Parameter: Tissue Value: Guard Cells vs. Leaves
  misc_feature: MA Experiment ID: 20000527 Result: Down-regulated in Transcription
  misc_feature: MA Experiment 20000527 PARAMETER Experiment Name: At_10percent_PEG_P Parameter: Age (day) Value: 20
  misc_feature: MA Experiment 20000527 PARAMETER Experiment Name: At_10percent_PEG_P Parameter: Organism Value: A. thaliana
  misc_feature: MA Experiment 20000527 PARAMETER Experiment Name: At_10percent_PEG_P Parameter: Plant Line Value: WS
  misc_feature: MA Experiment 20000527 PARAMETER Experiment Name: At_10percent_PEG_P Parameter: Timepoint (day) Value: 20
  misc_feature: MA Experiment 20000527 PARAMETER Experiment Name: At_10percent_PEG_P Parameter: Tissue Value: Whole Plant
  misc_feature: MA Experiment 20000527 PARAMETER Experiment Name: At_10percent_PEG_P Parameter: Treatment Value: 10percent PEG vs. No Treatment
  misc_feature: MA Experiment ID: 20000573 Result: Down-regulated in Transcription
  misc_feature: MA Experiment 20000573 PARAMETER Experiment Name: At_100uM_ABA_Mutants__P Parameter: Organism Value: A. thaliana
  misc_feature: MA Experiment 20000573 PARAMETER Experiment Name: At_100uM_ABA_Mutants__P Parameter: Plant Line Value: CS22 vs. Ler wt
  misc_feature: MA Experiment 20000573 PARAMETER Experiment Name: At_100uM_ABA_Mutants__P Parameter: Timepoint (hr) Value: N/A
  misc_feature: MA Experiment 20000573 PARAMETER Experiment Name: At_100uM_ABA_Mutants__P Parameter: Tissue Value: Whole Plant
  misc_feature: MA Experiment 20000573 PARAMETER Experiment Name: At_100uM_ABA_Mutants__P Parameter: Treatment Value: None
  misc_feature: MA Experiment ID: 20001248 Result: Down-regulated in Transcription
  misc_feature: MA Experiment 20001248 PARAMETER Experiment Name: At_Far-red-induction_P Parameter: Age (day) Value: 7
  misc_feature: MA Experiment 20001248 PARAMETER Experiment Name: At_Far-red-induction_P Parameter: Light Value: Far-red vs. White
  misc_feature: MA Experiment 20001248 PARAMETER Experiment Name: At_Far-red-induction_P Parameter: Organism Value: A. thaliana
  misc_feature: MA Experiment 20001248 PARAMETER Experiment Name: At_Far-red-induction_P Parameter: Plant Line Value: Columbia
  misc_feature: MA Experiment 20001248 PARAMETER Experiment Name: At_Far-red-induction_P Parameter: Timepoint (hr) Value: 4
  misc_feature: MA Experiment 20001248 PARAMETER Experiment Name: At_Far-red-induction_P Parameter: Tissue Value: Whole Plant
  misc_feature: MA Experiment ID: 20001450 Result: Down-regulated in Transcription
  misc_feature: MA Experiment 20001450 PARAMETER Experiment Name: At_Far-red-induction_P Parameter: Age (day) Value: 7
  misc_feature: MA Experiment 20001450 PARAMETER Experiment Name: At_Far-red-induction_P Parameter: Light Value: Far-red vs. White
  misc_feature: MA Experiment 20001450 PARAMETER Experiment Name: At_Far-red-induction_P Parameter: Organism Value: A. thaliana
  misc_feature: MA Experiment 20001450 PARAMETER Experiment Name: At_Far-red-induction_P Parameter: Plant Line Value: Columbia
  misc_feature: MA Experiment 20001450 PARAMETER Experiment Name: At_Far-red-induction_P Parameter: Timepoint (hr) Value: 8
  misc_feature: MA Experiment 20001450 PARAMETER Experiment Name: At_Far-red-induction_P Parameter: Tissue Value: Whole Plant
  misc_feature: MA Experiment ID: 20001911 Result: Up-regulated in Transcription
  misc_feature: MA Experiment 20001911 PARAMETER Experiment Name: At_Drought_Reproduction_P Parameter: Age (day) Value: 40
  misc_feature: MA Experiment 20001911 PARAMETER Experiment Name: At_Drought_Reproduction_P Parameter: Organism Value: A. thaliana
  misc_feature: MA Experiment 20001911 PARAMETER Experiment Name: At_Drought_Reproduction_P Parameter: Plant Line Value: WS
  misc_feature: MA Experiment 20001911 PARAMETER Experiment Name: At_Drought_Reproduction_P Parameter: Timepoint (day) Value: 10
  misc_feature: MA Experiment 20001911 PARAMETER Experiment Name: At_Drought_Reproduction_P Parameter: Tissue Value: Flowers
  misc_feature: MA Experiment 20001911 PARAMETER Experiment Name: At_Drought_Reproduction_P Parameter: Treatment Value: Drought vs. No Drought
aatgattcacacaaactctctatataaagccattacttaataccacacaaattacaaaaaaaaaaaagaaaaaaggagataataatcacaaactacaaaagtagaaagaagaaaaaagaacaaagtatcagttcttgaatatttgcatcaatggaggaatccaaaacacctcacgttgcgatcataccaagtccgggaatgggtcatctcataccactcgtcgagtttgctaaacgactcgtccatcttcacggcctcaccgttaccttcgtcatcgccggcgaaggtccaccatcaaaagctcagagaaccgtcctcgactctctcccttcttcaatctcctccgtctttctccctcctgttgatctcaccgatctctcttcgtccactcgcatcgaatctcggatctccctcaccgtgactcgttcaaacccggagctccggaaagtcttcgactcgttcgtggagggaggtcgtttgccaacggcgctcgtcgtcgatctcttcggtacggacgctttcgacgtggccgtagaatttcacgtgccaccgtatattttctacccaacaacggccaacgtcttgtcgttttttctccatttgcctaaactagacgaaacggtgtcgtgtgagttcagggaattaaccgaaccgcttatgcttcctggatgtgtaccggttgccgggaaagatttccttgacccggcccaagaccggaaagacgatgcatacaaatggcttctccataacaccaagaggtacaaagaagccgaaggtattcttgtgaataccttctttgagctagagccaaatgctataaaggccttgcaagaaccgggtcttgataaaccaccggtttatccggttggaccgttggttaacattggtaagcaagaggctaagcaaaccgaagagtctgaatgtttaaagtggttggataaccagccgctcggttcggttttatatgtgtcctttggtagtggcggtaccctcacatgtgagcagctcaatgagcttgctcttggtcttgcagatagtgagcaacggtttctttgggtcatacgaagtcctagtgggatcgctaattcgtcgtattttgattcacatagccaaacagatccattgacatttttaccaccgggatttttagagcggactaaaaaaagaggttttgtgatccctttttgggctccacaagcccaagtcttggcgcatccatccacgggaggatttttaactcattgtggatggaattcgactctagagagtgtagtaagcggtattccacttatagcatggccattatacgcagaacagaagatgaatgcggttttgttgagtgaagatattcgtgcggcacttaggccgcgtgccggggacgatgggttagttagaagagaagaggtggctagagtggtaaaaggattgatggaaggtgaagaaggcaaaggagtgaggaacaagatgaaggagttgaaggaagcagcttgtagggtgttgaaggatgatgggacttcgacaaaagcacttagtcttgtggccttaaagtggaaagcccacaaaaaagagttagagcaaaatggcaaccactaaatatttgatgttctaatatgatttgtataatcaacggtgggatttgtgcaaatgtgtttctgtatgtatatgtatgttctacttttctttgcttcgtttgtctcaacttttatttgtatatgtttttggcttttgattaattcgtagaagatgttgc

SEQ ID NO: 25935 - protein, 480 aa, Arabidopsis thaliana
  peptide (1)..(480): Ceres Seq. ID no. 12324224
  misc_feature (7)..(471): Pfam Name: UDP-glucoronosyl and UDP-glucosyl transferase Pfam Description: UDP-glucoronosyl and UDP-glucosyl transferase
  misc_feature (1)..(476): Homolog of NCBI NO: 15223396 NR Description: flavonol 3-o-glucosyltransferase, putative
  misc_feature (1)..(145): Homolog of NCBI NO: 7433902 NR Description: UTP-glucose glucosyltransferase homolog
  misc_feature (6)..(468): Homolog of NCBI NO: 34912752 NR Description: putative UTP-glucose glucosyltransferase
  misc_feature (5)..(469): Homolog of NCBI NO: 19911209 NR Description: glucosyltransferase-13 [Vigna angularis]
  misc_feature (12)..(480): Homolog of NCBI NO: 25286808 NR Description: protein probable UTP-glucose glucosyltransferase
  misc_feature (1)..(480): Homolog of NCBI NO: 15223392 NR Description: flavonol 3-o-glucosyltransferase, putative
  misc_feature (6)..(468): Homolog of NCBI NO: 28380078 NR Description: Hydroquinone glucosyltransferase (Arbutin
  misc_feature (3)..(468): Homolog of NCBI NO: 34912764 NR Description: putative UTP-glucose glucosyltransferase
  misc_feature (138)..(480): Homolog of NCBI NO: 7433902 NR Description: UTP-glucose glucosyltransferase homolog
  misc_feature (1)..(480): Homolog of NCBI NO: 15234056 NR Description: putative flavonol glucosyltransferase
MEESKTPHVAIIPSPGMGHLIPLVEFAKRLVHLHGLTVTFVIAGEGPPSKAQRTVLDSLPSSISSVFLPPVDLTDLSSSTRIESRISLTVTRSNPELRKVFDSFVEGGRLPTALVVDLFGTDAFDVAVEFHVPPYIFYPTTANVLSFFLHLPKLDETVSCEFRELTEPLMLPGCVPVAGKDFLDPAQDRKDDAYKWLLHNTKRYKEAEGILVNTFFELEPNAIKALQEPGLDKPPVYPVGPLVNIGKQEAKQTEESECLKWLDNQPLGSVLYVSFGSGGTLTCEQLNELALGLADSEQRFLWVIRSPSGIANSSYFDSHSQTDPLTFLPPGFLERTKKRGFVIPFWAPQAQVLAHPSTGGFLTHCGWNSTLESVVSGIPLIAWPLYAEQKMNAVLLSEDIRAALRPRAGDDGLVRREEVARVVKGLMEGEEGKGVRNKMKELKEAACRVLKDDGTSTKALSLVALKWKAHKKELEQNGNH

SEQ ID NO: 25936 - protein, 464 aa, Arabidopsis thaliana
  peptide (1)..(464): Ceres Seq. ID no. 12324225
  misc_feature (1)..(455): Pfam Name: UDP-glucoronosyl and UDP-glucosyl transferase Pfam Description: UDP-glucoronosyl and UDP-glucosyl transferase
  misc_feature (1)..(452): Homolog of NCBI NO: 34912752 NR Description: putative UTP-glucose glucosyltransferase
  misc_feature (1)..(452): Homolog of NCBI NO: 34912764 NR Description: putative UTP-glucose glucosyltransferase
  misc_feature (1)..(453): Homolog of NCBI NO: 19911209 NR Description: glucosyltransferase-13 [Vigna angularis]
  misc_feature (1)..(452): Homolog of NCBI NO: 28380078 NR Description: Hydroquinone glucosyltransferase (Arbutin
  misc_feature (1)..(464): Homolog of NCBI NO: 25286808 NR Description: protein probable UTP-glucose glucosyltransferase
  misc_feature (1)..(464): Homolog of NCBI NO: 15223392 NR Description: flavonol 3-o-glucosyltransferase, putative
  misc_feature (1)..(460): Homolog of NCBI NO: 15223396 NR Description: flavonol 3-o-glucosyltransferase, putative
  misc_feature (1)..(129): Homolog of NCBI NO: 7433902 NR Description: UTP-glucose glucosyltransferase homolog
  misc_feature (122)..(464): Homolog of NCBI NO: 7433902 NR Description: UTP-glucose glucosyltransferase homolog
  misc_feature (1)..(464): Homolog of NCBI NO: 15234056 NR Description: putative flavonol glucosyltransferase
MGHLIPLVEFAKRLVHLHGLTVTFVIAGEGPPSKAQRTVLDSLPSSISSVFLPPVDLTDLSSSTRIESRISLTVTRSNPELRKVFDSFVEGGRLPTALVVDLFGTDAFDVAVEFHVPPYIFYPTTANVLSFFLHLPKLDETVSCEFRELTEPLMLPGCVPVAGKDFLDPAQDRKDDAYKWLLHNTKRYKEAEGILVNTFFELEPNAIKALQEPGLDKPPVYPVGPLVNIGKQEAKQTEESECLKWLDNQPLGSVLYVSFGSGGTLTCEQLNELALGLADSEQRFLWVIRSPSGIANSSYFDSHSQTDPLTFLPPGFLERTKKRGFVIPFWAPQAQVLAHPSTGGFLTHCGWNSTLESVVSGIPLIAWPLYAEQKMNAVLLSEDIRAALRPRAGDDGLVRREEVARVVKGLMEGEEGKGVRNKMKELKEAACRVLKDDGTSTKALSLVALKWKAHKKELEQNGNH

SEQ ID NO: 25937 - protein, 311 aa, Arabidopsis thaliana
  peptide (1)..(311): Ceres Seq. ID no. 12324226
  misc_feature (1)..(302): Pfam Name: UDP-glucoronosyl and UDP-glucosyl transferase Pfam Description: UDP-glucoronosyl and UDP-glucosyl transferase
  misc_feature (1)..(285): Homolog of NCBI NO: 19911195 NR Description: glucosyltransferase-6 [Vigna angularis]
  misc_feature (1)..(299): Homolog of NCBI NO: 34912752 NR Description: putative UTP-glucose glucosyltransferase
  misc_feature (1)..(299): Homolog of NCBI NO: 34912764 NR Description: putative UTP-glucose glucosyltransferase
  misc_feature (1)..(300): Homolog of NCBI NO: 19911209 NR Description: glucosyltransferase-13 [Vigna angularis]
  misc_feature (1)..(299): Homolog of NCBI NO: 28380078 NR Description: Hydroquinone glucosyltransferase (Arbutin
  misc_feature (1)..(311): Homolog of NCBI NO: 25286808 NR Description: protein probable UTP-glucose glucosyltransferase
  misc_feature (1)..(311): Homolog of NCBI NO: 15223392 NR Description: flavonol 3-o-glucosyltransferase, putative
  misc_feature (1)..(307): Homolog of NCBI NO: 15223396 NR Description: flavonol 3-o-glucosyltransferase, putative
  misc_feature (1)..(311): Homolog of NCBI NO: 7433902 NR Description: UTP-glucose glucosyltransferase homolog
  misc_feature (1)..(311): Homolog of NCBI NO: 15234056 NR Description: putative flavonol glucosyltransferase
MLPGCVPVAGKDFLDPAQDRKDDAYKWLLHNTKRYKEAEGILVNTFFELEPNAIKALQEPGLDKPPVYPVGPLVNIGKQEAKQTEESECLKWLDNQPLGSVLYVSFGSGGTLTCEQLNELALGLADSEQRFLWVIRSPSGIANSSYFDSHSQTDPLTFLPPGFLERTKKRGFVIPFWAPQAQVLAHPSTGGFLTHCGWNSTLESVVSGIPLIAWPLYAEQKMNAVLLSEDIRAALRPRAGDDGLVRREEVARVVKGLMEGEEGKGVRNKMKELKEAACRVLKDDGTSTKALSLVALKWKAHKKELEQNGNH

SEQ ID NO: 25938 - DNA, 1688 bp, Arabidopsis thaliana
  misc_feature (1)..(1688): Ceres Seq. ID no. 13576727
  misc_feature: MA Experiment ID: 20000169 Result: Up-regulated in Transcription
  misc_feature: MA Experiment 20000169 PARAMETER Experiment Name: At_100uM_ABA_P Parameter: Age (day) Value: 14
  misc_feature: MA Experiment 20000169 PARAMETER Experiment Name: At_100uM_ABA_P Parameter: Organism Value: A. thaliana
  misc_feature: MA Experiment 20000169 PARAMETER Experiment Name: At_100uM_ABA_P Parameter: Plant Line Value: WS
  misc_feature: MA Experiment 20000169 PARAMETER Experiment Name: At_100uM_ABA_P Parameter: Timepoint (hr) Value: 6
  misc_feature: MA Experiment 20000169 PARAMETER Experiment Name: At_100uM_ABA_P Parameter: Tissue Value: Aerial
  misc_feature: MA Experiment 20000169 PARAMETER Experiment Name: At_100uM_ABA_P Parameter: Treatment Value: 100uM ABA vs. No Treatment
  misc_feature: MA Experiment ID: 20000179 Result: Up-regulated in Transcription
  misc_feature: MA Experiment 20000179 PARAMETER Experiment Name: At_Germinating_Seeds_P Parameter: Age (hr) Value: 6 vs. 0
  misc_feature: MA Experiment 20000179 PARAMETER Experiment Name: At_Germinating_Seeds_P Parameter: Tissue Value: Germinating Seeds
  misc_feature: MA Experiment ID: 20000180 Result: Up-regulated in Transcription
  misc_feature: MA Experiment 20000180 PARAMETER Experiment Name: At_Germinating_Seeds_P Parameter: Age (hr) Value: 24 vs. 0
  misc_feature: MA Experiment 20000180 PARAMETER Experiment Name: At_Germinating_Seeds_P Parameter: Tissue Value: Germinating Seeds
  misc_feature: MA Experiment ID: 20000234 Result: Down-regulated in Transcription
  misc_feature: MA Experiment 20000234 PARAMETER Experiment Name: At_Siliques_P Parameter: Age (day) Value: 21
  misc_feature: MA Experiment 20000234 PARAMETER Experiment Name: At_Siliques_P Parameter: Organism Value: A. thaliana
  misc_feature: MA Experiment 20000234 PARAMETER Experiment Name: At_Siliques_P Parameter: Plant Line Value: WS
  misc_feature: MA Experiment 20000234 PARAMETER Experiment Name: At_Siliques_P Parameter: Tissue Value: Less Than 5mm Siliques vs. Whole Plant
  misc_feature: MA Experiment ID: 20000264 Result: Up-regulated in Transcription
  misc_feature: MA Experiment 20000264 PARAMETER Experiment Name: At_Open_Flower_P Parameter: Age (day) Value: 21
  misc_feature: MA Experiment 20000264 PARAMETER Experiment Name: At_Open_Flower_P Parameter: Plant Line Value: WS
  misc_feature: MA Experiment 20000264 PARAMETER Experiment Name: At_Open_Flower_P Parameter: Tissue Value: Open Flower vs. Whole Plant
  misc_feature: MA Experiment ID: 20000455 Result: Up-regulated in Transcription
  misc_feature: MA Experiment 20000455 PARAMETER Experiment Name: At_100uM_ABA_P Parameter: Age (day) Value: 16
  misc_feature: MA Experiment 20000455 PARAMETER Experiment Name: At_100uM_ABA_P Parameter: Organism Value: A. thaliana
  misc_feature: MA Experiment 20000455 PARAMETER Experiment Name: At_100uM_ABA_P Parameter: Plant Line Value: WS
  misc_feature: MA Experiment 20000455 PARAMETER Experiment Name: At_100uM_ABA_P Parameter: Timepoint (hr) Value: 48
  misc_feature: MA Experiment 20000455 PARAMETER Experiment Name: At_100uM_ABA_P Parameter: Tissue Value: Aerial
  misc_feature: MA Experiment 20000455 PARAMETER Experiment Name: At_100uM_ABA_P Parameter: Treatment Value: 100uM ABA vs. No Treatment
  misc_feature: MA Experiment ID: 20000495 Result: Down-regulated in Transcription
  misc_feature: MA Experiment 20000495 PARAMETER Experiment Name: At_Guard_Cells_P Parameter: Harvest Date Value: 8/2/2002
  misc_feature: MA Experiment 20000495 PARAMETER Experiment Name: At_Guard_Cells_P Parameter: Organism Value: A. thaliana
  misc_feature: MA Experiment 20000495 PARAMETER Experiment Name: At_Guard_Cells_P Parameter: Tissue Value: Guard Cells vs. Leaves
  misc_feature: MA Experiment ID: 20000496 Result: Down-regulated in Transcription
  misc_feature: MA Experiment 20000496 PARAMETER Experiment Name: At_Guard_Cells_P Parameter: Harvest Date Value: 7/19/2002
  misc_feature: MA Experiment 20000496 PARAMETER Experiment Name: At_Guard_Cells_P Parameter: Organism Value: Canola
  misc_feature: MA Experiment 20000496 PARAMETER Experiment Name: At_Guard_Cells_P Parameter: Tissue Value: Guard Cells vs. Leaves
  misc_feature: MA Experiment ID: 20000794 Result: Up-regulated in Transcription
  misc_feature: MA Experiment 20000794 PARAMETER Experiment Name: At_Petals_P Parameter: Age (day) Value: 23-25 days
  misc_feature: MA Experiment 20000794 PARAMETER Experiment Name: At_Petals_P Parameter: Plant Line Value: WS
  misc_feature: MA Experiment 20000794 PARAMETER Experiment Name: At_Petals_P Parameter: Tissue Value: Petals vs. Whole plant
  misc_feature: MA Experiment ID: 20001451 Result: Down-regulated in Transcription
  misc_feature: MA Experiment 20001451 PARAMETER Experiment Name: At_Far-red-induction_P Parameter: Age (day) Value: 7
  misc_feature: MA Experiment 20001451 PARAMETER Experiment Name: At_Far-red-induction_P Parameter: Light Value: Far-red vs. White
  misc_feature: MA Experiment 20001451 PARAMETER Experiment Name: At_Far-red-induction_P Parameter: Organism Value: A. thaliana
  misc_feature: MA Experiment 20001451 PARAMETER Experiment Name: At_Far-red-induction_P Parameter: Plant Line Value: Columbia
  misc_feature: MA Experiment 20001451 PARAMETER Experiment Name: At_Far-red-induction_P Parameter: Timepoint (hr) Value: 24
  misc_feature: MA Experiment 20001451 PARAMETER Experiment Name: At_Far-red-induction_P Parameter: Tissue Value: Whole Plant
catcctaatcaaaaaatacaatcgtcttcttcatcattttctcttcttcttctccaagaaaacactgaagaagaaatggggttccttaagccaaccatggcgattctttttctagcgatggtcgccgtttcatcagccgtggacatgtcaatcatctcctacgacgagaaacatggcgtctccaccaccggtggccgtagcgaagccgaggttatgagtatctacgaggcatggttggtgaaacacggcaaggctcagagccagaactctcttgttgagaaagatcgacggttcgagatctttaaagacaatcttcgtttcgtcgatgaacataacgagaagaatcttagttatagattgggtttgactcgttttgcggatcttactaacgatgagtatagatccaagtatcttggagctaagatggagaagaaaggtgagagaaggactagcctacggtacgaggctcgtgtcggtgatgagctaccggagtctattgactggaggaagaaaggagccgtggctgaggtcaaagatcagggtggttgcgggagttgttgggcgttttcaaccattggagcagtggagggaataaaccagatcgtaaccggagacctaataaccttgtctgaacaagagttggtcgattgtgacacttcatacaacgaaggttgtaacggaggtcttatggactatgcttttgagttcattatcaagaatggtggaatcgatacagacaaagattatccttacaagggtgttgatggaacttgtgaccagatcaggaaaaacgctaaagttgtcactatcgattcatatgaggatgttccaacttacagcgaggaatcgttgaagaaagcagttgctcatcaacccattagcattgccattgaggctggtggtcgtgcgttccagctctatgattcgggtatatttgatggaagttgtggaacacaactagaccacggagttgtggcggttggatacggaactgagaacggcaaagattactggattgtgagaaactcatggggtaaaagctggggagagagtggatacctaaggatggcgcgtaacattgcgtcttcatcaggaaaatgtggaatcgcgattgaaccttcatacccgataaagaatggcgaaaacccgccaaacccgggaccttcacctccatctcccatcaagcctccaacccaatgtgacagttactacacttgtcctgagagcaacacttgttgttgtctgtttgagtatggcaagtattgctttgcttggggatgttgcccactagaagcagccacttgctgtgatgacaactatagttgctgccctcacgagtacccggtttgtgaccttgatcaaggaacctgtttattgagcaagaacagtccatttagtgttaaggccttaaagcgtaaacccgcaacgccattctggtcacaaggcagaaagaacattgcctaaacattgcttcttcaagaggactctggctcatgagagaagagatctctctgaagggatttatcagatgctttttaatgttgttgtttatgccataactagatacataaaaaatgcagctgttgggtttcgtgtatataaaaaaaggaccctatgtttcattcagtttcatagttgggtttcattgatacagtacatttattgttaattcaagaaaattgaatatt

SEQ ID NO: 25939 - protein, 487 aa, Arabidopsis thaliana
  peptide (1)..(487): Ceres Seq. ID no. 13576728
  misc_feature (162)..(377): Pfam Name: Papain family cysteine protease Pfam Description: Papain family cysteine protease
  misc_feature (29)..(487): Homolog of NCBI NO: 38345906 NR Description: OSJNBb0059K02.8 [Oryza sativa (japonica
  misc_feature (33)..(482): Homolog of NCBI NO: 13897890 NR Description: putative cysteine protease [Ipomoea batatas]
  misc_feature (34)..(480): Homolog of NCBI NO: 6682829 NR Description: cysteine protease component of protease-inhibitor
  misc_feature (29)..(487): Homolog of NCBI NO: 129231 NR Description: Oryzain alpha chain precursor
  misc_feature (35)..(477): Homolog of NCBI NO: 7435791 NR Description: cysteine proteinase (EC 3.4.22.-) 3 precursor -
  misc_feature (26)..(487): Homolog of NCBI NO: 18141283 NR Description: senescence-associated cysteine protease [Brassica
  misc_feature (26)..(461): Homolog of NCBI NO: 18141285 NR Description: senescence-associated cysteine protease [Brassica
  misc_feature (26)..(487): Homolog of NCBI NO: 18422289 NR Description: cysteine proteinase RD21A [Arabidopsis thaliana]
  misc_feature (26)..(487): Homolog of NCBI NO: 14517542 NR Description: F2G19.31/F2G19.31 [Arabidopsis thaliana]
  misc_feature (26)..(487): Homolog of NCBI NO: 18401614 NR Description: cysteine proteinase RD21A [Arabidopsis thaliana]
HPNQKIQSSSSSFSLLLLQENTEEEMGFLKPTMAILFLAMVAVSSAVDMSIISYDEKHGVSTTGGRSEAEVMSIYEAWLVKHGKAQSQNSLVEKDRRFEIFKDNLRFVDEHNEKNLSYRLGLTRFADLTNDEYRSKYLGAKMEKKGERRTSLRYEARVGDELPESIDWRKKGAVAEVKDQGGCGSCWAFSTIGAVEGINQIVTGDLITLSEQELVDCDTSYNEGCNGGLMDYAFEFIIKNGGIDTDKDYPYKGVDGTCDQIRKNAKVVTIDSYEDVPTYSEESLKKAVAHQPISIAIEAGGRAFQLYDSGIFDGSCGTQLDHGVVAVGYGTENGKDYWIVRNSWGKSWGESGYLRMARNIASSSGKCGIAIEPSYPIKNGENPPNPGPSPPSPIKPPTQCDSYYTCPESNTCCCLFEYGKYCFAWGCCPLEAATCCDDNYSCCPHEYPVCDLDQGTCLLSKNSPFSVKALKRKPATPFWSQGRKNIA

SEQ ID NO: 25940 - protein, 462 aa, Arabidopsis thaliana
  peptide (1)..(462): Ceres Seq. ID no. 13576729
  misc_feature (137)..(352): Pfam Name: Papain family cysteine protease Pfam Description: Papain family cysteine protease
  misc_feature (4)..(462): Homolog of NCBI NO: 38345906 NR Description: OSJNBb0059K02.8 [Oryza sativa (japonica
  misc_feature (8)..(457): Homolog of NCBI NO: 13897890 NR Description: putative cysteine protease [Ipomoea batatas]
  misc_feature (9)..(455): Homolog of NCBI NO: 6682829 NR Description: cysteine protease component of protease-inhibitor
  misc_feature (4)..(462): Homolog of NCBI NO: 129231 NR Description: Oryzain alpha chain precursor
  misc_feature (10)..(452): Homolog of NCBI NO: 7435791 NR Description: cysteine proteinase (EC 3.4.22.-) 3 precursor -
  misc_feature (1)..(462): Homolog of NCBI NO: 18141283 NR Description: senescence-associated cysteine protease [Brassica
  misc_feature (1)..(436): Homolog of NCBI NO: 18141285 NR Description: senescence-associated cysteine protease [Brassica
  misc_feature (1)..(462): Homolog of NCBI NO: 18422289 NR Description: cysteine proteinase RD21A [Arabidopsis thaliana]
  misc_feature (1)..(462): Homolog of NCBI NO: 14517542 NR Description: F2G19.31/F2G19.31 [Arabidopsis thaliana]
  misc_feature (1)..(462): Homolog of NCBI NO: 18401614 NR Description: cysteine proteinase RD21A [Arabidopsis thaliana]
MGFLKPTMAILFLAMVAVSSAVDMSIISYDEKHGVSTTGGRSEAEVMSIYEAWLVKHGKAQSQNSLVEKDRRFEIFKDNLRFVDEHNEKNLSYRLGLTRFADLTNDEYRSKYLGAKMEKKGERRTSLRYEARVGDELPESIDWRKKGAVAEVKDQGGCGSCWAFSTIGAVEGINQIVTGDLITLSEQELVDCDTSYNEGCNGGLMDYAFEFIIKNGGIDTDKDYPYKGVDGTCDQIRKNAKVVTIDSYEDVPTYSEESLKKAVAHQPISIAIEAGGRAFQLYDSGIFDGSCGTQLDHGVVAVGYGTENGKDYWIVRNSWGKSWGESGYLRMARNIASSSGKCGIAIEPSYPIKNGENPPNPGPSPPSPIKPPTQCDSYYTCPESNTCCCLFEYGKYCFAWGCCPLEAATCCDDNYSCCPHEYPVCDLDQGTCLLSKNSPFSVKALKRKPATPFWSQGRKNIA

SEQ ID NO: 25941 - protein, 455 aa, Arabidopsis thaliana
  peptide (1)..(455): Ceres Seq. ID no. 13576730
  misc_feature (130)..(345): Pfam Name: Papain family cysteine protease Pfam Description: Papain family cysteine protease
  misc_feature (1)..(455): Homolog of NCBI NO: 38345906 NR Description: OSJNBb0059K02.8 [Oryza sativa (japonica
  misc_feature (1)..(450): Homolog of NCBI NO: 13897890 NR Description: putative cysteine protease [Ipomoea batatas]
  misc_feature (2)..(448): Homolog of NCBI NO: 6682829 NR Description: cysteine protease component of protease-inhibitor
  misc_feature (1)..(455): Homolog of NCBI NO: 129231 NR Description: Oryzain alpha chain precursor
  misc_feature (3)..(445): Homolog of NCBI NO: 7435791 NR Description: cysteine proteinase (EC 3.4.22.-) 3 precursor -
  misc_feature (1)..(455): Homolog of NCBI NO: 18141283 NR Description: senescence-associated cysteine protease [Brassica
  misc_feature (1)..(429): Homolog of NCBI NO: 18141285 NR Description: senescence-associated cysteine protease [Brassica
  misc_feature (1)..(455): Homolog of NCBI NO: 18422289 NR Description: cysteine proteinase RD21A [Arabidopsis thaliana]
  misc_feature (1)..(455): Homolog of NCBI NO: 14517542 NR Description: F2G19.31/F2G19.31 [Arabidopsis thaliana]
  misc_feature (1)..(455): Homolog of NCBI NO: 18401614 NR Description: cysteine proteinase RD21A [Arabidopsis thaliana]
MAILFLAMVAVSSAVDMSIISYDEKHGVSTTGGRSEAEVMSIYEAWLVKHGKAQSQNSLVEKDRRFEIFKDNLRFVDEHNEKNLSYRLGLTRFADLTNDEYRSKYLGAKMEKKGERRTSLRYEARVGDELPESIDWRKKGAVAEVKDQGGCGSCWAFSTIGAVEGINQIVTGDLITLSEQELVDCDTSYNEGCNGGLMDYAFEFIIKNGGIDTDKDYPYKGVDGTCDQIRKNAKVVTIDSYEDVPTYSEESLKKAVAHQPISIAIEAGGRAFQLYDSGIFDGSCGTQLDHGVVAVGYGTENGKDYWIVRNSWGKSWGESGYLRMARNIASSSGKCGIAIEPSYPIKNGENPPNPGPSPPSPIKPPTQCDSYYTCPESNTCCCLFEYGKYCFAWGCCPLEAATCCDDNYSCCPHEYPVCDLDQGTCLLSKNSPFSVKALKRKPATPFWSQGRKNIA

SEQ ID NO: 25942 - DNA, 698 bp, Arabidopsis thaliana
  misc_feature (1)..(698): Ceres Seq. ID no. 12384735
  misc_feature: MA Experiment ID: 108463 Result: Down-regulated in Transcription
  misc_feature: MA Experiment 108463 PARAMETER Experiment Name: At_Germinating_Seeds_cDNA_P Parameter: Age (day) Value: 3 vs. 0
  misc_feature: MA Experiment 108463 PARAMETER Experiment Name: At_Germinating_Seeds_cDNA_P Parameter: Tissue Value: Germinating Seeds
  misc_feature: MA Experiment ID: 20000451 Result: Up-regulated in Transcription
  misc_feature: MA Experiment 20000451 PARAMETER Experiment Name: At_CS6879_Shoots-Roots_P Parameter: Age (day) Value: 14
  misc_feature: MA Experiment 20000451 PARAMETER Experiment Name: At_CS6879_Shoots-Roots_P Parameter: Organism Value: A. thaliana
  misc_feature: MA Experiment 20000451 PARAMETER Experiment Name: At_CS6879_Shoots-Roots_P Parameter: Plant Line Value: CS6879 vs. WS
  misc_feature: MA Experiment 20000451 PARAMETER Experiment Name: At_CS6879_Shoots-Roots_P Parameter: Tissue Value: Roots
  misc_feature: MA Experiment ID: 20000794 Result: Down-regulated in Transcription
  misc_feature: MA Experiment 20000794 PARAMETER Experiment Name: At_Petals_P Parameter: Age (day) Value: 23-25 days
  misc_feature: MA Experiment 20000794 PARAMETER Experiment Name: At_Petals_P Parameter: Plant Line Value: WS
  misc_feature: MA Experiment 20000794 PARAMETER Experiment Name: At_Petals_P Parameter: Tissue Value: Petals vs. Whole plant
aaggaaccttgtgtggtcatcgtcttcgtacctttctgctttctacgccgtcaaaatctaactgctcgacagtgaccatgcaaagctcaatgacaatggaactacgaccatcaggtgattccggttcatctgacgtcgatgctgagatcagcgatggcttttcaccgctcgatacttctcacagagacgtcgctgatgaaggttcgttgctgagaagagcagagatgtatcaagactacatgaagcaagtaccaatcccgacgaatcgtggctcgttgattccgttcacaagctgggttggattaagcatttcaatgaaacagctttatggtcagcctctacattacctcacgaatgttctcttacaacgatgggatcaatcacgattcggtactgattctgaagaacagaggttggattctatcattcatcctactaaagctgaagctactatctggcttgttgaagagattcatcgactcactccttctcatcttcacatggctcttctttggagatctgatcctatgtatcactctttcattgacccaatctttcctgagaaatgaacaagttcttgaattgtgatgaaccatccttttttgtatctacttttgcttttagaaaccttgttcaagcattgaagcttatatgtataattgcagggtcttattcaataaaatgtgaatcttccttcc

SEQ ID NO: 25943 - protein, 188 aa, Arabidopsis thaliana
  peptide (1)..(188): Ceres Seq. ID no. 12384736
  misc_feature (26)..(145): Homolog of NCBI NO: 30102560 NR Description: At3g22680 [Arabidopsis thaliana]
  misc_feature (26)..(188): Homolog of NCBI NO: 30686741 NR Description: expressed protein [Arabidopsis thaliana]
GTLCGHRLRTFLLSTPSKSNCSTVTMQSSMTMELRPSGDSGSSDVDAEISDGFSPLDTSHRDVADEGSLLRRAEMYQDYMKQVPIPTNRGSLIPFTSWVGLSISMKQLYGQPLHYLTNVLLQRWDQSRFGTDSEEQRLDSIIHPTKAEATIWLVEEIHRLTPSHLHMALLWRSDPMYHSFIDPIFPEK

SEQ ID NO: 25944 - protein, 163 aa, Arabidopsis thaliana
  peptide (1)..(163): Ceres Seq. ID no. 12384737
  misc_feature (1)..(120): Homolog of NCBI NO: 30102560 NR Description: At3g22680 [Arabidopsis thaliana]
  misc_feature (1)..(163): Homolog of NCBI NO: 30686741 NR Description: expressed protein [Arabidopsis thaliana]
MQSSMTMELRPSGDSGSSDVDAEISDGFSPLDTSHRDVADEGSLLRRAEMYQDYMKQVPIPTNRGSLIPFTSWVGLSISMKQLYGQPLHYLTNVLLQRWDQSRFGTDSEEQRLDSIIHPTKAEATIWLVEEIHRLTPSHLHMALLWRSDPMYHSFIDPIFPEK

SEQ ID NO: 25945 - protein, 159 aa, Arabidopsis thaliana
  peptide (1)..(159): Ceres Seq. ID no. 12384738
  misc_feature (1)..(116): Homolog of NCBI NO: 30102560 NR Description: At3g22680 [Arabidopsis thaliana]
  misc_feature (1)..(159): Homolog of NCBI NO: 30686741 NR Description: expressed protein [Arabidopsis thaliana]
MTMELRPSGDSGSSDVDAEISDGFSPLDTSHRDVADEGSLLRRAEMYQDYMKQVPIPTNRGSLIPFTSWVGLSISMKQLYGQPLHYLTNVLLQRWDQSRFGTDSEEQRLDSIIHPTKAEATIWLVEEIHRLTPSHLHMALLWRSDPMYHSFIDPIFPEK

SEQ ID NO: 25946 - DNA, 901 bp, Arabidopsis thaliana
  misc_feature (1)..(901): Ceres Seq. ID no. 12323387
  misc_feature: MA Experiment ID: 108462 Result: Down-regulated in Transcription
  misc_feature: MA Experiment 108462 PARAMETER Experiment Name: At_Germinating_Seeds_cDNA_P Parameter: Age (day) Value: 2 vs. 0
  misc_feature: MA Experiment 108462 PARAMETER Experiment Name: At_Germinating_Seeds_cDNA_P Parameter: Tissue Value: Germinating Seeds
  misc_feature: MA Experiment ID: 108463 Result: Down-regulated in Transcription
  misc_feature: MA Experiment 108463 PARAMETER Experiment Name: At_Germinating_Seeds_cDNA_P Parameter: Age (day) Value: 3 vs. 0
  misc_feature: MA Experiment 108463 PARAMETER Experiment Name: At_Germinating_Seeds_cDNA_P Parameter: Tissue Value: Germinating Seeds
  misc_feature: MA Experiment ID: 108577 Result: Up-regulated in Transcription
  misc_feature: MA Experiment 108577 PARAMETER Experiment Name: At_42deg_Heat_cDNA_P Parameter: Temperature (deg C) Value: 42 vs. 22
  misc_feature: MA Experiment 108577 PARAMETER Experiment Name: At_42deg_Heat_cDNA_P Parameter: Timepoint (hr) Value: 6
  misc_feature: MA Experiment 108577 PARAMETER Experiment Name: At_42deg_Heat_cDNA_P Parameter: Tissue Value: Aerial
  misc_feature: MA Experiment ID: 20000111 Result: Up-regulated in Transcription
  misc_feature: MA Experiment 20000111 PARAMETER Experiment Name: At_42deg_Heat_cDNA_P Parameter: Temperature (deg C) Value: 42 vs. 22
  misc_feature: MA Experiment 20000111 PARAMETER Experiment Name: At_42deg_Heat_cDNA_P Parameter: Timepoint (hr) Value: 6
  misc_feature: MA Experiment 20000111 PARAMETER Experiment Name: At_42deg_Heat_cDNA_P Parameter: Tissue Value: Aerial
  misc_feature: MA Experiment ID: 20000112 Result: Up-regulated in Transcription
  misc_feature: MA Experiment 20000112 PARAMETER Experiment Name: At_42deg_Heat_cDNA_P Parameter: Temperature (deg C) Value: 42 vs. 22
  misc_feature: MA Experiment 20000112 PARAMETER Experiment Name: At_42deg_Heat_cDNA_P Parameter: Timepoint (hr) Value: 2
  misc_feature: MA Experiment 20000112 PARAMETER Experiment Name: At_42deg_Heat_cDNA_P Parameter: Tissue Value: Aerial
  misc_feature: MA Experiment ID: 20000113 Result: Up-regulated in Transcription
  misc_feature: MA Experiment 20000113 PARAMETER Experiment Name: At_42deg_Heat_cDNA_P Parameter: Temperature (deg C) Value: 42 vs. 22
  misc_feature: MA Experiment 20000113 PARAMETER Experiment Name: At_42deg_Heat_cDNA_P Parameter: Timepoint (hr) Value: 8
  misc_feature: MA Experiment 20000113 PARAMETER Experiment Name: At_42deg_Heat_cDNA_P Parameter: Tissue Value: Aerial
  misc_feature: MA Experiment ID: 20000144 Result: Up-regulated in Transcription
  misc_feature: MA Experiment 20000144 PARAMETER Experiment Name: At_42deg_Heat_cDNA_P Parameter: Temperature (deg C) Value: 42 vs. 22
  misc_feature: MA Experiment 20000144 PARAMETER Experiment Name: At_42deg_Heat_cDNA_P Parameter: Timepoint (hr) Value: 1
  misc_feature: MA Experiment 20000144 PARAMETER Experiment Name: At_42deg_Heat_cDNA_P Parameter: Tissue Value: Aerial
  misc_feature: MA Experiment ID: 20000173 Result: Up-regulated in Transcription
  misc_feature: MA Experiment 20000173 PARAMETER Experiment Name: At_42deg_Heat_P Parameter: Age (day) Value: 14
  misc_feature: MA Experiment 20000173 PARAMETER Experiment Name: At_42deg_Heat_P Parameter: Organism Value: A. thaliana
  misc_feature: MA Experiment 20000173 PARAMETER Experiment Name: At_42deg_Heat_P Parameter: Plant Line Value: WS
  misc_feature: MA Experiment 20000173 PARAMETER Experiment Name: At_42deg_Heat_P Parameter: Temperature (deg C) Value: 42 vs. 22
  misc_feature: MA Experiment 20000173 PARAMETER Experiment Name: At_42deg_Heat_P Parameter: Timepoint (hr) Value: 6
  misc_feature: MA Experiment 20000173 PARAMETER Experiment Name: At_42deg_Heat_P Parameter: Tissue Value: Aerial
acatagccgctctgtttcttcttctctttccctcacccttatcgccgctgtttcgtcttgaacaatcagattaggtgttcttctgtggataaaagatgaatcattgtagccttcagcagaatgcattcttgtctcgtgaagaatcgagaggatttgttcctatctattctcatccagtggactctgttgtttgccctaagccccgtcgtgcaaacaacgttattcgtccctttagattacattttagtctttcaggagctgatgatgtatgtgattctaaagccggggaagatcttttggacatatttcgtagaaaggaatcagtatcatctagatcacccccatttttccttgggtctccccctagccgagcagcaaacccgttagctcaagatgcacgctttggagatgagaaactcaacactgtctcaccctcactctcccctcttctcccatctgcatctcgtgttaaaagtggttgtggtagaatgaagtttggggtgaaaccagcaactgttagagtagaagggtttgattgcttgaacagggaccgcccaaactcaagtatccctgccatggcctagaaagaagaagaaggaataaagaggattcacaaagtgtacataaaatccagactcaaagactccattttttgaagaagtatatatagttttgcagaagaagaggaaaaggaagattaacgatcgctcaagcttttaccgcagttttctgtgattatgatgaggttcaatgttgtgtatatatatgtatctaccgtaattaagaggtaaggtcgagactttatgtgttaacttcttatttctgaagtctcgttgtaacatattaaaccaatttgggagtgttgttctcttttctgtgtataataaccattcttcttttt

SEQ ID NO: 25947 - protein, 162 aa, Arabidopsis thaliana
  peptide (1)..(162): Ceres Seq. ID no. 12323388
  misc_feature (1)..(162): Homolog of NCBI NO: 15222278 NR Description: unknown protein; protein id: At1g13390.1
  misc_feature (1)..(162): Homolog of NCBI NO: 18409044 NR Description: expressed protein
  misc_feature (1)..(162): Homolog of NCBI NO: 11762168 NR Description: AT5g16110 [Arabidopsis thaliana]
  misc_feature (1)..(162): Homolog of NCBI NO: 30685676 NR Description: expressed protein [Arabidopsis thaliana]
  misc_feature (1)..(162): Homolog of NCBI NO: 18396232 NR Description: Expressed protein
MNHCSLQQNAFLSREESRGFVPIYSHPVDSVVCPKPRRANNVIRPFRLHFSLSGADDVCDSKAGEDLLDIFRRKESVSSRSPPFFLGSPPSRAANPLAQDARFGDEKLNTVSPSLSPLLPSASRVKSGCGRMKFGVKPATVRVEGFDCLNRDRPNSSIPAMA

SEQ ID NO: 25948 - protein, 88 aa, Arabidopsis thaliana
  peptide (1)..(88): Ceres Seq. ID no. 12323389
MHSCLVKNREDLFLSILIQWTLLFALSPVVQTTLFVPLDYILVFQELMMYVILKPGKIFWTYFVERNQYHLDHPHFSLGLPLAEQQTR

SEQ ID NO: 25949 - DNA, 704 bp, Arabidopsis thaliana
  misc_feature (1)..(704): Ceres Seq. ID no. 12323384
  misc_feature: MA Experiment ID: 108434 Result: Up-regulated in Transcription
  misc_feature: MA Experiment 108434 PARAMETER Experiment Name: At_Root_Tips_cDNA_P Parameter: Tissue Value: Root Tips
  misc_feature: MA Experiment ID: 108462 Result: Down-regulated in Transcription
  misc_feature: MA Experiment 108462 PARAMETER Experiment Name: At_Germinating_Seeds_cDNA_P Parameter: Age (day) Value: 2 vs. 0
  misc_feature: MA Experiment 108462 PARAMETER Experiment Name: At_Germinating_Seeds_cDNA_P Parameter: Tissue Value: Germinating Seeds
  misc_feature: MA Experiment ID: 108463 Result: Down-regulated in Transcription
  misc_feature: MA Experiment 108463 PARAMETER Experiment Name: At_Germinating_Seeds_cDNA_P Parameter: Age (day) Value: 3 vs. 0
  misc_feature: MA Experiment 108463 PARAMETER Experiment Name: At_Germinating_Seeds_cDNA_P Parameter: Tissue Value: Germinating Seeds
  misc_feature: MA Experiment ID: 108464 Result: Down-regulated in Transcription
  misc_feature: MA Experiment 108464 PARAMETER Experiment Name: At_Germinating_Seeds_cDNA_P Parameter: Age (day) Value: 4 vs. 0
  misc_feature: MA Experiment 108464 PARAMETER Experiment Name: At_Germinating_Seeds_cDNA_P Parameter: Tissue Value: Germinating Seeds
  misc_feature: MA Experiment ID: 108573 Result: Down-regulated in Transcription
  misc_feature: MA Experiment 108573 PARAMETER Experiment Name: At_Drought_cDNA_P Parameter: Timepoint (hr) Value: 6
  misc_feature: MA Experiment 108573 PARAMETER Experiment Name: At_Drought_cDNA_P Parameter: Tissue Value: Aerial
  misc_feature: MA Experiment 108573 PARAMETER Experiment Name: At_Drought_cDNA_P Parameter: Treatment Value: Drought vs. No Drought
  misc_feature: MA Experiment ID: 20000234 Result: Up-regulated in Transcription
  misc_feature: MA Experiment 20000234 PARAMETER Experiment Name: At_Siliques_P Parameter: Age (day) Value: 21
  misc_feature: MA Experiment 20000234 PARAMETER Experiment Name: At_Siliques_P Parameter: Organism Value: A. thaliana
  misc_feature: MA Experiment 20000234 PARAMETER Experiment Name: At_Siliques_P Parameter: Plant Line Value: WS
  misc_feature: MA Experiment 20000234 PARAMETER Experiment Name: At_Siliques_P Parameter: Tissue Value: Less Than 5mm Siliques vs. Whole Plant
  misc_feature: MA Experiment ID: 20000437 Result: Down-regulated in Transcription
  misc_feature: MA Experiment 20000437 PARAMETER Experiment Name: At_Drought_P Parameter: Age (day) Value: 8
  misc_feature: MA Experiment 20000437 PARAMETER Experiment Name: At_Drought_P Parameter: Organism Value: A. thaliana
  misc_feature: MA Experiment 20000437 PARAMETER Experiment Name: At_Drought_P Parameter: Plant Line Value: WS
  misc_feature: MA Experiment 20000437 PARAMETER Experiment Name: At_Drought_P Parameter: Timepoint (hr) Value: 24
  misc_feature: MA Experiment 20000437 PARAMETER Experiment Name: At_Drought_P Parameter: Tissue Value: Whole Plant
  misc_feature: MA Experiment 20000437 PARAMETER Experiment Name: At_Drought_P Parameter: Treatment Value: Drought vs. No Drought
  misc_feature: MA Experiment ID: 20000794 Result: Down-regulated in Transcription
  misc_feature: MA Experiment 20000794 PARAMETER Experiment Name: At_Petals_P Parameter: Age (day) Value: 23-25 days
  misc_feature: MA Experiment 20000794 PARAMETER Experiment Name: At_Petals_P Parameter: Plant Line Value: WS
  misc_feature: MA Experiment 20000794 PARAMETER Experiment Name: At_Petals_P Parameter: Tissue Value: Petals vs. Whole plant
  misc_feature: MA Experiment ID: 20001557 Result: Up-regulated in Transcription
  misc_feature: MA Experiment 20001557 PARAMETER Experiment Name: At_Drought_Soil_Dry_P Parameter: Age (day) Value: 27
  misc_feature: MA Experiment 20001557 PARAMETER Experiment Name: At_Drought_Soil_Dry_P Parameter: Organism Value: A. thaliana
  misc_feature: MA Experiment 20001557 PARAMETER Experiment Name: At_Drought_Soil_Dry_P Parameter: Plant Line Value: WS
  misc_feature: MA Experiment 20001557 PARAMETER Experiment Name: At_Drought_Soil_Dry_P Parameter: Post Timepoint (hr) Value: 3
  misc_feature: MA Experiment 20001557 PARAMETER Experiment Name: At_Drought_Soil_Dry_P Parameter: Post-Treatment Value: Re-Water vs. No Drought
  misc_feature: MA Experiment 20001557 PARAMETER Experiment Name: At_Drought_Soil_Dry_P Parameter: Timepoint (day) Value: 13
  misc_feature: MA Experiment 20001557 PARAMETER Experiment Name: At_Drought_Soil_Dry_P Parameter: Treatment Value: Drought vs. No Drought
  misc_feature: MA Experiment ID: 20001558 Result: Up-regulated in Transcription
  misc_feature: MA Experiment 20001558 PARAMETER Experiment Name: At_Drought_Soil_Dry_P Parameter: Age (day) Value: 27
  misc_feature: MA Experiment 20001558 PARAMETER Experiment Name: At_Drought_Soil_Dry_P Parameter: Organism Value: A. thaliana
  misc_feature: MA Experiment 20001558 PARAMETER Experiment Name: At_Drought_Soil_Dry_P Parameter: Plant Line Value: WS
  misc_feature: MA Experiment 20001558 PARAMETER Experiment Name: At_Drought_Soil_Dry_P Parameter: Post Timepoint (hr) Value: 6
  misc_feature: MA Experiment 20001558 PARAMETER Experiment Name: At_Drought_Soil_Dry_P Parameter: Post-Treatment Value: Re-Water vs. No Drought
  misc_feature: MA Experiment 20001558 PARAMETER Experiment Name: At_Drought_Soil_Dry_P Parameter: Timepoint (day) Value: 13
  misc_feature: MA Experiment 20001558 PARAMETER Experiment Name: At_Drought_Soil_Dry_P Parameter: Treatment Value: Drought vs. No Drought
  misc_feature: MA Experiment ID: 20001560 Result: Up-regulated in Transcription
  misc_feature: MA Experiment 20001560 PARAMETER Experiment Name: At_Drought_Soil_Dry_P Parameter: Age (day) Value: 28
  misc_feature: MA Experiment 20001560 PARAMETER Experiment Name: At_Drought_Soil_Dry_P Parameter: Organism Value: A. thaliana
  misc_feature: MA Experiment 20001560 PARAMETER Experiment Name: At_Drought_Soil_Dry_P Parameter: Plant Line Value: WS
  misc_feature: MA Experiment 20001560 PARAMETER Experiment Name: At_Drought_Soil_Dry_P Parameter: Post Timepoint (hr) Value: None
  misc_feature: MA Experiment 20001560 PARAMETER Experiment Name: At_Drought_Soil_Dry_P Parameter: Post-Treatment Value: None
  misc_feature: MA Experiment 20001560 PARAMETER Experiment Name: At_Drought_Soil_Dry_P Parameter: Timepoint (day) Value: 14
  misc_feature: MA Experiment 20001560 PARAMETER Experiment Name: At_Drought_Soil_Dry_P Parameter: Treatment Value: Drought vs. No Drought
  misc_feature: MA Experiment ID: 20001757 Result: Up-regulated in Transcription
  misc_feature: MA Experiment 20001757 PARAMETER Experiment Name: At_50mM_NH4NO3_L-to-H_P Parameter: Timepoint (hr) Value: 6
  misc_feature: MA Experiment 20001757 PARAMETER Experiment Name: At_50mM_NH4NO3_L-to-H_P Parameter: Tissue Value: Leaf
  misc_feature: MA Experiment 20001757 PARAMETER Experiment Name: At_50mM_NH4NO3_L-to-H_P Parameter: Treatment Value: 50mM NH4NO3 vs 100mM Mannitol
aaaatccccattttgataatcttcagcagccgttgcctcaaaagatgcagatcttcgtgaaaaccctaacggggaagaccataacccttgaggttgaatcatccgacaccatcgacaatgtgaaggcgaagatccaagacaaggaaggaatcccaccggaccagcagcgattgattttcgccgggaaacagcttgaagacggccgtaccctcgccgactacaacatccagaaggaatcgacgcttcatctcgtcctccgtctccgtggtggtgctaagaagaggaagaagaagacttacaccaagccgaagaagatcaagcacaagcataagaaggttaagctcgctgttcttcagttttacaaaatcgatggatctggaaaggttcagcgtttgaggaaggagtgccctaacgcaacctgtggagctgggactttcatggcgagtcattttgatcgccattactgtggtaagtgtggactcacctacgtttaccagaaagaaggagttgaagcttgatctgttgtagcggtagatcgatccttctctttctctcttatcttttaaaaactgcatttctatttgggaattttgtaagctctttaatttgagttatcatggattctatgttgaacatctttcgttctggattataaattatggaaggttttaggattttatggatattcattatgttgttcgttc

SEQ ID NO: 25950 - protein, 171 aa, Arabidopsis thaliana
  peptide (1)..(171): Ceres Seq. ID no. 12323385
  misc_feature (15)..(88): Pfam Name: Ubiquitin family Pfam Description: Ubiquitin family
  misc_feature (15)..(168): Homolog of NCBI NO: 279636 NR Description: ubiquitin / ribosomal protein S27a - tomato
  misc_feature (15)..(166): Homolog of NCBI NO: 541953 NR Description: ubiquitin/ribosomal protein S27a fusion protein -
  misc_feature (15)..(168): Homolog of NCBI NO: 28395459 NR Description: ubiquitin/ribosomal fusion protein [Malus x
  misc_feature (15)..(170): Homolog of NCBI NO: 25294256 NR Description: ubiquitin extension protein [imported] - common
  misc_feature (15)..(166): Homolog of NCBI NO: 541954 NR Description: ubiquitin/ribosomal protein S27a fusion protein -
  misc_feature (15)..(168): Homolog of NCBI NO: 25294255 NR Description: ubiquitin extension protein [imported] - potato
  misc_feature (15)..(168): Homolog of NCBI NO: 18252349 NR Description: ubiquitin extension protein [Pyrus communis]
  misc_feature (15)..(168): Homolog of NCBI NO: 34581769 NR Description: ubiquitin extension protein [Cucumis sativus]
  misc_feature (15)..(170): Homolog of NCBI NO: 18407264 NR Description: ubiquitin extension protein (UBQ6)
  misc_feature (15)..(171): Homolog of NCBI NO: 15228715 NR Description: ubiquitin extension protein (UBQ5)
NPHFDNLQQPLPQKMQIFVKTLTGKTITLEVESSDTIDNVKAKIQDKEGIPPDQQRLIFAGKQLEDGRTLADYNIQKESTLHLVLRLRGGAKKRKKKTYTKPKKIKHKHKKVKLAVLQFYKIDGSGKVQRLRKECPNATCGAGTFMASHFDRHYCGKCGLTYVYQKEGVEA

SEQ ID NO: 25951 - protein, 157 aa, Arabidopsis thaliana
  peptide (1)..(157): Ceres Seq. ID no. 12323386
  misc_feature (1)..(74): Pfam Name: Ubiquitin family Pfam Description: Ubiquitin family
  misc_feature (1)..(154): Homolog of NCBI NO: 279636 NR Description: ubiquitin / ribosomal protein S27a - tomato
  misc_feature (1)..(152): Homolog of NCBI NO: 541953 NR Description: ubiquitin/ribosomal protein S27a fusion protein -
  misc_feature (1)..(154): Homolog of NCBI NO: 28395459 NR Description: ubiquitin/ribosomal fusion protein [Malus x
  misc_feature (1)..(156): Homolog of NCBI NO: 25294256 NR Description: ubiquitin extension protein [imported] - common
  misc_feature (1)..(152): Homolog of NCBI NO: 541954 NR Description: ubiquitin/ribosomal protein S27a fusion protein -
  misc_feature (1)..(154): Homolog of NCBI NO: 25294255 NR Description: ubiquitin extension protein [imported] - potato
  misc_feature (1)..(154): Homolog of NCBI NO: 18252349 NR Description: ubiquitin extension protein [Pyrus communis]
  misc_feature (1)..(154): Homolog of NCBI NO: 34581769 NR Description: ubiquitin extension protein [Cucumis sativus]
  misc_feature (1)..(156): Homolog of NCBI NO: 18407264 NR Description: ubiquitin extension protein (UBQ6)
  misc_feature (1)..(157): Homolog of NCBI NO: 15228715 NR Description: ubiquitin extension protein (UBQ5)
MQIFVKTLTGKTITLEVESSDTIDNVKAKIQDKEGIPPDQQRLIFAGKQLEDGRTLADYNIQKESTLHLVLRLRGGAKKRKKKTYTKPKKIKHKHKKVKLAVLQFYKIDGSGKVQRLRKECPNATCGAGTFMASHFDRHYCGKCGLTYVYQKEGVEA

SEQ ID NO: 25952 - DNA, 1328 bp, Arabidopsis thaliana
  misc_feature (1)..(1328): Ceres Seq. ID no. 12331502
  misc_feature: MA Experiment ID: 108435 Result: Down-regulated in Transcription
  misc_feature: MA Experiment 108435 PARAMETER Experiment Name: At_stm_Mutants_cDNA_P Parameter: Plant Line Value: wt Landsburg vs stm
  misc_feature: MA Experiment 108435 PARAMETER Experiment Name: At_stm_Mutants_cDNA_P Parameter: Tissue Value: Shoot Apical Meristem Region
  misc_feature: MA Experiment ID: 108488 Result: Up-regulated in Transcription
  misc_feature: MA Experiment ID: 108595 Result: Down-regulated in Transcription
  misc_feature: MA Experiment 108595 PARAMETER Experiment Name: At_Ler-pi_Ovule_cDNA_P Parameter: Plant Line Value: null
  misc_feature: MA Experiment ID: 20000068 Result: Down-regulated in Transcription
  misc_feature: MA Experiment ID: 20000069 Result: Down-regulated in Transcription
  misc_feature: MA Experiment 20000069 PARAMETER Experiment Name: At_100uM_ABA_Mutants_cDNA_P Parameter: Plant Line Value: CS23
  misc_feature: MA Experiment 20000069 PARAMETER Experiment Name: At_100uM_ABA_Mutants_cDNA_P Parameter: Timepoint (hr) Value: 6
  misc_feature: MA Experiment 20000069 PARAMETER Experiment Name: At_100uM_ABA_Mutants_cDNA_P Parameter: Tissue Value: Aerial
  misc_feature: MA Experiment 20000069 PARAMETER Experiment Name: At_100uM_ABA_Mutants_cDNA_P Parameter: Treatment Value: 100uM ABA vs. No Treatment
  misc_feature: MA Experiment ID: 20000070 Result: Down-regulated in Transcription
  misc_feature: MA Experiment 20000070 PARAMETER Experiment Name: At_100uM_ABA_Mutants_cDNA_P Parameter: Plant Line Value: CS24
  misc_feature: MA Experiment 20000070 PARAMETER Experiment Name: At_100uM_ABA_Mutants_cDNA_P Parameter: Timepoint (hr) Value: 6
  misc_feature: MA Experiment 20000070 PARAMETER Experiment Name: At_100uM_ABA_Mutants_cDNA_P Parameter: Tissue Value: Aerial
  misc_feature: MA Experiment 20000070 PARAMETER Experiment Name: At_100uM_ABA_Mutants_cDNA_P Parameter: Treatment Value: 100uM ABA vs. No Treatment
  misc_feature: MA Experiment ID: 20000087 Result: Down-regulated in Transcription
  misc_feature: MA Experiment 20000087 PARAMETER Experiment Name: At_100uM_ABA_Mutants_cDNA_P Parameter: Plant Line Value: WS
  misc_feature: MA Experiment 20000087 PARAMETER Experiment Name: At_100uM_ABA_Mutants_cDNA_P Parameter: Timepoint (hr) Value: 6
  misc_feature: MA Experiment 20000087 PARAMETER Experiment Name: At_100uM_ABA_Mutants_cDNA_P Parameter: Tissue Value: Aerial
  misc_feature: MA Experiment 20000087 PARAMETER Experiment Name: At_100uM_ABA_Mutants_cDNA_P Parameter: Treatment Value: 100uM ABA vs. No Treatment
  misc_feature: MA Experiment ID: 20000090 Result: Down-regulated in Transcription
  misc_feature: MA Experiment ID: 20000185 Result: Down-regulated in Transcription
  misc_feature: MA Experiment 20000185 PARAMETER Experiment Name: At_Roots__P Parameter: Age (day) Value: 7 vs. 21
  misc_feature: MA Experiment 20000185 PARAMETER Experiment Name: At_Roots__P Parameter: Organism Value: A. thaliana
  misc_feature: MA Experiment 20000185 PARAMETER Experiment Name: At_Roots__P Parameter: Tissue Value: Roots vs. Whole Plant
  misc_feature: MA Experiment ID: 20000438 Result: Up-regulated in Transcription
  misc_feature: MA Experiment 20000438 PARAMETER Experiment Name: At_Shoots__P Parameter: Age (day) Value: 14
  misc_feature: MA Experiment 20000438 PARAMETER Experiment Name: At_Shoots__P Parameter: Tissue Value: Shoots vs. Whole Plant
  misc_feature: MA Experiment ID: 20000439 Result: Down-regulated in Transcription
  misc_feature: MA Experiment 20000439 PARAMETER Experiment Name: At_Roots__P Parameter: Age (day) Value: 14 vs. 21
  misc_feature: MA Experiment 20000439 PARAMETER Experiment Name: At_Roots__P Parameter: Organism Value: A. thaliana
  misc_feature: MA Experiment 20000439 PARAMETER Experiment Name: At_Roots__P Parameter: Tissue Value: Roots vs. Whole Plant
  misc_feature: MA Experiment ID: 20000452 Result: Up-regulated in Transcription
  misc_feature: MA Experiment 20000452 PARAMETER Experiment Name: At_CS6879_Shoots-Roots_P Parameter: Age (day) Value: 14
  misc_feature: MA Experiment 20000452 PARAMETER Experiment Name: At_CS6879_Shoots-Roots_P Parameter: Organism Value: A. thaliana
  misc_feature: MA Experiment 20000452 PARAMETER Experiment Name: At_CS6879_Shoots-Roots_P Parameter: Plant Line Value: CS6879 vs. WS
  misc_feature: MA Experiment 20000452 PARAMETER Experiment Name: At_CS6879_Shoots-Roots_P Parameter: Tissue Value: Shoots
  misc_feature: MA Experiment ID: 20001248 Result: Down-regulated in Transcription
  misc_feature: MA Experiment 20001248 PARAMETER Experiment Name: At_Far-red-induction_P Parameter: Age (day) Value: 7
  misc_feature: MA Experiment 20001248 PARAMETER Experiment Name: At_Far-red-induction_P Parameter: Light Value: Far-red vs. White
  misc_feature: MA Experiment 20001248 PARAMETER Experiment Name: At_Far-red-induction_P Parameter: Organism Value: A. thaliana
  misc_feature: MA Experiment 20001248 PARAMETER Experiment Name: At_Far-red-induction_P Parameter: Plant Line Value: Columbia
  misc_feature: MA Experiment 20001248 PARAMETER Experiment Name: At_Far-red-induction_P Parameter: Timepoint (hr) Value: 4
  misc_feature: MA Experiment 20001248 PARAMETER Experiment Name: At_Far-red-induction_P Parameter: Tissue Value: Whole Plant
atgtccaccatccgttcacttggccgcgttcatataaaccaaaaaccgaacaacaacaaaaattcgaaaattctccggcgacaccaacaatgggaaggtctctaatattctctggaaacatgtcattgagaatctctcacttacccggatcatctcttccgctgcaaaacccaatttcaggccggacagtgaacagaactttccgatatcggtgtacgaggattttgtctaatagcttcaagtccacaacgagacttcaaaccaaagctgttctgtctgaggtttctgatcagacgcgatatcccagaatcggcgctaaaaccaccggaactatatctccggcacacctccttgaagtcgttgaactcgccgctaaaaccggcgctgaggtggttatggaagctgtaaataagccaaggaatattacttataaaggtctcagtgacttagtaactgatactgataaagcaagcgaggctgctattttggaagtagtgaagaagaattttagtgatcatcttattcttggtgaagaaggaggtatcatcggcgattcgtcttctgattacctctggtgcattgatcctctagatggaactacaaattttgctcatggatatcccagttttgctgtttccgtcggtgttctgtatcgtggaaatcccgccgctgcttctgtggtagagtttgtcggtggtccgatgtgctggaacactcgaaccttttctgcaactgcaggtggtggagcattgtgtaacgggcaaaaaattcatgtcagtaagaccgatgctgtggagagagcacttcttatcacagggtttggttatgaacatgatgatgcatggagcactaacatggaactgttcaaagagtttactgatgtgagtcggggagtgcgaagactcggtgctgctgcagttgacatgtgtcatgttgcacttgggattgcggaatcatattgggagtaccgtttaaagccatgggacatggctgctggtgttcttatagttgaggaagctggaggagctgtgactcggatggacggagggaagttttctgtgtttgataggtctgttttggtctccaacggcgttcttcaccccaagcttctggaaagaattgcacccgcaactgagaatttgaagtcgaaaggaatcgatttctcgttatggttcaaaccggaagattatcatacagagctttaagacttgttcaagaaaggtatataagattacattgttatgatctaaagctcttatatttgaactgaaacgaggtataagatttgcgttcggattatgaaaatcaataatgatcatattccccct

SEQ ID NO: 25953 - protein, 400 aa, Arabidopsis thaliana
  peptide (1)..(400): Ceres Seq. ID no. 12331503
  misc_feature (114)..(380): Homolog of NCBI NO: 39996045 NR Description: inositol-1-monophosphatase [Geobacter
  misc_feature (117)..(369): Homolog of NCBI NO: 23127553 NR Description: hypothetical protein [Nostoc punctiforme]
  misc_feature (117)..(395): Homolog of NCBI NO: 22299200 NR Description: ORF_ID:tlr1657~extragenic suppressor protein SuhB
  misc_feature (117)..(369): Homolog of NCBI NO: 17230409 NR Description: inositol monophophatase family [Nostoc sp. PCC
  misc_feature (117)..(377): Homolog of NCBI NO: 37520891 NR Description: inositol monophophatase family [Gloeobacter
  misc_feature (40)..(130): Homolog of NCBI NO: 25518324 NR Description: hypothetical protein F28K20.15 [imported] -
  misc_feature (153)..(400): Homolog of NCBI NO: 25518324 NR Description: hypothetical protein F28K20.15 [imported] -
  misc_feature (30)..(400): Homolog of NCBI NO: 21537207 NR Description: unknown [Arabidopsis thaliana]
  misc_feature (30)..(400): Homolog of NCBI NO: 18397837 NR Description: expressed protein
  misc_feature (30)..(400): Homolog of NCBI NO: 14423530 NR Description: Unknown protein [Arabidopsis thaliana]
VHHPFTWPRSYKPKTEQQQKFENSPATPTMGRSLIFSGNMSLRISHLPGSSLPLQNPISGRTVNRTFRYRCTRILSNSFKSTTRLQTKAVLSEVSDQTRYPRIGAKTTGTISPAHLLEVVELAAKTGAEVVMEAVNKPRNITYKGLSDLVTDTDKASEAAILEVVKKNFSDHLILGEEGGIIGDSSSDYLWCIDPLDGTTNFAHGYPSFAVSVGVLYRGNPAAASVVEFVGGPMCWNTRTFSATAGGGALCNGQKIHVSKTDAVERALLITGFGYEHDDAWSTNMELFKEFTDVSRGVRRLGAAAVDMCHVALGIAESYWEYRLKPWDMAAGVLIVEEAGGAVTRMDGGKFSVFDRSVLVSNGVLHPKLLERIAPATENLKSKGIDFSLWFKPEDYHTEL

SEQ ID NO: 25954 - protein, 371 aa, Arabidopsis thaliana
  peptide (1)..(371): Ceres Seq. ID no. 12331504
  misc_feature (85)..(351): Homolog of NCBI NO: 39996045 NR Description: inositol-1-monophosphatase [Geobacter
  misc_feature (88)..(340): Homolog of NCBI NO: 23127553 NR Description: hypothetical protein [Nostoc punctiforme]
  misc_feature (88)..(366): Homolog of NCBI NO: 22299200 NR Description: ORF_ID:tlr1657~extragenic suppressor protein SuhB
  misc_feature (88)..(340): Homolog of NCBI NO: 17230409 NR Description: inositol monophophatase family [Nostoc sp. PCC
  misc_feature (88)..(348): Homolog of NCBI NO: 37520891 NR Description: inositol monophophatase family [Gloeobacter
  misc_feature (11)..(101): Homolog of NCBI NO: 25518324 NR Description: hypothetical protein F28K20.15 [imported] -
  misc_feature (124)..(371): Homolog of NCBI NO: 25518324 NR Description: hypothetical protein F28K20.15 [imported] -
  misc_feature (1)..(371): Homolog of NCBI NO: 21537207 NR Description: unknown [Arabidopsis thaliana]
  misc_feature (1)..(371): Homolog of NCBI NO: 18397837 NR Description: expressed protein
  misc_feature (1)..(371): Homolog of NCBI NO: 14423530 NR Description: Unknown protein [Arabidopsis thaliana]
MGRSLIFSGNMSLRISHLPGSSLPLQNPISGRTVNRTFRYRCTRILSNSFKSTTRLQTKAVLSEVSDQTRYPRIGAKTTGTISPAHLLEVVELAAKTGAEVVMEAVNKPRNITYKGLSDLVTDTDKASEAAILEVVKKNFSDHLILGEEGGIIGDSSSDYLWCIDPLDGTTNFAHGYPSFAVSVGVLYRGNPAAASVVEFVGGPMCWNTRTFSATAGGGALCNGQKIHVSKTDAVERALLITGFGYEHDDAWSTNMELFKEFTDVSRGVRRLGAAAVDMCHVALGIAESYWEYRLKPWDMAAGVLIVEEAGGAVTRMDGGKFSVFDRSVLVSNGVLHPKLLERIAPATENLKSKGIDFSLWFKPEDYHTEL

SEQ ID NO: 25955 - protein, 361 aa, Arabidopsis thaliana
  peptide (1)..(361): Ceres Seq. ID no. 12331505
  misc_feature (75)..(341): Homolog of NCBI NO: 39996045 NR Description: inositol-1-monophosphatase [Geobacter
  misc_feature (78)..(330): Homolog of NCBI NO: 23127553 NR Description: hypothetical protein [Nostoc punctiforme]
  misc_feature (78)..(356): Homolog of NCBI NO: 22299200 NR Description: ORF_ID:tlr1657~extragenic suppressor protein SuhB
  misc_feature (78)..(330): Homolog of NCBI NO: 17230409 NR Description: inositol monophophatase family [Nostoc sp. PCC
  misc_feature (78)..(338): Homolog of NCBI NO: 37520891 NR Description: inositol monophophatase family [Gloeobacter
  misc_feature (1)..(91): Homolog of NCBI NO: 25518324 NR Description: hypothetical protein F28K20.15 [imported] -
  misc_feature (114)..(361): Homolog of NCBI NO: 25518324 NR Description: hypothetical protein F28K20.15 [imported] -
  misc_feature (1)..(361): Homolog of NCBI NO: 21537207 NR Description: unknown [Arabidopsis thaliana]
  misc_feature (1)..(361): Homolog of NCBI NO: 18397837 NR Description: expressed protein
  misc_feature (1)..(361): Homolog of NCBI NO: 14423530 NR Description: Unknown protein [Arabidopsis thaliana]
MSLRISHLPGSSLPLQNPISGRTVNRTFRYRCTRILSNSFKSTTRLQTKAVLSEVSDQTRYPRIGAKTTGTISPAHLLEVVELAAKTGAEVVMEAVNKPRNITYKGLSDLVTDTDKASEAAILEVVKKNFSDHLILGEEGGIIGDSSSDYLWCIDPLDGTTNFAHGYPSFAVSVGVLYRGNPAAASVVEFVGGPMCWNTRTFSATAGGGALCNGQKIHVSKTDAVERALLITGFGYEHDDAWSTNMELFKEFTDVSRGVRRLGAAAVDMCHVALGIAESYWEYRLKPWDMAAGVLIVEEAGGAVTRMDGGKFSVFDRSVLVSNGVLHPKLLERIAPATENLKSKGIDFSLWFKPEDYHTEL

SEQ ID NO: 25956 - DNA, 1296 bp, Arabidopsis thaliana
  misc_feature (1)..(1296): Ceres Seq. ID no. 12331498
  misc_feature: MA Experiment ID: 20000180 Result: Up-regulated in Transcription
  misc_feature: MA Experiment 20000180 PARAMETER Experiment Name: At_Germinating_Seeds_P Parameter: Age (hr) Value: 24 vs. 0
  misc_feature: MA Experiment 20000180 PARAMETER Experiment Name: At_Germinating_Seeds_P Parameter: Tissue Value: Germinating Seeds
  misc_feature: Phenotype: ROSETTE LEAVES Shape-Oval
  misc_feature: Phenotype: ROSETTE LEAVES Shape-Oval
  misc_feature: Phenotype: WHOLE PLANT Color-Dark Green
  misc_feature: Phenotype: WHOLE PLANT Size-Small
  misc_feature: Phenotype: INFLORESCENCE Flowering Time-Late Flowering
  misc_feature: Phenotype: ROSETTE LEAVES Shape-Oval
  misc_feature: Phenotype: ROSETTE LEAVES Other
tgaatttcgaaaaatcagtccgttgtgaaagcccaagaataaggattctataatttcaggtctcatttaattatataaccgatctacactttgatctccgacaattcactttcccaataagaaccaactgagagagagagagcgccggagaagaagaattttagagagcgatggacgagggagttatagcagtttccgccatggatgctttcgagaagcttgagaaagttggtgaagggacatacgggaaagtttacagagccagagagaaagctaccgggaaaatcgtcgctctaaagaagacgcgtctccatgaggacgaagaaggcgttccttccaccactctccgcgagatctccattttgcgaatgctcgctcgtgatcctcacgtcgtcaggttaatggatgttaagcaaggactaagcaaagaaggcaaaactgtactgtacctggtttttgaatacatggacactgatgtcaagaaattcatcagaagtttccgtagcactggcaagaacattccaacccaaactatcaagagcttgatgtatcaactatgcaaaggtatggcattctgccatggtcacgggatattgcacagagatctcaagcctcacaatctcttgatggatcccaagacaatgaggctcaaaatagcagatcttggtttagccagagccttcactctgccaatgaagaagtatacccatgagatattaactctttggtatagagctccagaggttcttcttggtgccacccattactctacagctgtggatatgtggtctgttggctgcatatttgctgaacttgtgaccaaccaagcaatctttcagggagactctgagctccaacagctcctccatattttcaagttgtttgggacacccaatgaagaaatgtggccaggagtgagcacactcaagaactggcatgaatacccacagtggaaaccatcgactctatcctctgctgttccaaacctcgacgaggctggagttgatcttctatctaaaatgctgcagtacgagccagcgaaacgaatctcagcaaagatggctatggagcatccttactttgatgatctgccagaaaagtcctctctctaaggatttaaaatcttcagttagtatctttccaagttttatggtttttctagttttgcttctttcaagcatatctctagtgtgctgcttccccctctatgaatcatcctttctttagcataatatatcacttctgattgttgtttctttctattcgaatatttggattaacggctttaatgttctt

SEQ ID NO: 25957 - protein, 313 aa, Arabidopsis thaliana
  peptide (1)..(313): Ceres Seq. ID no. 12331499
  misc_feature (14)..(304): Pfam Name: Protein kinase domain Pfam Description: Protein kinase domain
  misc_feature (11)..(253): Homolog of NCBI NO: 11558194 NR Description: cyclin dependent kinase (cdc2b) [Chenopodium
  misc_feature (11)..(307): Homolog of NCBI NO: 7489567 NR Description: protein kinase cdc2 homolog - rice
  misc_feature (9)..(313): Homolog of NCBI NO: 5921447 NR Description: CELL DIVISION CONTROL PROTEIN 2 HOMOLOG D
  misc_feature (7)..(313): Homolog of NCBI NO: 11125685 NR Description: B2-type cyclin dependent kinase [Lycopersicon
  misc_feature (6)..(313): Homolog of NCBI NO: 7434327 NR Description: probable cdc2-like protein kinase cdc2MsF -
  misc_feature (11)..(313): Homolog of NCBI NO: 21536682 NR Description: putative cell division control protein cdc2
  misc_feature (7)..(313): Homolog of NCBI NO: 15218072 NR Description: Cyclin-dependent kinase B2
  misc_feature (11)..(313): Homolog of NCBI NO: 21537217 NR Description: putative cell division control protein cdc2
  misc_feature (1)..(313): Homolog of NCBI NO: 14488071 NR Description: At1g76540/F14G6_14 [Arabidopsis thaliana]
  misc_feature (1)..(313): Homolog of NCBI NO: 15223081 NR Description: Cyclin-dependent kinase B2
MDEGVIAVSAMDAFEKLEKVGEGTYGKVYRAREKATGKIVALKKTRLHEDEEGVPSTTLREISILRMLARDPHVVRLMDVKQGLSKEGKTVLYLVFEYMDTDVKKFIRSFRSTGKNIPTQTIKSLMYQLCKGMAFCHGHGILHRDLKPHNLLMDPKTMRLKIADLGLARAFTLPMKKYTHEILTLWYRAPEVLLGATHYSTAVDMWSVGCIFAELVTNQAIFQGDSELQQLLHIFKLFGTPNEEMWPGVSTLKNWHEYPQWKPSTLSSAVPNLDEAGVDLLSKMLQYEPAKRISAKMAMEHPYFDDLPEKSSL

SEQ ID NO: 25958 - protein, 303 aa, Arabidopsis thaliana
  peptide (1)..(303): Ceres Seq. ID no. 12331500
  misc_feature (4)..(294): Pfam Name: Protein kinase domain Pfam Description: Protein kinase domain
  misc_feature (1)..(243): Homolog of NCBI NO: 11558194 NR Description: cyclin dependent kinase (cdc2b) [Chenopodium
  misc_feature (1)..(297): Homolog of NCBI NO: 7489567 NR Description: protein kinase cdc2 homolog - rice
  misc_feature (1)..(303): Homolog of NCBI NO: 5921447 NR Description: CELL DIVISION CONTROL PROTEIN 2 HOMOLOG D
  misc_feature (1)..(303): Homolog of NCBI NO: 11125685 NR Description: B2-type cyclin dependent kinase [Lycopersicon
  misc_feature (1)..(303): Homolog of NCBI NO: 7434327 NR Description: probable cdc2-like protein kinase cdc2MsF -
  misc_feature (1)..(303): Homolog of NCBI NO: 21536682 NR Description: putative cell division control protein cdc2
  misc_feature (1)..(303): Homolog of NCBI NO: 15218072 NR Description: Cyclin-dependent kinase B2
  misc_feature (1)..(303): Homolog of NCBI NO: 21537217 NR Description: putative cell division control protein cdc2
  misc_feature (1)..(303): Homolog of NCBI NO: 14488071 NR Description: At1g76540/F14G6_14 [Arabidopsis thaliana]
  misc_feature (1)..(303): Homolog of NCBI NO: 15223081 NR Description: Cyclin-dependent kinase B2
MDAFEKLEKVGEGTYGKVYRAREKATGKIVALKKTRLHEDEEGVPSTTLREISILRMLARDPHVVRLMDVKQGLSKEGKTVLYLVFEYMDTDVKKFIRSFRSTGKNIPTQTIKSLMYQLCKGMAFCHGHGILHRDLKPHNLLMDPKTMRLKIADLGLARAFTLPMKKYTHEILTLWYRAPEVLLGATHYSTAVDMWSVGCIFAELVTNQAIFQGDSELQQLLHIFKLFGTPNEEMWPGVSTLKNWHEYPQWKPSTLSSAVPNLDEAGVDLLSKMLQYEPAKRISAKMAMEHPYFDDLPEKSSL

SEQ ID NO: 25959 - protein, 247 aa, Arabidopsis thaliana
  peptide (1)..(247): Ceres Seq. ID no. 12331501
  misc_feature (1)..(238): Pfam Name: Protein kinase domain Pfam Description: Protein kinase domain
  misc_feature (1)..(187): Homolog of NCBI NO: 11558194 NR Description: cyclin dependent kinase (cdc2b) [Chenopodium
  misc_feature (1)..(241): Homolog of NCBI NO: 7489567 NR Description: protein kinase cdc2 homolog - rice
  misc_feature (1)..(247): Homolog of NCBI NO: 5921447 NR Description: CELL DIVISION CONTROL PROTEIN 2 HOMOLOG D
  misc_feature (1)..(247): Homolog of NCBI NO: 11125685 NR Description: B2-type cyclin dependent kinase [Lycopersicon
  misc_feature (1)..(247): Homolog of NCBI NO: 7434327 NR Description: probable cdc2-like protein kinase cdc2MsF -
  misc_feature (1)..(247): Homolog of NCBI NO: 21536682 NR Description: putative cell division control protein cdc2
  misc_feature (1)..(247): Homolog of NCBI NO: 15218072 NR Description: Cyclin-dependent kinase B2
  misc_feature (1)..(247): Homolog of NCBI NO: 21537217 NR Description: putative cell division control protein cdc2
  misc_feature (1)..(247): Homolog of NCBI NO: 14488071 NR Description: At1g76540/F14G6_14 [Arabidopsis thaliana]
  misc_feature (1)..(247): Homolog of NCBI NO: 15223081 NR Description: Cyclin-dependent kinase B2
MLARDPHVVRLMDVKQGLSKEGKTVLYLVFEYMDTDVKKFIRSFRSTGKNIPTQTIKSLMYQLCKGMAFCHGHGILHRDLKPHNLLMDPKTMRLKIADLGLARAFTLPMKKYTHEILTLWYRAPEVLLGATHYSTAVDMWSVGCIFAELVTNQAIFQGDSELQQLLHIFKLFGTPNEEMWPGVSTLKNWHEYPQWKPSTLSSAVPNLDEAGVDLLSKMLQYEPAKRISAKMAMEHPYFDDLPEKSSL
